United States Patent Application Publication US 2009/0018031 A1 - sequence listing, part 23

SEQ ID NO: 12139 - DNA, 6000 bp, Homo sapiens
gcaggcaagaacccatcaggggattgcactaccagtgatctacttttgagactcctgcctctgcttttttttttttttgagacggagttttgttcgctcttgttgcccaggctggagtgcaatgtcgcaatctcagctcactgcgacctccgcctccccagattcaagcaattctcctgcctcagcctcccaagtagctggaattataggttcctgccaccatgcccagctaattttttgtatttttagcagagatggcgtttcactatgttggccaggctggtctcaaactcctgacctcaggaatccaccccccttggcctcccaaagaggtgggattacaggcgtgagccgccgcacctggcccgacttttgcttttagtcggggagatttttattatttcaaaatgtttgtatatattgaaatttttaaaatcttttatattgtactattttcaatgcataatttaaatgaacataaaacaagtatgcactataggagctttaggtgttgttgggctcagaatccaataccccaaaatatggcattttgacatgttgacatggagaaacctcaaggtctctctgacttcccctgccaccgtctcccacaaagaagtggaagttcctttatctgcgtaagattcagacccatcaaagaaagtaattgcttgttcttcccctccctgtaagaccaagaatgtaaccacacctgaacactttcactatcaaagagaactattcacacattaatctctgttcagagatccattcattctccctagtaatcccctcagcaattcctcttctcttcacctcccaaaacctgttttaccaggattcaagcccccattctttctgtaacctccagatagtatataaacttctggacctcattgggaggctaggtcttcattttgaagtctcccgtgtgtatacgttcaatacattggtatgccttttctcctattaataaatctgcctgtcagtgattttgaagcaaaccttcaggggaccaagggccttggtcctcccagtgtgaaagtgcaatgggtgatgtaaggcctcttgtcacccaggctggagtgcagtggtgcaatcatagctccctgcaacctcaaactcctgggctcaagccatcctcttgcctcagcctcccaagtagtgaggactacaggcatgtgccatcatgcccaggttatttatttatttttttaagttttgtagagccaagatttcactaagttgcccaggttggtctcaaactcctggcttcaagtgatacttctgcctcagcctcccaaagtgctgggaatataggtgtgagtcgacactcccggctctatggtagacactttggaaatgcaaaaagtagaaggcaaagaagaccattgttaaaattttgacatatttcttttgtcatattctccacctactgggttcaagcgattctcctgcctcagcctctcgagtagctgggattacaggcacccgccaccacgcctggctaatttttgtatttttagtagagatgggcaattcctgatgatcaatgagcaagagttctcgtgggtctgaaggggttcagagtgtgttaatgacaggcaggtgttaaaagatggtgttaagagatgcctgtccaggttgactccaagtaaaattggtggtgatatttgttttgtgccagggagtgttctaagcctttcacacagattattgtattaaattattaaaatacctccatgaggtaaagataattaatgcccccattttacagatgaagaaactgagacataaaaaatttaagccaggtgcccaaggtcaccaagctgataagtggtggtgctgggatttaagcctaaatactttaccccgagaaccctagtgtaattgtcttattacaacccagaaagttgtgatgtacacatagttcctcagatgcttccacttttttctcccctcaggaatgtttattttgtaaatactgccctatctacaactgtaatgagcatgggtatgcttatggtcaacacttttttttttttttaaatagatagagtctcgctctgtcacccaggctggagtacagtggtacaattatagctccctgcaacctcgaactcccgggctcaaactatcctcttgcctcagcctcccaagtagcagagactacaggcatgtgccatcatggccagattattattattattaagttttgtagaatcaagatttcactaagttgcccaggttggtctcaaactcctagcctcaagtgatccttctgcctcagcctcccaaactgctgggaatataattgtgagccaacacgcccagctctatggtagacactttggaaatataaaagatagaaggcaaagatgaccattgttaaaattttggcatatttcttctggtctttttttctaagcacatggttttatttcgtctgtttgttggttggttggtcggtttagtttttgtagagacagtggtctaattatgttgtccaggctggtcctaaactcctgggcttaagcagtcctaccatctcggcttcccaaagtgctgggattacgggtgtgagccactgcacctggccaatatgtttattttacacacatgtgatcaaattgtacatgcaattttagtatttctttcttccctttatatttataaatatagatttataacatgtgccatcccatgctgttaaaaacttcataaacttcctttatgtaggctgcataaggtactgttgcttggcagttccataatatatttaccattccatttatgttggacatttgcgttttttccagctgtttttttactgtgggacaaatctgttctctcgcgcacgctctctctcttttttttttatgagacagggtttccctccggtcgcccaggcaggagtgctgcagcgtgatctcggctcaccgcaacctccacctcctgggttcaagtgattctcctgtctcagcctcccgaatagctgggattacaggtgcatggccctaaacccggctaatttttgtatttttggtagacgggatttccccatgttggccaggctggtctcgaactcttgacctcaagtgatccgcctgccttggcctcccaaattgctggaattacaggtgtgagccatcgcgcccgggactattctccctttcttgatagtttcccttctgacatttccttccttctttctttcttttttctttttttttgacagtctcgctctgtcgcctaggctggagcgcagtggcttgatctcagcttactgcaatctccaccttccaggttcaagcgattctcctccctcagcctcccaagtagctgcgactacaggcacgtgccaccacgcccggctaatttttttgtatttttagcagagacggggtttcactgtgttagccaggatggtctcaatctcctgacctcgtgatccgctcgcctcggactcccaaagtcctgagattacaggcaagagccaccgcacccgggtccccttctgacatttcttcagatcttcctcggacacccaacgaccttaaaatccctctaaccttctttctctcaaagtttactttctataaagagctgataaactcattcatactaaagtctacagggttgtaaatcttaatctattatcgcttaaaagatgcttgtatcaatttacaccaaagggatgaagctctaattgtggggatttagtcatcagaaaatctagtaggggaaattctccctacccacaatcagagtagattctacaatagcaaaaagggttccaggctcacttaactttaggaacgctgataagaagaccgcttacagctgcggaggtactgatttggtaaagggagggaaagagattgtatacgtgagagtgaaaaaattgggtagaaaaatggaagagcatcagaaattcacttagcaacaccaaatatatttggcaccactaacctagtttctcctgtgtttgcctttccaatccgttggaccttaggggatggaccgcccactttctccccagagcggctcccgggtccggttctcagttctaatcactgccccaagcctccatgctccagggcctgtggtcacagagcaagtcccaaggagcagaagtaaagttctaagagaaatcaccatctccttgtgcagggaacactcccaagcccagtgtccacagacaaatcacctccagcgactcgaagaggagaataatccctgtgggggcactggaggctccgcgtgaaagtttccaaagccatgttctgccccaggactcctttctctcctcccagaagcttcaggctttcgcggctgctggcacatcccagcctgagtagccgagcaagagggacccaaggcaggatcagcttcccccgacttgaaagggcacccgttctgcaggtgccggcgctggaaatagctggtgtggagaacggagagggagacgtgcaggatgaagtccgcgcccaggagggcagtggctccgcctctctgggttagggacagaagaaaacccttaacccaaagccctagcatgagtgaggcgtggaaagcgagacagactccagtggaaggctgtggggcgggactcagggttcccggagaggccgccccagctcctgccgcagcgctgggcgccctaccacgcctgctccctagggaccccgggcgtcccacgcacgcacccaccctccttcccgggcctgccgctcctccctccttcctcgctggttggcccaggcgccgcagagcgcggcggcagcaggaggagccgggcgcgcctgccacgcaaaactaccgggctggcagggcggcgggcgcggtgcgcgatcccgggtggcggcggcaacggcggtggtgacggcggcgactgcagcggccggctctcacctctcccctgtgcacccgcatctcgccgcgccgccgagcagccagcagtccccgggtcgcccagcccacgcgcgcacggccgagcccagcgcacaatagcggcgacagccatggggaaaccggcgaggaaaggatgcgagtggaagcgcttcctgaagaataactgggtgttgctgtccaccgtggccgcggtggtgctaggtgagcggcgcggcgggtgggcgatgcgcgcaccctcacgcgctctctgcgcccaggccgcgtgcggctgagggtgggcttggcgctggcgcactccatgcagggtccctcgatgccccctcggccttagcctcgggccccctgcgggggctttcccccaagcgctctaattactgcacaccaagaacaaagctcctctgggactcccatttgagtgctccttgagctgctggttcctgctctacccaaaatgatcaaaggggcttgggggtagaaagggaagcaagtagctcttggttctgctcgtttgaaaacagggttcgatttttttctttgttaatcccgcaccgtatctccccctatcaccgccaccttcctcaccccacacccccagcctcgctgcgcgggcagagattgagtgtggattacagttctcagtcgaattggaagaggcaccctggcctccgggatgggccggacccttaggggagggaggctgagaacgctgtcgccgctcatcctgggcagtgcgtggaaaggtgccttcccacgcggcgagcgccgactgcctgcacccgggctctgaaaagctgccagattcgtgcctgaattctgggatgtgccactgtggcccgcgggaggtcaccggggaagagagctaagagaactcagccgtctcttctcctgccttccttgctctccacgttgtttttgtatttaagataatgtttaagccatccttgcctgtttttaaacaagggtgtatttaagtgatccacccctcacagatcactggaccaggtggatgtctgagccattgctcagaggtatgagttattcctatttagattctgattttttaccaaggttgtgtgtttctagctc

SEQ ID NO: 12140 - DNA, 6000 bp, Homo sapiens
cacagtcaaattctaccagatgtacaaagaagagctgacaccattcctagataaattattccaaaaaaattgaggagaaggggctcctccccaggtcattctatgaggccagcataatcctgatactaaaacctggaagagacacaataacatcaacaaaaaacttcaggccaatatccttgatggacattgatgcaagaatccttaacaaaatactaacacactgaatgcagcagcacatcaaaaagcaaatccaccatgatctagtaggctttatacccaggaggcaaggttggttcaacatactcaaatcaataaatgtgattaattacatagacaggactaaagacaaaaaccacatgattatctcaatagatgtagaaaggttttttataaaattcaacatttctttatgttaaaaatgctcaacaaactaggtattgaaagaacatgcctcaaaataagagccaactatgacgaactcacagccaacatcatactgaataggcaaaggctggaagcattccccttgaaaaccagcacaagacaaaaatgccctctctcaccactcctattcaacatagtattggaagtcctggccagagcactcaggcaagagaaagaaagaaaaggcatccaaataggaagaagggaagttaaacaatccctgtttgcagatgacatgattctatatctagaaaacccctagtctcagcccaaatgctccttaagctgataaacaacttcagcaaagtttcaggatacaaaataaatgtacaaaaatcactagcattcctatacaccagcaacagcgaagccgagagccaaatcaggaacacaattgcacttgcaatttccacaaaaaaaaaaaaaatacctacgaatacagctaaacagggaggtgaaagagctctacaatgagaattacaaaatactgctagaagaaattagagattacacaaacaaatgggaaaacattccatgctcatggataggaagaatcaatatcattaaaacgaccaaagcggtttatagattcaatgctgtttccaccaaactaccagtgatattcttcactgaactagaaaaaaatattttaaaatttatatggaaccaacaaagagcccaaatagccaaggcaatcaaagcaaaaagaacaaagccagaggcatcatcctaccagacttcaaactatactacaagggtacagtaaccaaaacaccatggttctggtacaaaaacagacacatagaccaatggaacagaatagagaacccagaaataaggctgcacacctacaattatctgatctttgacaaagctgacaaaaacaagcaatggagaaaggacttcctactcaataaatggggctgggataactggctagccatatacagaagatggaaactagactccttccttacaccagatacagaaatcaacttaagatggattaacaacttaaatgtaaaacctaaaactataaaaaaccctggaagacaatataggcaataccattctggacatagaagtgagtgaagatttcatgacaaagacaccaaaagcaattgcaacaaaagcaaaaattgacaaatgggatctaattaaactaaagagcttctacacagcaacagaaactatcaacaaagtaaacacacaacctacagaatgggagaaaagttttgcaaactatgcatctgacaaaggtctaatatccagtatctataaggaacttaaacaaatttacaagaagaaaacaaacaacccaattaaaaagtgggcaaaggacatgaacaggcgtttttcaaaagaagacatacacatggccaacaagcatataaaaaagctcaatattacttatcattaaagaaatgcaaatccaaatcacaatgagagatcctctcacaccagtcagaatggctattattaaaaagttaataagttggccgggtgcggtggctcacacctgtaatcccagcactttggaaggctgaggcaggtagatcacaaggtcaggagatccagaccatccaggctaacatggtgaaaccccgtctctgctaaaaatacaaaaaaattagccgggcgtggtggcgggcgcctgtagtcccagctactcaggaggctgaggcaggagaatggcatgaacccaggaggtggagcttgcagtgagctgagatctcaccactgtactccagcctggaagacagagtgagactccatctcaaaaaaaaaaagttaataaacaacatgctgacaaggttatggagaaaagggaatgcttatacactattggtggagtgtaaattagttcaaccattatggaaagcagtgtggcaattcctcaaagagctaaaaacagaactaccattcaatccagcaatcccattactgggtatatacccaaagaaatgtaaatcattctatcacaaagacacatgcacacacatgttcatcatagcactattcacaatagcaaagacatggaatcaacctaaatgcccatcaacgacagactggataaagaaaatgtggtacatatacaccaaggaatactatagagccgtaaaaaagagcatgtcctttgcgggaacatggatggagctggaagtcattatgcttagcaaattaatgcaggaacagaaaaccaaataccacatgtgttcacatataagtgggagctaagtgataagaacacatggacacaaagaggggaacaacacaaactggagcctagctgagggtggaggccccagggaggagggagatgagcaaaaaaaaaaaaaaaaaaaaaaaaaaaaaaaaaaaaaatgactgggttctaggcttagtatctaggggacaaaataatctgtatgacaaacctccatgacacgagtttacctatgtaaaataaaagtttaacaaaaaactaaaaaagttacctatgtaaaacaaaagtttaacaaaaaactaaaaaaagttacctccacccagaaatgcctttattaacactttggtttgtaaccctccattattttctctagacatatagatttatgaggcaggctaatgtgctgagacactagcttgagtttcatttggccttgctgtgaatatacctgggccttcctttgcttcaggatgccctaaactgtggcaaagcagagctgaactgcccaaaggaaagtgtgaagaggagaggcaggccaagcctggagaaaggctacccaagagagaggaaaggaaactgtggtgagtgcacctcactcctaaagaaggacaggaactctggtaggtgaggtgtgttttccatagatactaaaactcaaagccacacaggggacatatgtccattcctcagccagtcactgtggccaggaacagagggtcaggtaagagaatggcaactcctaaggaaaccacatgcctggagccgtgggtgtagaagcagatccccagaggaagcacgggtcccacagacacagtcccaactcttgccgtctaggcagccactcccatctgtaggtactacacagcttcgtagtacttcttaaagtacttcttgttcaagcgatgggacgaaaagaggatgcaggacaaggaggaggaaaggagatccttgcttttgtagaagaaacaaggaggcagggaaggcttagaggacaggcaaggagagatgttttcttaaaaacatcctctgtctgagtgttcagccccacatctctgctggtcctacccctataagcacaaggaaaagggcgggaggcagcaggagaaggattgatcattcaggcctatattcaagtttgccttttcttgccatgtggttttaatctcaccaatcacaagcctgaaggtatagtggggccactgaggtccgagttcaaattcagccatgcaactaaggaaacattgtttgatcttggtcctgttttctcatgtgtaaaatgggtctaactctaaaccacacattgcactgagaatgaaatgaggcactatgaaatgaagtgaggttagttgaataatgttccccccaaattcatgtctactgaggacctcagaatgtgactatatttggaagtagggtctacgcagatgtagtctaaatgaggtcatactgcattagggtgggcactaatcaaacggatggtatcctcataagaggagaggaatgtagagatacacacagaaaagaatgtcatttgaagatggaggcagagattggagtgatacaactataagtcagggaatgccaaggacttgaggtcatgtgttacagaagccctaggaaatgagtcaatttcctggcacagcactaagacatgctggtattcttcattccatccctttcccctattcctaaatgtgctccagggacaatggggaagctggagcacatataagaataggggaaagagagggaataaaagggtattaaaaactctcaaggtatgttaaaaaaaagactctcaacaaaccaggtattgaaggaacatacctcaaaataataagagccatctatgatgaacccacagccaacatcacactgaataggcaaaagctggaaggatgccccttgaaaaccggcacaagacaaggctgccttctctcaccactcctattcaccatactattggaagtcctggccagagcaatcaggcaagagaaagaaagaaaaggcatccaagaaggaagagaggaagtcaaactacccatgtttgcagatgacataattttatatctagaaaatcccacagtctcagcccaaaagctccttaagctgataaacttcagaaagtttcaggatcccacatgaacatacaaaaatcactagtattcctaaacaccaaccatagctaagccaagagccaaatcaggaatgcaatcccattcacagacaaactgctaaaagcaaaaccaaaactttccaaataagccaggctttcgtcagttcctcagaactagttctggtttgactcactctcatgttacggcaaaccttaagctgaatgaacaacttttcttctcttgaatatatcttaacgccaaattttgagtgcttttttgttacccatcctcatatgtcccagctagaaagaatcctgggttggagctactgcatgttgattgttttgtttttccttttggctgttcattttggtggctactataaggaaatctaacacaaacagcaactgttttttgttgtttacttttgcatctttacttgtggagctgtggcaagtcctcatgtgagtaacgagtgggttgagatactctcatactattatgttgtggaccatgatgaggctgccagggtgggggaagggtggcctaccttctctccacaccatttgaggcaagagacattctgcctcagaaattgtgctgaggggcacaaataagctaatgtcctcctgccccagatttctctcacttgttcctatgcatattgttcttgttgctcagttttataaggtgagatattttctgcaccaaatatgtgcactgtaaaataatataactattcttaagattgtctctcagcttagagttttcggaggcttaatggtgaagaacttaaaaatctgttttcctatgactgacatctgtttgtgattatccatttagcagacggtgatccctccaggctggcctttgtttacaagctatgcctaagaggcagctgttggtggagggggaacaaaaacaaaaaacccaaaactattatcttaataacttatagaggtaatcattattgaacaaaagcatgatttggggactatggaaaggcttattctttccatataaaatgatcagcgaaaaggtagaaaaattaaacagaactgaaataattgctattgattgctcaccgcctggatgcactgagtagaagagcaaaggcaatgggttcatgtggaggggatggaggtggagaggctaagcctgagtgagattaccaactaatcaggacttttaacccaaaaatactatggctctgaggggcagggaatgaga

SEQ ID NO: 12141 - DNA, 6000 bp, Homo sapiens
ctcctatgaaagggcaacaggactttctgggattttcaggcataaccctgaagttcaggtagaagttgttttccccaaatcttttgagccaggggcttgtagccttcccaaaagggaacacagtggacgcatggctagcggggaccgaaagcggaagcccgagcagccggctatcaaccctcgtttgtagcaatacctctgcggggtgtgtgagagatcaaaagctcacaatattgtggggagcactgaagagggcctaagccccaagcaggatgagtcaagaggattctggctcctgagcactgtaagcagatgccaaagaggcatctctggccccttcatgaggtgggcctgtgatgccaggtggccaagcccactaggtggcagcagagaaccagtcagtggccagcaaggtctagcaggtacaaatcctaaccctggggctggtgtgggggctgagctgcctcacagtaacagttcacactattgttgctaggcgtattctgtgccacgtgctgtaccaagcacttccaacaggatctcgtttaactctcaccatgaacctatgaagcagatgctgctattatccctttcatttcagatgcgtgcactggggctttcagaggtttgagatttgcccaaggtcacacacactgaagagatgaagtgcaagtggtttggactctagagctcctgctgttagtttgggactagattgccaggggagaaaaggaagccacttggaagtgttgaaaatgaaggcaggtagggcctgacttgggctggctttggtgtggactctgaggcccaaggccggctcaaaaacagagactaagagcctagttagagggaacttctagggggcttccgggaaacaggatgtggtaggtttttcaagttgaggtgcccagggaacccctatttgaagaagcgatcgccagcttatcctgttcacatagccctgaaagggccaggcacctcagaagctgcaaaccactcaaagacccaaagggatgcctgtgaaagagctggtcaggtctccctcgttgagctcaaagaacaaacaagggccaggtgcagtgggtcgcgtctgtaatcccagcactttgggaggcagaggtgggcggaccactagaggtcaggagttcgagaccagcctggccaaaatagcaaaatcctgtctctactaaaaatacaaaaactagctgggcatggtggtgcatacctgtggtcccagctactcaggaggctgaggcaggagaatcgcttgaacccaggaggtggaggttgcagtgacccgagatcacaccactgcattcctgcctgggcaacagaacaagactgtcccccaacccacccaccaaaaaatatctcaaacaagctggagagcatgttcccagactggccattgtgtgcccagcatgctgagtctggtcctgtagcatcctctgggggaggggatgatgccagctgcctgttgtctccaccctggaagaatgccagggcacactcaatccccaagtcagctcacatcaccagagaacttgaatgagacctgggaacttcaccttgccctgagatccaggtcagtactccctcctctgtggtcttgccaccagtcatatatgggccaggctattatagaacccagctcagtgcaatggacttttcagctcagaactgcatccctctttgtagactagtactcaccaccaggactttctgggattttcaggcataaccctgaaattcaggttggagttgctctctccaaatctattgacacaaggggcttatatccttcccaatttttgcacaaaattccctgagatagcctccactctgggaactcagtctaagtcatggtctattgttctgcctcaaggtctccaactggttgttctttctgaaatgctctctctccatcttttcatggctgactgcttcttaccatttaggtctcagtttaaattttccctcctttacagataggctctccctggcttgcctaataaagatcaacccttctttgttttctttctcccttaccattttcagtggtgactatccagtatctggtgggttggtactgcccttacacaggacagcctttgtccatagctcacgatggaaaccagaaaaatcacaggatctgaaaggaatgggtcctcaggtattatgggaaaggggaccttagaggtcatttaatctaagtcttgagctgctaggactgtcatattccggtggggttttttttctttgttttgtttgttcacaatggctatggagagctggtgagcaaaggtgactgttgtgtcccactgaaatgcttctgggctgtccaagatagatcatgatgttaagtagaatcagctctggggtcaattattaggtgagtgcaaaagtaactgtgatttttgcactgtcggactttgctgtttgatattaaatacattcttaaataaatgtggttatgttatacatcattttaatgggcatttctcactttatgtatttttgctaaagacatcacttgttctttgttgtatgtttattttagactatggaaatgttggacaaaaagcaaattcaagtgattttcttattcgagttcaaaatgagttataaagcagcagagacaatttgcaacatcgacaatgcatttggccctggaactgctaacgaatgtacagggcagtggtggttcaagaagttttgcaaaggagatgagagcctggaagatgaggagctggccactggaagttgacaacgaccagttgagaacaatcatcgaagctgatcctctttcaactacactagaaattgccgaagaactcaacgtcgatcattctacagttgttcagcatttgaagcaaattggaaatgtgaaaaagctcatttagtggttgcttcatgagctgagtgaaaatttaaaaaacggtctttttgaaatgttgtcttatcttattctacacaacaacaaggaagaatttctcaattgagttgtgatgtacaatgaaaagtggattttatatgataactggcaatgaccagctcagtggctggtctgagaagaagctccaaagcacttcccaaagccaaacttgcaccgaaaaaaggtcatggtcactgtttggtggtctctgctggtctgatccactacatctttctgaatcccggtgaaaccattatatctgagaagtatgctcagcaaatcaatgagttgcaccgaatagtacaacacctgcagctggcattaatcaacagaaaaagcccaattgtccatgacagcacctaaccacatgtcacacaaccaatgcttcaaaagttggaataaattgggctacgaacttttgcctcatctgccatattcacctgacctctcatcaaccgactaccacttcttcaatcatcttaacaactttttgcagggaaaatccttccacaaccagcaggatgcagaaaatgctttccaagagttcatcgaatcttgaagcatgaatgtgtatgctacaggaataaacaaacttatttttcattggcaaaaatgtcttcattgcaatggttcctattttgattaataaagatgtgtttgaggctgggcgcggtggctcatgcctgtaatcccagcactttgggaggctgaggcaggtggatcatgaggtcaggagatcgagaccatcctggccaacatggtgaaaccctgtctctactaaaaatacaaaaatttgccaggtgtggtggcgtgcacctgtagtcccagctactcaggaggctgaggcaggagaattgcttgaacctgggaggcagaggttgtagtgagctgagatcctgccactgcactccagcctgggcgacagagtgagtctccatctcagaaaaaaaaaatgtgtttgagcctagttataatgatttaaaattcatggtccgacaccgcaattacttttgcaccaacctaattgatgtctaagtaggtcatattctacctgcaaaaagaaaatttcatctatccctttcacatagatggaaacccactatctccagtggacagttaacaccaaaggcatcacagagaactcatggagctcagctgaggaggtttcagggatttttctatttccttttcttgattatgagagtctgggactagatgctctccagacctgtgcctaaagactcttcaaccctttgagatggagatgagggagggaatagggaacccagtttagtttggatttcagatccttttgtgggtcataagcgtgatgattgggtttccatgttcacgtgtgagatatgcctccctcaaaccttgttacaatgacatgggcaccttacctatctgacatgagaaaaacaaatgtggatttcagataaacaaaaaataactcttttagtgtatatgtcccatagaatatgtggacatatttatcctaaaaatattgtatgggacatagttgtattaagaaactgttcattgtttatctgaagttcaaatttaactgggcatcctcctcagctgagctccatgagttctctgtgatgcctttggtgttaactgtccactggagatagtgggtttccatctatgtgaaagggatagatgaaattttctttttgcaggtagaatatgacctacttagacatcaattaggttggtgcaaaagtaattgtggtgtcggaccatgaattttaaatcattataactaggctcatgtcatattttatgtgacatggcaatcctatggaggagggaccaacatttaaaataaatggcttccctaggatagagcactgggactggggaaaacagaggccacagtcagctgtgactttttgaaggaaggaataaagttggtttctttcatgccaatttagcaattacagacgaccccgtcagaaatctaaacccgtgactatcatgggactcaaaaccaggaaaaaaaataagtcaaaacgattaagagccagagaagcagtcttcatacacgcggccagccagcagacagaggactctcattaaggaaggtaagagcgttgccttctcgccataatcatagtcctcttctcccagaataggatttgggaaattctggctaagtcctctgcctaccctcattgccccgctgatgtgtgacatcaacagaatttctccgcaacgtttgtcagtctccaacctcagagggctcacaaagcctcctcctgaatcctctctcagtcctccaacactaccaagaagaaaagcaattattcaggatggcatcttgctggggagaagcagcctccctgaggtagatgtgttctcctgtcacttaaagaaccacttctcctggtctgagtagtaagaggcgcatttgctgttgctgcaccatttgccaaggctctgagtttgaggtatgggatgtattaaaacaatttaatgaagaattaagattccattctgtcattttgaacacagggttcagtcctatattattcacttgagaggactggtgagtttgactttcatttcttttttacaactgggaagggcaaattacacataaaatgtcccagtggaaaggggtcatgtgtcgaaatccccactcttctgtctcacctctccctgttgttttaaactggggctcattaatataattctatggggatcacacctttgaaattcatgaggacagtaagagagcagaaaaatacacaataataaggaaaggagcttccattattggtttttaatgagcgtacttgaattacggccactgcagtttatggatattttttgttgttcatttgtatgtgttatagttagaaaaaaaaagaatcctagccaagggacttgaaccagagagaagcagaaattgacttaagtaggaagggaaacacattgttagataaagtcaggtcctgggcttcctcggcttgttttgggtggagtgcctggggacaggctgaagcccctgtgtggggtggtttcctttgctgaaaagctgggctggaagatgt

SEQ ID NO: 12142 - DNA, 6000 bp, Homo sapiens
ggaaacagaggtaaattttggttctgatgaagaggtagaaggggtcaggaggtttccatcattgtctgtcttctgcaaggttatctaaaaagtgaagagacatccttaaagtgagtattgaccaaatgtcagttgtctcttcagacttcctatggtttaaaaataaatgaaaagaaaaaagctctgttttcttacctaaatttgagttatattaccaaaggccccttaggtaatggggcctttatacgttccagagtaagtagcatatggtgtgtgcatgcatgtttctctctctctctctctctctcattctgtgtgtgtgtgtgtgtgtgtgtgtgtgtgtgtgtgtgtgtcagtggagagagagagagacgaagaaaagggaggagtgataatccttctaaacgtatacaagttgcttgtgagaaaaatagcagtaatcataacacaccaagtcccttactgctggtaatgcttttcatgtgtctctccagattgcctaattttaacttcttaaatgtctcatctcctcctctataccctggaaaattataatatgctgattcaatttaaaaaagttatttgaaatgtagccaaactcatttgatcttcctcaattcatcactgcatatgggtttcatcccattttattagtaaatttgacactgattatgataaatccatccagtgccacacatctccatctgcaaatttcaaggtttaattttaaactttttagggtaagaggtttttaaaatattttcaacctgtaggatttccaagaccttatttctaaatgtttcaatatgaccaatcttatacatgtgattttatatttctatatcagatataaaaaagatttagattatttaggctttcagttagttctttttatacatgaagctacttttacgagcaagatgaaggggaagtgagatagtggcagttgctgtcttttggatgacaggccaatttacttcttgcttctaaaggaagtaggctttaccctttaaacctcccccatcatatgttcttgcatgtactgtttcctttcatcagtaagttctcctgatcttctctgtctctccctctctctctatctctctctctgtttgactgtttctctgacattacccaaagataactgttttttttttctggtctcagaattattcgatgtcctttagtagtgaggtcagcttccacaaatgcctaattaaaaaaaattttccttaaaataggcaagaggaggaggagttgaattccaaacacctggagtctcctttgattagcagtatttaatttctgatagtacccaatttatggcattttagtgaagacaattctaaaagttaacagagaagtcaggccaatctttccgataggatgacacactcctttgtaaatctttaaatgcttttcattgcattatttgtgagtagggaccagcagtgttcctaaataggaagtgtgttttttgccaacagtaagtcccatagatctctggttttcctgtttagtggagggttactaagagagagtacttaatttctcacagttggaaattttcctggtttctctagaccatgtaattcttcaaaatgttatagggtagaccaagttctgaattttacctgtgcttttgattaggcttcagtttgttttacagattattgtatttcttgtctccttctgtgctttttccacagtgcaggcagtaatcacaatatccttcatagagtgtactaccttgcccttaaggatgttagaaacgcatggtatcgattcccattgtgcatttagataatagcaatacaagcacagaatattatcttggcaccatagaagctctacaatccccaagtgtcagtagtacattttcttcaaacgttagcaacctcaatccctggcaagaaaaaaaacagattatgcaatctataatgatcttactcttcagcaaaattctatttttttgtgttcgttattagaaatttccacagacatattttagcagtcatatttctgcctgcccagctagagtaagctcagtgaggaagggggtctgttgctactcttctttaatgatggaaacactgaggagtatatgaggaattttacccattagatgtgtgaggctaagagatctttgatcatgccactgctctccagcctgggcgacagagtgagaccctgtcccaaaaaaaaaaaaaaatgatatgtccactcattaaaaacttctgtcagaccactcttttttataaatttttaaattttttaatgatctaacaagctttatttttatcattgttaaaaaaatccttcttttgagtaacacaatcacaaagtaaagaatgttatcattgatttaaccagtaaaaaaacaatacttaacaataaaatttttcaaacatggctccaggccatccagatgacttagttatcctcctttgatgcccttctcttcttcgaatgaatcacaatgaggcagaaaaattttcatgggtgcagagtaggtgtatatatttatggagtatgtgagatattttgatacaggcatacaacatgaaataagcacatcatggagaatggggtattcataccctcaagcatttatcctttgagttacaaacaatccaataacactttttaagttatttaaaaatatacagttatgattgactatagtcaccctattgtgctatcaaacagtaggtcttattcattcttgctaatttttttgtacctattgactatccctacttccctactcccctcagacacccactacctttcccagcctccattcttctactctttatgtccataagttcaattgttttgaggtttagattccacaaataagtgagaataagtgatgtttgtctttctgtgcctggcttatttcacttaacagaatgtctagttccatccatgttggtgcaaatgactggatctcattgttttactgcattttgcatatgtaccatattttcttaatccattcatctattgatgaacacttaggttgcttccaaattttagctttgtaaacagtgctgcaataaacataggagtgcagatatctcttcaatatattgatttcctttcttttgggtatatatctagcagtgggattgctggatcatatagtagctcaatttttagttttttgaggaaactccaaactttgctccatagtggttgtactaatttacattactaccaacgctgtatgagggtttccttttctccacatccttgtcaacatttcttattgcctgaattttggacataagccattttaattggggtaagagggtatctcacaatagttttgatttgtacttctctaatgatcaataatgttgagtatcttttcataagtctgtttgccatttgtatgtcttcttttgataaatgtctgctcaaatattttgcccatttttttattggattattaatttttttctatagaattttttgagcttctcatatattctggatattaatcccttgtcaaatgggtagtttacaaatatcttatcccattctgtgggttgtctcttcacttcattgattgtactctttgctgtgcagaagatttttaactagatgtgatcccatttgttcatttttgctttggctacctgtgcttgtgtggtattgctcaagaaatctttgtcaagaccaatgtcctcaagattttcctcaatgtttcttcattgtagtttcatagtttgaggtctcagatttaaatatttaatcaaatcattttttatttgatttttgtatatggaacgagatagggacctagtttcattcttttgcatatgggtatgtagtttgccagcaccatttattaaaaagactgtcttttccccagtgtatgttcttggtatcttggtgaaaaatgtctttactgtaggtgtgtgattttgtttttgggttctcctgttccattgctctatgtgtctgtttttaggccagtaccatgctgtttttgctactatcactccgtagtataatttgaagtaaagtaatatgattcctccagttttgttatttttgcttaggataactttgcctcttcaaggtttggtgttccatataaattttaggattttctttctgtttctgtgaagaatgtctttggtattttgataggaattgcattgaatctgtagattgctttaggtaatacggactttttaacaatcttgattctcccaatccatgaacatataatatttttccattatttggtgtcttcttcaatttctttcatcaatgttttgtagttatcattatagagacctttcattcattggttaattcctaggtatttaattttatgtgtggctattgtaaatgggattacttttttatttctttttcacatttttcactgttggtatatggaaactttgctgattttggtatgctgattttgtatcctgcaactttactgaatttgtttgtcagctctaatagttttttagaggagtctttaggttttattcaaatataagatcttatcatcagcaaacaaggataatttgacttcttcatttccaatttggatgctctttataccttctcttgcctggttgctctagcaaggtaatatgttgaataacagttgaataacagaataaaaaaaaatctctgcaaagtaaacaaatctcactagtttatctgacttgtattccaaattagtgcttctggccttttcttaaaactttaagcatcacaaggaaatcagttggaagggaatcatgtgctgatcaagtccttaaagggcagaaatattcactgaagtgaaaaggattagtaaagggtggaaaaaaagaccagccccccgcctagtttgggtgagcagatttgggattaattatcaggcagcaatccacatgcacttaacagttctgacgtgagaggacaagaaacacaagcaaatataaaacattcaattctaagagaagttcatcagagacatccttcaggattgtgaggtactggaaagaagtcctatggggagtgggtggacacgtgccaaaactccattagtgtaagggactttaaatcacagaaattaacttgctggaaatctgttcccaattcttccttcagctccaaggttaaattaaatgtaattaatgatggtgacctgctaattcatgcttttgataactgatatctagtatgtatatatatataaacaaaatgacgaggacagggaatttaattatttgggtatcacacatgcaggtgttatatatgccaaattttaaaggtaaaatttgtgtgaaatgtcacacttttattatttgtgtgaaatgtcattttacatatgggttccattttgaaagtggtttgggaagggggcataccattttaagtaccaagaaaaacttgcataatctcattttactttctctttttcagctggattttcctctacgtgcttcagtcttctctacacaaagagctgcaaaccaggtctttgttttgcactcttatttcaagcagaatgagtgctcctaaactcctctctctgggctgtatcttcttccccttgctactttttcagcaggcccgggctcaattcccaagacagtgtgccactgttgaggctttgagaagtggtatgtgttgcccagacctgtcccctgtgtctgggcctgggacagaccgctgtggctcatcatcagggaggggcagatgtgaggcagtgactgcagactcccggccccacagccctcagtatccccatgatggcagagatgatcgggaggtctggcccttgcgcttcttcaataggacatgtcactgcaacggcaatttctcaggacacaactgtgggacgtgccgtcctggctggagaggagctgcctgtgaccagagggttctcataggtaagtggagatatgaatgagttcataagtcctgcatgagactcaaggctcttaataaaatcttaaatcatttgagctggaggaa

SEQ ID NO: 12143 - DNA, 6000 bp, Homo sapiens
tttttgagacagagtttcgttcttgttgctcaggccagagtgcaatgacccgatcttggctcactgcaactccgcgccccctcacccccacccccgccagtagctgggactacaggcacctgccaccatgccaggctaattttttatttttagtagagacggtgtttttccatgttggtcaggctggttgcgaactcccaacctcaggtgatccgcccacttctgtctcccaaagtgctgggattataggcgtgagccactgcgcccgcccagatgcatttcttgagacacagaatcatagaccatacgaagttcttattttcttccctttgtcagattcattggctttcaactgatttgtttctccagttcttttgttttttgagaaatttcaaacatgtgaaaagttgataaactattataatacacaagtatccttttctcctagatgatagactgtagaataatgaacaatatacttgtcacctacaaattgacattttttttcatttgtttgctaagctaattgaaaggaagtgggagccagtgtgcctagcctatttctttctcttaaacaaaatgtagatactctataccctattttgtactttgcctttttcacctaagagtatatactggcaatcactctgtatctgaatataagatcttcctcattttttgtgtgtgactgtataatacttatttgtgtggatgtatttactttattcaatgaaacctctactgatggacatttggattgttctcagttttgtgctattaaaagaatgctttgatgaataactgtgcatttattgttatgtatttgtggaggtgtgttttcaggtagatcctagaaaaaattgctggattaaaagataaatgtgtaaataattttgttaaatgttactaaatttttctctatagtgtttgtgccattttatattctgccatatatgtgtttttttaatccacatcccatcaacaaagtatgtggtctgacatattttttgtcaatctcacagagattaatggtgtatcagagtaatttcattgaggttaatcattgctccataagtttaaggggcgattttctttattcttttgcttatactataaacagatttttaatctttaccttgatttttttaaaggaaattttttatgtgttaggaagatgagctttttgtgaaataagttgccaagtattttcttcagtcaacttgtcttttatcttggcttatggtgttcgttgtcatgtaacgtttattttatgtagtttatttttctactcccatattttattggtactggattttgagtcatagtcttttcccactgctagatatacttttagcactagtatgatttaattccttatgtttagatctgtgatccaccgggggatccccttctggtgtgtagtgtgaagtatagacagaattttatttttttccaaataatatttttttccaaataacaatccagttatctaagtcctgcttattacatttaaaaatccattcttcccttagtatattgagaaattaccttcatgatagactagatttttcttctgtttcattgtctttctgttcacttccttgctaatactctcctgatttaaataaagaggctttatagtacattttaatattagttgggttttaacagctttatggagatacaattcacatgtcatacagttcacttacttaaagtgtacaattcaatggtttttagtattgtttacagtgttgtgcagctaccaccacaattaattttagaacattttcatcagcctaaaaagaaaccccatacccattagcagttgctatttagtattctttcccaccttctacccctaggtaactattaatctactttctgtctgtatggatttgcctattctggacatttcttaaaaactgaatcactgtatgtggtctttgtgactttttttttttttttcacttaacatgtttagctgcttgtgcttttggtgtcatatctaagaaggctttgtctaacctaaggtcacaaagatttatttctgtttttcaaagagtgctatagttcttacattgattttgatccatttttagttttttgatgagtagtataaggaaggggtccagcttcatgcttttgcaggtggatatccagttattccaacactacatattgaaaagactattccttcctgattgcattgtcttggcactcttgttgaaatcaattgactgcaaatataagggcttaattttggacactccattttattctgttgatctatatgtttattcttatgccaatacattgcactgattactgtagatgtgtggtagttttgaagtagggaagtgtgagtcctccaactttcttctttttccagattgctttgacaagaaaaaacaaaagcagctggggtttaaataggaattgcattgaatttattgatctatttgagggtattgccaaaggcagctggaatttagataggaattgcattgactttattaatctatttgggggtattgccatcttatcaattttcattaattcatttttcagttttcattaatcaaattgaagattgaattaatcagattaattcaattttcattaatctatttgagggtattgccatcattgtctttttgtccataagcatgagatgtcttatttattcagctctttaatttctttaaataacgttttatagttttcagaggatttttaaagctaaaaaattgacaaattatgaagcgaatttttatgaaaacatctgaatacttggtgaaacttctaggaattgacctgaagatgtttgtggtgttgcccctttcttttttcatatgtttcttataataagcaatacaaaatcaagttgttcaatcctgtttacacttcttaaattatgttttggcttttgaaaaatagtttagagacttgtagttcccaaaggaataattttaattttggtttctagtgaagatttgggaaacaataggagagaccaaaaaaattttctttgatttcaagaagaaaaccagcattaacctgaaatgcatgtactatatatatgtacatatgtatgtgtgtatgtatatatctatatctatttcttccccttcctgccatgcagagttctatatgaagggaaagaacggcttattccaggatgtgaagtgatcctagccacaccctatggtcgctgtgccaatgtcaacaatagttcaactacttcacaaagaatctttatcacttatcgaagggctcctccagttcgaccccagaattccttggctgtaactgatatctgtgttattgtaaccagtaaaggagaaactcctcctcataccttctgcaaagttgacaaaaacttaaattgtggaatggtaagaataaagttttcatcttcaaagtttcatatgaaaccaaaaagggatacgttttggattcctgtttactgttgggtatatactcacattttatattttcatgatgcttgtttttatttttcctaatttttatgatttgtaataatttttaaagtcctatcccatgatttataataatttcatctttaagtcagggatatttttgagggagtaaatcctaatattgtctgtgttacattaacaaaggttttattcacttttggatttcagtggtgtcttcagggacaactgtggggttagagtgggtagaagctctccttacattcatttattcattcattcattcatttgtttgctttttttatttttttgagacagggtcttgctttgtcgcccaggctggagtacagtggtgcaatcacagctcactgcagccttgaccccccaccaggctcaagtgatcttcccaccttagcctcccgagtagctgggactacaggatagtagagacagggtttcatcatgttggccaggctggtcttgaactcttgaccttaagtgatccacctcccttggcctcccaaagtgttggaattacaggcgtgagccaccatgcccggcctgtttttgtttttgagacagggtctccttaagttgcccaggatgctcctgaactctagggctcaagagaaaatattgcagttttgcatacttatttttttttttcagacggagtctcgctctgtcgcccaggctggagtgcagtggcgtgatcttggctcactgcaacctccacctcccaggttcaagcgattctcctgtctcagcctcccaggtagctggggctacgggcgtgcgccactacgcccacctaattttgtatgtttagtagagatgaggtttcaccatgttggttggccaggatggtcttgatctcttgaccttgtgatccacctgcctcagcttcccaaagtgctgggattacaggcgcaagccaccacacccaatccatgcatacttactctttaaaaggactgtagtgaagaagaaaatgaacataaatgtttgattcatagtttttaaagactacagcttacttttggttcagatttactttgaaaaatatcttcaggtcaaactaatattagcttaatgttgtataggcggagatgacaaatgcacccagaacaattagtgaagacagggttgcctctggaggtgatgacctcatagtcctccagtgacccaagtcttccccaatttgggctccagtgcacactccgttttgtgctgtgtcttacaagaaggggcaatctctgagtgattgtgaaattctaaatcttttgaaatggccttcatatcagtttgatttttgtagcattgttttcttactctcttattttagtgttctgaacttcatgctttgctgtattttatactgcatagttcattatataaacgttttaaatagactcttctgagtaaataaatgaatctttagttggtatccaacaaaatcaatttcttttcactcttttgtcttttttataaacctaattcatgttttacagtggggttccagcgtgtttctgtgttataagaagtctgtacctgcttcaaatgcaatagcatataaggctggtaagtgagttaaaaaaaattgtctcaattgctatagttattggtgcatattaacatttggctaaaagagataaagtatgctcccttacatagtttgtagaattgatctattcataaaattatctataattttagcatataaagatatgtgttttcttaaatacatatacaagatatattaatacccccaccaaacatgctgttaatttaatttaaacatttatctaaagcaaacatatgtggaataaacattcaagcttttggtctacgttaatagacttaacagtataatggaaagttgctgactctctgaccttttatattttggcaatcagaaaggtgtcaaactgcgtctttacttcttatatttccttctcttatctctttgtgtctgatttgaaaccacatgttacttgccatgaaaggtggacttgcttcctttctcctttgttgcaaagaatcagctatatggaggagaggagggcctgagaaacttttctgccatgaagtgtttgagaaatctatcgccacattcttactgcacattaaagtgtcaagggctgtaaagatttaagtgtcacgtcttcattccactggtatggtgggataaaaactgaaaatacaggtatgctccagttgtaaatagaaaagatactggaatacttctttgtgaaaagaagcagtgctaattactatttgattatgcacagttcttgaaataaagttttacttcagggaagtcaggcaaattcatatccaaaaaatcgtgattttcataaaaacattcatactaatgaaccaaaccatttaatttataatataaaaataatggcaacgactaacgtataaaattcagtatcattttaaaatctgatactgtaggctgggcatggtggctcacgcctgtaattccagcactttgggagagtgaggcgggcagatcgcttgaggccaggag

SEQ ID NO: 12144 - DNA, 6000 bp, Homo sapiens
tggatggaaaccatcctctgctagctttgtgatcttggctgggtgtggctgctcacacctgtaatcccagcactttgggatgccaaggtgggaggctcacttgagactagcctgggcaacatagcaagacaccgtctccataaaaaggaaaacaaaaacaaacaaacacacacacacacaagagaggcatttctaaatagaggcctgctgacaacagcagaatttaccactgatggcctgtcagtaaaggagcggtgcctgtcccagctaacacaagcaccttctgcagtggctgcagcagtgtttccctagtgaggacctacttcctacaactctcatctacaagtctgagcctgaaaacgacctcagattttagcaaaacaagcacagtcttgctggcttcttctgttttcctctgagttgaaggggtccagggcagactcagagcccctggtttcctcatcatgagcctgagcatgagtcagaatcacctgagggcttatgaagccaaaggttgctgggctctatccagagtttctgatccaatagttctagggtggggactggaactcacattcgtaaaagattcccaggggatgctgctgctgctgggctggccttaaccactggcttaacaatgggccacaagcaggaccacagtgaaaaactctagtcaaacaggaagatacagaaaacttcatccttgatcaggcacttcttgcttcatttacacaggtgcctgcattttttacccaagggaagactttgtgacttgataatttccacttgtggaaccagttgaactggatatttactatcagatatttacttataccaaataaacattgttatacactatgtaaaaatagaaggtgctgtcattctgaattccttgcaagggctgttccttcaaacttgctcccttgtggatctgtatcactgagtcatgtaggccaaaagcatcgtaagccaaatagttggaactcagtagttctgttccttgctgtcactgcatccttccctcaacaaacttagtttagagtagacatcagaattttgtattcaaccactagcagtagtttctaaggcatcatgcaattaatataaatcaattttaaaatttataacctcctgataggccctcttgttaaattaccaatgttgtatttattttaaaaatgttggctggatgcaatggctcactcctataatcctagcactttgggaggctcaagggatcacttgaacctgggagtttgagaccagcctgggcaacatgatgaaaccttgtctctacaaaacatacaacatttagctgggcattgtggtgcacccttgtggtcctagctactcatgaggctgaggtgggagggtcgcttgagtctggggtgggggggtcaaggttgcagtgagctgaaattgcaccattgcacaccaaccagggtaacagagggttaccctgtctcaaaaaaaaaaaaaaaagttaacaatgttaacaatggggagagctatgaaaacaaaattttagagacagtgtgactcaagtacggtttctgtgcagttgtaattagaaggaaccaatgtggctgactgattttgaactacaattgtcactgacaataagagttactgtggaggatgaaaaactcccatcattcccttagcaagacttggaaagaaggatgaattacattcagcaaatttaatatttcactggtgctaaaactcacattgttttgcgttgttaaatctctgaaatcctgatgcattttaccaagaatggcattttatgattatggttggctaggtcatggttgtgatgtggtgtcactgcctgcatatgtacagacttggtggttattcctggtgggatgacttggcaactgtaatctccatgtttctctcaacagattatataaggaccatctggaaaagaaacatgctgcctgttgtctggaaaccttccactgacaccttcaggtaagatcaggagagtcccagcatcaaaatttgtaaaacaggtgtcagtagtttgcaagaaaacagtagtggaatagttttaagaaatgctgcattattagcacatagtaattaaggacacagaggacatttctatatgaatgacacagacatcaatgactataagctgaaaaatgactcagaagaacagagattctgaatgtaaagaaattacaggaattctttaatgaatttatttttgcttataccttccttcttaggtatgcacaagagatgtatgataacaatgtaagtctaagtctgtgcttgttcactaaaaattctaaatgataaaaaagtattacaaatagtttaattggaaatatttcttttttttttttttttttttgagatggagtctcgctctgttgcccaagctggagtgcagcggcgcgatcttggctcactgcaacctctgccccctgggttcaagcgattcttctgcctcagcctcccgcatagctggaggtgcccaccatcatgccctgctaatttttgtattttaatagagacggggttttgccaagttcaccaggctggtcccgaactccagacctcagaagagctgcctgctttggcctcccaaagtgctgggattacaggcatgagccactgcatccggccaggaacatctttttaacagcaactttcaatctttttagtctgaggacccctttacactcttaaaaaatattgagaacaccagagaacttgtggtttatatggtaacatcaatagttaccgcattagaaatttaaacagacttttaataccaaagaatcacaagcacatattccattagctgtcggagagataatgacatcacacatcatgtatcctctgggaagttccaatgtacactggtaagagaatgaaaatgaaaagaaagggaggaaccacactttgagaatctctggcatataaaataatggttttttaaaaataccattatattttgatgaatatggatatatttccaagtaaactgttgttggaagaagtaaaatattgactacagggaaaattctattgctgaacagttggtgtagcattttgagacacagaaattaactgatgtatctttcttctgtggctgtgggaaacatccaccccaaccgcccttcgtttttgagatggaatctcgctctgtcacccaggctggagtgcagtggcgcgatctcggctcactgcaagctccgcttcccgggttcacgcaattctcctgcctcagcctcctgcgtagctgggactacaggcgcccgccacgacgcccgggtaattttttgtattctttttttaagtagagacggggtttcaccatgttagccaggatggtctccatctcctgacctcgtgatccgcctgcctcggcctcccaaagtgctgggattacaggcatgagccaccgcgcccggccctcaaccgcctttcttaggtggccagctcactccgggtatcctgtaggtctgggtaaatcaaccctaggggaaggtaagagtgtatcttctacttgggttctggagggcagtggaattgcccgtaaagcaggaggaagggatagaggttgggacaaagatgaaaggaggagtgtggtttggcccctgggggacaaacctggattttctagagactaggagaggcggcggggcttgcagtttttgtcagtgatggagatctctggggacttgcacatggctgtgtgggtactggtgggcagacaaacacttggtgcagaggacactgaagcaccacccagggtcctgctgggcagtcaggcccagagagagggcagaccctggggagttgctggcctttaggataccctgcgggtccgagcaagacgtcctaatgacagtcaccaatgggctgctgcccagggcctcttctgccgctgtcctgacctagaatcctacaacctttcaaggaaggagaacgggagccaccacatacacacagagggtggctttcctctagggatcctgggaaccagattggctttcatttacaaaccgcagaacagttacagaagcaaaagaaggtagttatgactggatctgaggacatcttgcctgaattgaatttccagctctgtcacttgctaatagaagcccctcacagggtctctgctgggcacactaaatgagtgatacatggaaactcttcagacagcacctggcatgtgtatgttatctatcacctcttgaacctcgatatcttggagatgtcataactgccacactacatcctctgcagtttgggatggctgacgtttgaccctttgcctaagtccccatatcgaaggctagattaagccttaacgctggagccaaggggagggagggcaggaacgtactctaaatagaagtgctcccccggggactgggcggcccaacctgctccagcagccgggaaggtcttcctgccacagtgaccgcagcgagtggcgtccggcctcggagggactgagggcacttctctggtgtaagcactggcgtccaacgccggacgcagcaaaatcgctgcaaactctgggtccagagaggtccaggtcctcccgggtttctttttattttaaatttttttccagggagagttctggcgctccttcaatcgggggaggctgcgagtctgagccaggagatgggcgtgggcaggcgtgggtagcaccatcgaggccctggccacctgccgggtgctgggtagtctggaagagtctggagcccggtctccgcctccaggcgccccaccctggacccctcctccacgcgggtcccgccccacggtgggcgtggcttccagggggaggggccggggagggtctgcgaacgagtaacctcccgcaggcgaggcgaggcggggcggagcgcgggaggccagttgggaggcgcacatccggcggttacccggtgcttcataaagccgctttcgccgctggctgtcgccgcgttttgcctccgcagcagctctgggctcttctcagctgcgcgagcagctgctccaatgccccggagtggccatgggcgccccgcactggtgggaccagctgcaggctggtagctcggaggtggactggtgcgaggacaactacaccatcgtgcctgctatcgccgagttctacaacacggtgcggggcgcgggagcggggaaggcaggcgggccagcgggagggggctgttcccgcgccgcagcgtctggaagctggacgtgggtctctgcgcgcatctgggggcattctctccaggggctgagtcagtccacaccccctcctcggcgcgctcctttcagttctccatctgtcctcctctcctgtccccattcccgacagctgggctcatcttcctcctgctgtcatttgttttgtgatggtcctattgtcttgtttggcccccacgcgtccaggaaccaggggtctgtgtcagcccattctccttgtttgggtcagctgggggcggtgaacctgccgggacaagtctcttcctcccctgggatctctgtggcgtgacgcacttgggtcgcattgtgcttttttgccctgaatacctgctctcggagtgctgggaagagcacgccccccgcaggtccccgcggctggggtcactcccaccaggcagacttgccccacccccaagaacatgcctataatggtcgagttatttttggtcagaatcaagttaattactacttgtttttttttcttgcctttagtgtcctgtcttgtgcaagccgctaattcaactcccccaggactgtgctttctccagttctgaagtctgagggatgaaaggaaagtttgggagtgataatgtgcgggttttggatttgcctaggtccctagataagggtgagcagaaacttccccattgcagaatcctgtgtgattttagttcttgtggtagggaagggttgcagctgggagaggaaatgcctcttattttgtgtatgtccatggctcagaatcctggtacagaatgtgagactttg

SEQ ID NO: 12145 - DNA, 6000 bp, Homo sapiens
ggtattcaacagcacaatgcctgattttgtgatttaacttttcctgttttgatgcagtgccaccacgctgggattttgtaattatgagcttcaaaagcagagacaacatcttctatttctgtgtctcttcctacggtgaataatatagtccttgccgtttcaatgttaacaaaagaaaaagaaaaatgctgcaatagctgagagggtttagagtaaatggggtttggagagggtcaggtattttccacagccaaaccagagtggatgttgtccctttaactgtggtgtcctggctgaaggccaaaacttaattgttgatgacccttccttttctttttttttttttttttttgagatggagtctcactccatcccacaggctggagtgcaatggtgtgatctcggctcactgaaacctccgcctcccaagttcaagcaattctcctgagcctcctgagtagctgggactacaggcacataccaccatgcctggctaatttttgtatttttagtagagacacggtttcaccatgttgatcaggctggtctcgaactcctgacctcgtgatccgccctccttggcctcccaaagtgttgagattataagcgtgagccaccatgcctagcctgacccttccttttctgctagccactgttatgtacagtgggttcacaaaaaagttcattaatgtccttaagaagtcagatgggatggctctggtggctcagtgcccacagaccagtgaaagacagaatgtccgggctgtactgtaggtggctgacaccccatcttcttggtcacctcctggaggccacactttatgtatctggattctgtttctttttaaaattatcctattttattaatttattaattttaaatttttgtaggtacatagcaggtgtgtatatatttatggggtacatgagatgttttgatacaggtatgcaatgtgaaataaccacatcatggagaatgtggtggtatccatcccttcgagcatttatcctttgtgtcatgagcaatgcaattacattattttaaaatatacaatgaagtcattattgcctatagtcaccccgttgtgctatcaaatagtaggtgttattcattatttctaagtagctttttttgtccccattaaccatcctcaccacctcccccaccctcccacaacacttctcagtctctggtaaccatcttctactctccatctccctgagttcaattgttttgatttttagatcccacaaataaatgagaacatgtgatgtttgtctttctgtgtctggcttatttcacttaacataatgacctccagttccatccatgttgttgcaaatgacaggatgttattcttttttatggccgaatagtactctgctgtgtagatgttccacattttctttatccattcatctattgatggacacttacgttgcttccatatcttaggtattgtaaacagtggtgcagcaaatatgggagtgtaaatgtatttttgatgtacttatttcctttctttggtgtgtatacccagcagtgggattgctgggtcatatggtagcctggattctgtttcttatttgccagtggatgttttaaagtatacatcctattgccctgggtcaactttctcaaggacgtcccctcagtcttcttcatttttacatatatgttcgttatttctaaaagtgttaaaattatagaaaagtataaaaaagaaaataaaaattatgttttccaacaactcagaaatagtcactttcaacgctttgatatttatttgttgtatatctgtggtgtgtatttcagtgtgtataaatttcattctgtttaaattgtgtttttttcccaatcaacagtataccataaacattttcacatctttttatgtcaatctgatttcaccatagtatttgaacacttgtctggaacttcattgtataccatgatttttaataaataatccatttttgttgaccattttgattatttctaggctttgattattatcaactatgcttctataatgtccttatacacaaatttgggggcacatatttgattttggcttggtgtatatcataaaaatggattttctggtggggcgcagtggcttacacctgtaatcccagcactttgggaggccaagggggggggggggtggatcatgaggttaggagttcaagaccatcctggccaatatggtgaaaccccatctctactaaaaagtataaaaattagccgggtgtggtggtgcacgcctgtaattccagctactcaggaggctgaggcaggagaatcgcttgaacccaggaggcggacgttgcagtgagccgagatagtgccactgcactccagcctgggcgacagagtgagactctatttcaaaaaaaaaaaaaactggattttctgggccaaagggtatgcatacaaggcttttgctttgtgtttgtgatgttgacctcttgacatgtgataccagtgtatagtagtattatgtaagttattttccacctctttcagaaaaaccgttttgttatctattgatacctttgttaattagtctcaaagacttttaatgttgtctatagtgtttttcatgtattgagtgcaaaaagcaggaaatagaaaatgaagaatcagccaagagccttgtttgtttgtttagtttggtttggttttctttatgcttttactgtaggtatgtctggaaaaatcaaattaaatggaatgagcttgactcatgaggaggcccctttcattttcctgaagtgaattaatacagcacccaccgatcctgacattagttatttcagaagcacactaagaactgaccgcacttctcagtgtcaccaaactattcttatctgtcaaagtttcatttcaaatacttctgtaaggtctaggtgtaccctgctggtgtttgtgatgtcctacattactcttgatctacttttcaactatgaaacaagggaaaaattggaggtccagagctcaggattcagatattattacctctgctactcacagcagagcaagtaacttagcctgtgtggaacttcatttttctttcttttttttcttttttttttttttttttttagacagagtcttgctctgtcacccaggctggagtgcagtggcacgatctcggctcactgcaacctctgcctcccaggttcaaacaattctcctgcctcagcctccagagtagctggggttacaggtgcacgccagcaagcacagctaaattttgtatttttagtagagatggggttttgccatgttggccaggctggtctcaaactcctgacctcaggtgatccactcccaaagtgctgggattataggcgtgagccactgtgccaggcccactgtttttgtttttttttttcgtgatgacaaatttaaagtcatctcataggaatagaaaatagctttttagtagaagctcttggaatttaaattgagactgaatggaaagatgaaagaaaataaacttattaacatttaatgagaaccttcaaagaactaggcatagtaccaaatggttttatatttttaaacctcatttattcctctcaaaacacctgggaaggagatatttttgccatttcacagctgttgaaactgaggctcaaaaagactaagtaacttttctcagctacacatgtggctgagccagtatttgaacccagttctgtttgcagacagaacctgggctttttcacacctgcaaactggaaacattaattggttcttaagatcatcatcgatgtgataaaacctgggacagaaattagtcaagactagctgcatctgccttttcctctggtgggtaggaaaaggaggagtataatgatttcctcaggcatgaaggtcgatgatgagcaaagtgtatactctctaatctaatgtcataattcatattgtggagtaattatctggataagtgtagggtctctgacctcattctagatattgtacattccatggctattttcattttggtccatgaactctctttgctctcatgagcaccatttttatcccaatctaatcctgtatgtttgtgtttttacacagattagtttttaaatgttatatataatttgcttctgaaacaccattgctcaatgactaccaaatctttctcattaccaaaatccttctatgccaacttcttcaagaaatttgatcacctttagatgaattgttaatgaaaattaaagctatagccggcaacatgggtatctttgggctaatggccaaccaacaggccatctgtgtgaaagaaaacaggctaacaattttggactctggtctcttggggctacattgagcattgacctcaccggtgctcactgaaattaattgcttttcaggttgtattttctcatcacggaaaccttcttctcccaattcaaaccatgtgggttaaaatgagaaaacaaaagccaaaacggcttcccacacccaaaagctccttctgtcagagatcccagtagccccgggagagctgttagaagtctgagaaggattggtcatcatcgcataccatacataggtggagggcttgttattctcagtttcccgcctatgagaggatacccctattgtttctgaaaatgctgaccgggacccacacttccaacaaaaattcctctgcccctacagcagcagcaaaagcagcagcagaagcaacagcaacagataagtgttttgatgaattgcgagatggatagggcttgagtgcccccagccctgctgataccaaatgcctttaagatacagcctttcccatcctaatctacaaaggaaacaggaaaaaggaacttaaaactccctgtgctcagacagaaatgagactgttacagcctgcttctgtgctgttccttcttgcctctaacttgtaaacaagacgtagtaggacgatgctaatggaaagtcacaaaccgctgggtttttgaaaggatccttgggacctcatgcacatttgtggaaactggatggagagatttggggaagcatggactctttagccagcttagttctctgtggagtcagcttgctcctttctggtaaggtttggctttattttttttaatttagtattttaaaaaacagagttagtgatttctgggtgctctccccaaatctcatcagtgctgatgaacaaggggtggctgtagcaaaggcaccatttctctgtgagtctccagtcaatatgtgtggaaggattgaaatgcaaaggctctgtggcatgaactgattttgctagtttgtcttctgggtgattggcccctgtgttagaaactctttgaggaccgattaaatcatcttatttgaagagatccccttactatcatgcattattttcctgctcctcattctggagtgtttttcttattgattttttttttaaagaacaaaccggttttacctgctttaaagaaaatcttcagtaaaaaatgaaattcatgctgagaaatacaggggcccaattaaggcagtgtatagattgtcactgttaaaagggaacaaagatgcttttctgtaaaaagattttatatctacatcctattttaagcaaagcaatgaaattgtaggcttttttttttttcttgtagttagggtcagggagattggggctattagaatttttgttttattttaaaaaatgtttgccatgtagtaattcataaagggtttactggcccaatgaaacaaaaatttaggcagttaccaaaatctttaacacaggagagtatatgaagcctgttgtagagtgaaggagtggttggccagtgtgttgggttcagcgtgtttattgcttagatactccagatagtggtgtgcctctgtagctcactcagcctatgtgacataggtagaaggcagtatccaaacctgaactacatatcacaaatacatttatcattgccatcagtctctccccttcggtttgaaaacattctaattttaataacgaa

SEQ ID NO: 12146 - DNA, 6000 bp, Homo sapiens
accccaggctgagagtcaggctctgattccagatctagcctccatcatgaagaagctcttgaccaagtatgacaacctctttgagacgtcctttccctactccatgggctggcatggtgaggcttttcaagtacctatatttagccccaacaccatttctgggctcctggggctcagcctagtgaactgcaacctcaaaggagcaagccttgaaacagttgctgggggaagtggccagagtagagatgctgggactgagggtggagcagcaaacttggtgaaactacatctccaatgtgctttctaatctcctgccagctcttctcaagcaggggatcctgggagatgtagttttcagatacctggttgggtttgggagtaggtgctaacctggataactgtaaaagggctctctctccccactgtctctcttctttctgtcaggggctcccacaggatcagaggctggggccaactggaaccattggcagctgcacgctcattactaccctccgctcctgcgctctgccactgtccggaaattcatggttggctacgaaatgcttgctcaggctcagagggacctcacccctgagcaggtcaggactcagaacagtctggcgtctccagactctcacatgcagtatgtgcaggcacctgatacttctgttgcccttgtgctccagtcattgcacaaggcagaaaacagctctggcaggaagggactgccaaagttaggagccctagggcctggaaggagagtatggtcctcagatcccccttctctcctgcttcctccagggaacccaacagtcatgaccctgatagtttcccataacaacctgggcattccttgggactcaggagctgctaaactctttcatcccctggtggcttcagcagtccttatcaccagcctcacaatcccacaggcccacccccagtgggcctgtggcattcatatttcatattcatatttcaaaccacaatatccagcaaaatgtctcctgagcacccagaactccataccatcggccgggtgtggtggctcatgccttaatcccagcactttgggaggtcaagatgggaggattgcttgagcccagaagttcgagactagcctgggaaacataggaagccctcgtctctacaaaaaaaatttaaaaagttagccaggtatggtggcatatacttgtggtcccagatacttgggaggctgagataggatcacttgggcccaggagtttgaggctgcagtgagccatcatcatggcatcattgcattccagcctgggcaacagagcaagacctcgtctcaaaaaaaaaaaaaaaatgaagtccatgccaccattcttggcagcccagcccttatcctccttaattgctccctgtcccttttccaggctgcagagagactaagggcacttcctgaggttcattaccacctggggcagaaggacagggagacagcaaccatcgcctgaccacgccgaccacagggccttgaatccttttttgttttcaacagtcttgctgaattaagcagaaagggccttgaatcctggcctggaatttgggcagatatagcattaataaaactgtgcatctcaaacttttatcacatactctaatatcagaggagtgtgaaccttcagagatctagggttaaaagctaaaggcatagctccagctacaacttttctttgtctacagatgtgtaaaatcttgatgcaaaaatctaccccaaatttctgaacaaaattaatattcagtattatatctagcctatagattctcttactcttggtgtaatgacagcattcccagtttaggaaactgttttaaaatcttgtgtcttggttgtggctgaggctttgggaaggccagagccccctttgccaccacccctagggtgtcagctccaagcctgggcctgagggtttgatggggagcgggtgagctggatcctgatcccagtggtcagtggccagatcctgggctgctggccagaaccctggctttgtgagtggctgcagcttggctctgctccagcccacaggggctaaaggggcgggtagggagtgtgtagggagcgtgtacgtggctttgtgtccttggctcctccagactctcacatgtgcgggcaccatatacttctgctgcccttgtgccccaatcattgcacaaacagaaacagctctgacagagaagggactgctagagttaggaaccctagggcctggaaggaaggtatggctctcagagtgacctggggtctattcagtcccctctggacctgtttccctggcaacgctgtgggaacaacagtctatgcaacacaggagacctgatgccactggtgtcctccaaattttaaggcgaaggcaggcattgtgaatgatgcagggatggccagaatggtttttgccttcgttctttccccaggggaaccaagcctgtgggtggggaaatcacactaaggctggacagtgactgaatctggcccaggagaaacttggctgcctgccttccagaccagggtttttcttccctgagatcctggaggggaagtacctggaacttgggagtgttgccctggtctggaagatctgatagacatagtatgcacacatttccctcgagcttcccatgactggggagtagatgagaaccctgagtgggtggctggtttcttgaggcatacatatacccgacacaccttacacctctgatttggctgcattttggaatcatctgggaagttttaaacaatactggtgcctaggtccaacctccagagactctgatttaattggtatggggtggggttttgcagttttcaaaccacaatatccagcaaagtttgagaaccactgccctacacagccctccttcttctttatcttatctggagtcaggggcaccttcagcttctccaatcacctggccagtggctcttgtttccagtcctgctgttccagggtggataggccttcaggcggagacccaggaatccagctccagactctgtcccaagcagcctcttcagtccgggacgggacaggaagtgtccggcggaggtgggggtggaggtgattggcagttggagtctccaatgggccaggagcccccctatttcactcctctccttccattggcgcctgggcggagccacccccgctgcgggggcccagggcgggagggagtagaggccggggcagagggcgagggcgagggcagagggcgctggcggcagcggccgcggaaggtgaggcctggtgtagacgccaaagtcttgtcaggagtgggcggggcagggtgatgtatgatctgaaaggccgggagtgactaacgactgtcagtgtgtatgtgcctgtgaggctgtgtctgtgtgacagtatcattgtgtgcgattctgagtgtcacttggtgcagctgtcagctaatgtgactgcgtgtgtcagtgtgcatggagctggaggtgcatgtggctgtgcaagtgtgggattatgtgtgtatctgtcaatgcacatttttggtgggactgggttgtgtgtttgtgtgagagggactgtgaccacatgagggaatgtgttttgggaaggtctctgtggggtttgagaccatgtctgccagcgtgagagtgggtggctggctttgtgtgtgccaatgtgtgacttcagcagtagcagagcaaaagtgaggtttgtgactatgtgtgtgtcctgggtcctaacttaaaccgtgtgggagtacagctgtattcatgtattgggggacctacctcaagagcccatgggactgacctttctcttaagtgtccagcattgacagacacacccacaacacacgtggcttcccctccttcctctgctcaagaatccccagcatcaggtctactgctccttattttctgtttccctgcttggctcagtttcccttacgtgccgttttctgtccctattgctgtcttactagagatacctctgtgtgtttcttcacagctttgttcccctggtctctctgtgtgggtgcatttccagttttgcctttcctttctctctgtctctctctgtgcccctatgcctgccttccctgctgatcttgatctctggctagttgggggcctgtaacagtgatgagatgcgggtctgccccggctaagagctccctgagagagggggcttagaccatgatgaagagttgcttttaggcggtgctgtgagccctggtaggggctgtgtgcgtgtgtgactgcgtgagtgtatgaatatgtgtaagtgtgtctgagtctgaggcggtgtggctgtgcccgtgtgactgtgagtgaccgcatgtgagagtgtatgagtctgagggtaactgtgggtcttgtgtatctggcaccaagggaccaaaggcatttcctggtgctggggcccaaagaatggagggggaggtgagaaatggctggaacttccaggggagggggaactggactctttggcctctccttatatcccccaacctggggcctcccttcccctggaagcacagccagctgtaccctaaggaaacatttggtgaggagtgaaaagagggggagtttgtatctgatttttcatttgattgtgtccacgtgtgttcaaaggcatgcccttttgttaactgtgcctcttgagtctgtgtgtgaatgtgactgtgtctggctgtgtgaaaacacagggcatctctcactgacagggacataagtattagccaccctcctttccctcttgctggccttggctgtgtctgtggcttcctttccagacttgggggaggcctcttcccttcccagggccttgggtgggagggaaggagggaggaggcaggagcagggagggggcctggctaggggcggcagagctccagggcttagagggggcggggcagggaaggggaaggaggggatggctctggggtcccagaactgagtggagtaggagacgggggctgtagctggtgagaggaagtcctagaggctatggacactctgctgctgggatcaccgaggtagggtggggctaagcagggtaagtgtggctgggtggccaggggtgagccaactggacacactcagacagacacacagacaggtggaggccctgctctgctctactcctactcctgaagggtccgtgctcttcctcttctggtcttgttcccagagccctttccccgcctgccccttcgttctccatccacttcaccactgccttcctccttctgctcccccttgtccagaatctctctctcctagcatcccccacctgccatatagacacactgttagctttttgagtttccgctgaccccaatccagtctttccaacacttcccacactgccccatcacctcctagtcctgatctctgagtatctcttggtgctgtggcccccatgcctgtccctgcaggctcccagttcctctcagcctctcatccccttccctcccctcccctccccgccaccctgtctccatttccatctgctggctcctcgcccacccccagcctctggcagcagccagggcatctggatctgcttaactacacagccccagcctgcaccctagccccatccagcttcacaaactggagaccaacgaagtgtcaagagccaggcccagctgagtggcccaagtagccagaccaaggagccaggttcaggcgagaagcctggcagccagggcaggggtgggcctcagggtgggagtgcaggatgggctcagatccatgatgacacccttcccccagggtgataaggtctgcctaggttaatcagaggcagtgataagccctggaccaggtgggggtaaataccagaattcccaacagctggactggaggggttaatgggagtggctgagctggtgccagtgcttggtgccaggggtgggcgccaagggcagtggagggggagttgctggcacagtctgttgcctccggcttttgttctgggccctaagcccaggactgag

SEQ ID NO: 12147 - DNA, 6000 bp, Homo sapiens
agtgagagacacccagtggagacacaggggcaagagaaggccatgtgaagttggagtaatgcagctacaagtcaaggaatgcctggagccgccagaagctagaagaggcaaggaaggattcttccccagagccttcagagagagtccagtcctgtcaaaaccttgatttcagactctggcctccagaactgtgaaaaaatccatttctgttgttttaagctacccacttggtggtaatttgttacagcagcccttggaaatgaatatagatggggaggtagccagaactacaagtcagcctcaaggttctacaaggaatttgatcagtctttgcccccaagctatggcttgggagagggagcattttcccttctaccccaccagtgaatagtttcctcctctgccatgctgggataggcagagacatgttttagtaacatgacccctcagtgtttgaaaacacaaaccctcatgagcaaacacttggcctataataaccacagagaggtcctgatccaggtgtggggtgccctggtcagtcagtcctgagtatactctgtcccaacccggggagactcaggaaacaataactcaaacctgtttgagggtttggcagactcccagcatgatccagggtcagagtccacattctccactcagaccagagacgagagagacagagaaacagagccatagggaatcgcatttgaaaaatgagtgagctgtaacagagagctggattagtcgttaccacattctgtcttgtataggcccatccaattcagatattaccatgtacttccatatgtcaggggccaagcaagttccaagctaatgacagagctgaccaagacaatcagctggccatccagagtgtaccctggaccacactgccatggagagctctgaatttggctccagaaatggcaccctagaatcttaggctgactacatctgaggttgaccatttggaggacagctgttattcagtcatatatattttgttgtacaatatgacagtcatccgacaacacagatgatttggagtgccacaaaaatgtggtgttgggccaggcatggtggctcacgcctataatcccaactcttttggaggctgaggttggaggatcacttgaggtcagaggatcacttgaggtcaagagttcaagaccaacctgggcaatatagcgaaaccccatctctacaaaacaaataaaaaaattagccaggggtggtggcttgtgcctgtggtcctagctactcaggaggctgaggcagggggatcacttgagcctaggagatcaagcctgcagtgagctatgacgccactgtactccagtctgggtgacagagtaagaccttgtctcaaaaataataataatgtaaaaagttatgtcatgtttatgggatagttgtggacatgcacaggtcattgacaatgagctccttgagggcagagaatatatcttagtcaatttggtatttctcaagcatctggcaaggtaatctgcaaaaagaaaatgctcaataatggctgttgaataaaagactgactcaatcaagtacggaccctgcccttatggagctgaaggccgttagagcagataaaatgagttatcacccttatatgagttagacggtggacaaagttattattgagggcaggcaaagaactgggttggctcaaagatgccagggatcttttccagactagtggtagagggttggttaaggagtttcctgaaggaggtggcctttcatctgagtttcaaagaacagaagagattagacagggaggacagtaaaatttttttttttttttgaaacagtctcgctttgtcgcccaggctggagtgcagtggcgcgatcttggcttactacaagctttgcctcctgggttcacgccattctcctgcctcagcctcctgagtagctgggactacaggcggccgccaccacgcccggctaattttttttttttttttttttcagtagagacggggtttcactatgttagcgacgatttttgtctgtttgtttgtttttgagacagagtctcactctgtcgatcaggctggagtgcagtggcgcgatctcggctcactgcaacctctgcctcccaggttcaagtgattctcctgcctcagcctcctgagtagctgagattacaggtgcctgccaccatgcccagctaatttttgtatttttagtagagacggggtttcaccatgttggccaggctggtctcgaactcctgacctcaggtgatctgcacacctcggcctcccaaagtgctggtattagaggcatgagccactgcacctggccagtaaaactatttgtgacacagcagcaagtgcacaagcactgacctatcagagttgaaggtggctgaggcactcaagtgggctcctggggactctgttatgccagggaatacctctttagataagggatcaggaggtctggagggtccctaaggaagagctagggtagcaggggtaccctggagctaggggccatggctatatgccaacaggattagaaatatcttaatgtatttaattaacctacacaaccatattggtgggtgcctactgaatattagccctagatatggacctgaaatggccttattctcttttagtttgtttaagccaatggagccttactagaatgtgagctacaaaacagtagagctattctctattcaatgctgcatctgtagggcctagaacagcacctgaaggactggcggaggcttaataaattgttaaaagggcagactagccaggtgtgatggcgtgtgcctgtagtcccagctacttgggaggctgaggcaggaggatcacttgatcccaggatttctgggctgtagtgtagtataccagtcaggtgtctgcactaagttctgcatcaacctggttgcctaaggatggttgaactgacccaggtggaaattggagcaggtcaaaactcaatgctgatcagtaacagggtcgcacctgtaaatagccaccgccctccagcctgggcaacacagtgagatcccatctctaaaataaattttaaaaataattaattagaaaaaaaaaccagcctgtaatcccagcactttgggaggccaaggcgggcagatcacctgaggtcaggagttcaagacaagcctggccaacatggcaaaaccccaatctctaccaaaaatacaaaaattagctgggcgtggtggcaggtgcctgtagtcccagctacccaggaggctgaggcaagagaatcgcttgaacctgggaggtggagattgcagtgggccgagatcgcgccacttcactccagcctgggtagcagagtgcgactctgtctcaaaaaaaaaaaaaaagaaagaaaagaaaagaaaaagaaaagaaaagaaaaaaactgggaggcctaagcccattcttggtgtcctcacactcttctgccccatctccttgcacccagtcttcccctgcaatctgtgctccatactagccctcaagccctcaacgtgacctagtatgagaactggattctgtcactctcctgctcataatattttatgccttccctttgcccagaatatcattctccctattgtttttaccaatggaactggtatttcttcaaggacatgatcaaatttgcctacttctatattatcttctaaagcagaattcatctctcttccctcaatatgatgatattgacagggtttgccctcactcactagattgtgagctgctcagggcaggtagcgttttttgtttttgtttttgtttttcttttttgagacagggtcttgctctgtcacccaggccagagtgcaatggtacagtctcagctcactgcagcctcaaccgcctcggctcaaaccatcatcccatttcagcctcctgagtagctgggactacaggcacatgccattacacctggctaatttttttgtatttctagtagagacagggtttggccatgttgcccgggctggtctcgaactcctggactcaagcaatccacccacctcagcctcccaaaatgagggaccgtgtcttattcatttccatgtccctagtccatagcccagtgctggacctatggtagtactaaataaatatttgttgaatgcaatagtaaatagcatttcagggagcaagaactagattaacaaaggtggtaaaaggtttggagaaaaaaataatagtttaatttggctagagtatgagggagagtagtaggagacaagatggaaaggtctcttgggcaaggttttgaaggaagttggaagtcagaagtacacaatgtgcatatcgtggcaggcagtggggagccaatgaaggcttttgagcaggagagtaatgtgttgaaaaataaatataggttaaacctatcagagcccctctgacacatacacttgcttttcattcaagctcaagtttgtctcccacatacccattacttaactcaccctcgggctcccctagcagcctgccctacctctttacctgcttcctggtggagtcagggatgtatacatgagctgctttccctctcagccagaggacatgggggccccagctcccctgcctttccccttctgtgcctggagctgggaagcaggccagggttagctgaggctggctggcaagcagctgggtggtgccagggagagcctgcatagtgccaggtggtgccttgggttccaagctgagtccatggccccgataaccttctgcctgtgcacacacctgcccctcactccacccccatcctagctttggtatgggggagagggcacagggccagacaaacctgtgagactttggctccatctctgcaaaagggcgctctgtgagtcagcctgctcccctccaggcttgctcctcccccacccagctctcgtttccaatgcacgtacagcccgtacacaccgtgtgctgggacaccccacagtcagccgcatggctcccctgtgccccagcccctggctccctctgttgatcccggcccctgctccaggcctcactgtgcaactgctgctgtcactgctgcttctggtgcctgtccatccccagaggttgccccggatgcaggaggattcccccttgggaggaggctcttctggggaagatgacccactgggcgaggaggatctgcccagtgaagaggattcacccagagaggaggatccacccggagaggaggatctacctggagaggaggatctacctggagaggaggatctacctgaagttaagcctaaatcagaagaagagggctccctgaagttagaggatctacctactgttgaggctcctggagatcctcaagaaccccagaataatgcccacagggacaaagaaggtaagtggtcatcaatctccaaatccaggttccaggaggttcatgactcccctcccataccccagcctaggctctgttcactcagggaaggaggggagactgtactccccacagaagcccttccagaggtcccataccaatatccccatccccactctcggaggtagaaagggacagatgtggagagaaaataaaaagggtgcaaaaggagagaggtgagctggatgagatgggagagaagggggaggctggagaagagaaagggatgagaactgcagatgagagaaaaaatgtgcagacagaggaaaaaaataggtggagaaggagagtcagagagtttgaggggaagagaaaaggaaagcttgggaggtgaagtgggtaccagagacaagcaagaagagctggtagaagtcatctcatcttaggctacaatgaggaaattgagacctaggaagaagggacacagcaggtagagaaacgtggcttcttgactcccaagccaggaatttggggaaaggggttggagaccatacaaggcagagggatgagtggggagaagaaagaagggagaaaggaaagatggtgtactcactcatttgggactcaggactgaagtgcccactc

SEQ ID NO: 12148 - DNA, 6000 bp, Homo sapiens
cttagacacccccttcctcctcaagcacggaagcctctggtgagaccccgataagggagctgagtcatgcctacccttactccccagctggtccagagtggatattcacacagctacaagagggtgtgtggacgcgaagaactgatcagtgaattgtgggtggtggtggcaaagaacaaggctgctacaagtatgagtagaagctagctcattcctcctttggcctgagaactttgctcccttttccattgtgtttgatggaacagcaactccccactgccgtgtccccctcccagggaactcctcctccctcaatacattcctgcgatgcattccaaagaagttgggcaattggagggggggaatggaggacaggaggtcaaatcccagcaaggaatggaatgtaagagtattggagctaagaaagttggggtacttggagaatatagtcagagcagatacccacaaggggaattgcagaaagatagggagttacagacaggaacaaaaggaaagagcttaagacagtcagaatataagagggatgggggagtaacactcagtctgttaccaaatttggcctctgagtccgcaaccgctggcagtgggggagggctgtgggtgagactgacatatccggcctcaggctgctggagactcatttagagctggactgggcagctagctgaagggctgcacagaacttcccccggtacagcccctccatactcaaatgcacactcattctccccagatgcaccccagcctaggcagagctctttcccacaaagctaccttactctctctatacacacattatctcaatcacacagcccccacacagatcccatcacgactgcattatcttctcctagggagcccatcctatgcacacagcttttgcacagataacctccataacaagcacacccggcacccagtgtctctcctcccattatgtagacattctccattcacccagcaagcattccttgagggccagctgtggggaagaccctgggccaaactttcagtggctggggaccaagatcagtaagacctagcctttgagttcaaagggctcccagtccacgagatgagtgaataagccaagtacagaatcacaacggagggcaggatgtggtaagagccaaaaggtgtgtgctcagagagatccctttaggtcagggaaggggaaccaaaaagtctccatgataagtatcatttgaagctagaattttaaaaaatagagataataaaaaacaatagtgatctgccatttattgactatgtcacttgcattgtatacataatttcatttaatccttacagtaggtgtcattatttccatttttacagatcagaaaacagactcaaagatgttaaatacttgttcaaatacttctccaaataataagttgtgaagccaggatccgaacccaggtttctgactgcaaagcccaagctttctccactacgccagccagctggagatgtgtcaggggtagttttcactccaggcagagaaatagcataagcaaagatggagaagcagtaaatcgtggaggagcattcagggaagtgagcaggcaggctgttgaagcacaggggtacctgcaagggagcagtggtggggaagtcagggttaggatggaaaggcagaggaagactggagaggggtatgaggaattttacttattggaggacaaaaggaagccaagggagtctttgagcagagaagagacataaccggaactggattttagaaaaataactctggcagttaccttggagattagttagaaggacactgtattagtacaaattaaaggtaatgaagccggagttggaatggcattgaggaagatgtcactcagaacaagtttggggaggtagaaatgacaggacctaataactactaaggtagacaggttagagtcccacagcttcctatcatcagcagccactttagcggctggggcagcttgagtttaggcgacgaattgggaagaggggaaaggatcaggttgggcagagaatgtgaggatgaggctgtggttacgggatgtggttaggctgtggggaaaaagggtatgagtatatgattagtagccactaggggcagatggggttgggttagtgactgcatcaggctgggaatggggaagacagggtgtagaaaaaggatgagaagacagggtgtagaaaaagaatgctggtgatgatggtgtttggaaaaatacatatacataagatacatatatgaccagtcactgcatcaggttgggggaaggggaatgattacatggatggtggctaagtcagggaatgatggggtgaggtcagaggccaggtcaggctataggaggttgagaagagctgggcctgtggtcagtcactaaatcagactggggtgggggtgggaaagtgaagggacattggcaatgtctaagtaaagctggagctgggatgggggatggggtacagccagtggctgggtcaggctgagtagaggatagtgctgtggtcagtggcagggtcaggctgggagtgaagtgggggtgtggtcagtggcctggctgggcgtgggatcagcaagacccagtttcctctttgggtctcgtttcctcttttctgttggggagtgggggaaggggatctacaaatggtccaagaaattaaaagaggcttagatccagggggtgacacacagcaggggatgggagtagggtattcagcagatgaccaggtggaatgtaggtacatgactgggtgaaaatggtaggagagtaatttaaaatgatgggaaagctcaggttttgatgagggtaaattcaggtaggatgtgcggattaaaggttggtgagggaggtagaactaaggatgggaacggatgataagatgagcatgggagagttaaaggcaagggaagtattttgtaaggggataggcaggatgggtgtgaaatgcagagtcagggatgagagttggagaggagggcttaataccaagagaacaagtgaagtgggagaagcagggctaaactttcaggggattcagttattcccttctcccatggcaacagtgattccttggttagcttcccccatagtcatcagctccttcttccctaggcagtccccaacttgtgactaggccttgtacatcctgggtccctatttcccacctatgttgtctgtaaacaacacagtccagaatctctgtcccctaactgtggtggccacagcaagggccttgggcttagagaatggaataaagaagctggaatcccagatgcctgcaattctagctaaagccagaacgctagcctgaaattagtttatctctctgggtaaaaagaagcccctgtaactacataggaataaaggatttccctacaaaagaagggcatttacctactgccaacctcttaaattttatctgctcaaggtcaactatgctagcctcaaaccacaacccctaaagctgccccaaattcctaacattaaccccacctctaatttgtttcctgattcccagtaccggcttggacattcatccctttcctagcacagactcatatccaatccctgatccctgaaactgatctaagttttgcctttagcaccaaatcccctgatgttaaccctaaatgttgacccctaagcctaaagttcatttataatttgattcctaactcacgctttcactgtttatccttaacaccgaccatgccaacattctttaatccctcaaacaagctctaacctgattcctgttgtttgttgacccttaacctgaccctgaactcaaattatgacgtatgatggccatcccagcaaacaagataatgaccgtaatctaaaccttacctatctaaaacggacctgactcacactaactcttaagttttaaccccagcttttaactcctatagcgacccttgattcctaaacggaccccacctaatccccaactcacccaaagctttcctacccacatgcccgctatcagctaacaccaaagcccgtccccgccctgcgccccgctgccacccgactcctcacgctccccaaagcctatcccagacataggactgctcccaggaaaggcctgtcttccccaagacggcctacttcacgccgagctcaagccgagatgcgctggacgctgacctctccaactaataggacccgaaccggacacgcaagagaggcagggcccgcccgccccggggccaggccccgcggccccaccctaaggcccccgcccggcccggtctggcctacctgcgctgcctggctctgcgccccgcccgccggcccgccgccccgccgcttctcgggtcgccctcgggctccggcctcgccctcccttcgacactctctcggccacttccgtcctgggaacgtcccccacccgcgggcggcgccctgggcccgcgctctatggtcgcggggggcaggcaggaagctgctctggccccgttctcgatgctcgggagccgccaaagcccggcagcccctccctggcaggaagcgagggtgcggcgcaatccggagaggacgccaggacgacgcccgagttccctttcaggctagaactcttcctttttctagcttggggtagaaggcggagccggagccccggaacccccgccctcggggtgcgaggcggcagcagggccgtcccctacatttgcatagcccctgggacgtggcgctgcacccaagcctcttctcagttggagggaactccaagtcccacagtgccacggggtggggtgcgtcactttcgctgcgttggaggctgaggagaattgagcctgggaggcgggtccggagagggctatggaaagccgccggcggggaatcccggccgtagagggacagtggataggtgcccgaggcctacagctggcctggggctcgtgtctgggcttcggacgttggggcccggtggcccaccctttccgtagttgtcccaaatggagctggaattggatgctggtgaccaagacctgctggccttcctgctagaggaaagtggagatttggggacggcacccgatgaggccgtgagggccccactggactgggcgctgccgctttctgaggtaggttggggttctgactggggaaagcgtgggatgtccatgaagtcaggtgatggtgataaggtcaaggcctgttcattggaaccctgcgcaggtaccgagcgactgggaagtagatgatttgctgtgctccctgctgagtcccccagcgtcgttgaacattctcagctcctccaacccctgccttgtccaccatgaccacacctactccctcccacgggaaactgtctctatggatctaggtgagtctgaaataagtttgcggggaggacagggttcatgggcctggctattcatactttcccttttgcagagagtgagagctgtagaaaagaggggacccagatgactccacagcatatggaggagctggcagagcaggtacttgacttgattttcaggagattactctcacattccccaggtgggggcaggattccccattcctctctgacatccccatgcaactgccgtccactttcttgttaccctaggagattgctaggctagtactgacagatgaggagaagagtctattggagaaggaggggcttattctgcctgagacacttcctctcactaaggtaagactctcattggttgaacaaaggctgaaaagggattaaaagtcccaagtaggcaaattctgttaactttatatcaataactttaaaaaaggattgaggtgagaaacttagtagatttattgctaataggaagttgaggcaggtacacaatatgccagatgcaagggcagatcctcgtttttgttgggcttatacaaattttggtgttctgttaaaaaaataactcaaaattatcagtgcaacattagtattgggccttggaaaggactgtgtaagtgaagggccttgacacttcgt

SEQ ID NO: 12149 - DNA, 6000 bp, Homo sapiens
tagtagagatggggttttgccatgttggccaggctgatcttgaactccttacctcaggagatctgcctgccttggcctcccaaagtgctgggattacaggcatgagtcaccatgcctggcccacagcagccctttgaggctgttgaatatctgtgagaagatgaactggatcttagatctacaaccatactgtgcactgctgcgtggctgggagggaagtaggagttggaggggaactggaggtttgacctaatttcaggattctgtctctcccttatggggctaaaataaagaatgcagaatttgagtaaagtctctatttgctttctatatactttgctacatttctttttctacattactttctccttttctattgagatgtgttgtgaagtgtatctttcctgccttatttgatctacctttctatggctgttctctgccctctgttggcaggttctcttggacctgtccgtctgtgtgcaggggacaattgcatggagtcaaagcccatttctgctagtcaggtcagcagagaagatattttgttttctggaattctgtaggcctgggaggcatgatctggtgtagaacaaacctgaggatccagattcagctgcacaaataggtttgttataaaacgtttaatgctgtcagtttggggcatcagagcctatcacgaaaattagcatgagcccgaatcccatggtggttgcagagctcaactagggtcttgaggcacctttggcctgagtgtaaccaggattaggatttcttttgaagaagggacagggcagcttggaaaccataggagattctagcagctggccaatttgatgctctgcagtttagttctggatcagaaataaggtgtttggggccgggcgtggtggcttacgcctgtaatcccagcactttgggaatctgaggcgagtggatcacttgaggtcaggagttcgagaccagctggccaacatggtgaaacgctgtctctactaaaaacaaaaattagctgggcatggtggcgggcgcctgtaatcccagctacttggaaggctgaggcaggagaatcacttgaacctgggagatggaggttgcagtgagccgagattgcgccactacattccagcctgagtaacagagtgagactctgtctcaaaaaaagaaaaaaaaaaaaagaaaaagaaagagggtgttgattgaccctatccagaagaaattatagctggtatctgtttgtggattagaagaaggccatgacagtgctacaaagagaaagttggaccctagctggttgctgcttaggccagtagaatctagatttcctaggttttctatgtattgcagcatggtcaccaaatacagccaaaatattattgcccatatcaatgacagcagtgatagcttggatagtgggatatatacataaccgaagttctcatttatttaatattttcagctttccctcaaacatgaaaaaataaacaccaaaagcctttcactgtgtgttaataaaaaacctcattaggggatttatcttttatctccccactccttcccacttcccttttgtcttttaaattttatttttagtttttacttatgttttcttttcctttctttctttcttttttcttttgagatggagtcttgctctgtcgcacagtggcgcgatctctgctcactgcaatgtccgcctcccagattcaagcggttttcctgccccagcctcccaagtagctgggattacaggtgcccaccaccacgcccagctaatttttgtgtttttagtagagacgagatttcaccttgttggccagcctagtctcgaactcctgacctcaaacaatcctcctaccttggcctcctaaagtgctgggattacaggcgtgagccactgcaccaggctccttccacttcctttttttttttttttttttttgagacagggtcttgctgtcacccaggctgcctctatcctctgggatcaagcgatccccccacctcagcctcccaagtagctgggaccacaggttcgtgccaccatatctgattgatttgtttggtttttaatagagattataggcattacaggcaagagccaccgtgcctggccccttcctactttctagttaactggccaactgggaggaaaagggaaaggcaagatgcttgaatgtttaatccctaacataatgaagaatagtccttaatgttcagaataatgacatatgatgcacttgtacttgcgtaggagtctgggtgacagtggtggctgatcctcactgagggctgcaggtgttccagagagacttgcctgggtttggtggctattatattgtaagcacagctttctacagtaagttccatgagtcagcaaaatatctataaagagcctctccttggagaccatgaaacctgcattttaatctctcttttgcaactaaaaagccatgtgggattgggggagaggagcaagtaaggacactgcgaccttcctctctgggatttggttttcaattatctttaaatgagagggctaaacaatatatttatatgatcctcttagccctgccattctgtaattctttcaggaattttgtcattttggatttgcttgtctcataaaacaatgtgtagttgcttaaaaatcaactattctatttggttgacttggtctaaagtatttctcatgttgtctcgtcattcttttgactgttccttttttttttttttgccttggccagataggacaaaattccttttcactgcagtattgggagcctggaactagagttaccaacccctctgcgttaaagaaggagctgtcctgaggcttccatctctactgggcttgaggcaagaacattgttagggacggcctgctcttggcctctgtgccccagggattgcaaatgcatgttcctcaaaggtaagggctgtatcattcggctttctttgtattcacaggtacagcttgtgctaggcagccggtgttcaataaatatcgtgcctaaggataaagtggcattgtccttaatttcccccaccaaaccactaggtgtcgccttcatctcagggaaaccatgcccgtcctcgccctatacactcccaccccactccagggctccaggagcgctcttagcttgtgatttctggagaaatagcttgaaggggggagagaaaccgtggctcttagcgcgggcagagaatgggcttatgtgcatgtcctttatgacagttggagaaaaatccccaaggtcccatagcagtccctctcagccaccatgagatcatccctcacaagctgttcttggggtcagattggcactccagatatgagggccctagggagagcttcctaagggaagctgggagcaaggtggaaccccaggagagcgtggatgggcttccactgcggggagtgtcccgccggtccgttacaggctttccccaggcgccagcctgcgctgtgcaggagacaaaagaaaatcgaggccctgactgagcagatggtgcggaggaagccgggcgggctgcggtgggcctctgaggacacgaggagggcagggggcatggagacagcggggggccgagagttgagtcccaagcaagaaggagcctcgtggactttctaaggactggtgggaagtgtacagcaggggcccctggctgctggaggggcccgtccagggagcgggcatggtccgcggtggagtaagccgcactgccgtcgggagggcgctatggtttgctaggtgagggggctggtgaggataccacacgtctggggatcctcgactgcttcctggagactggaaccactgagggactcagggagttcagaggggagacccaagaagaacgggctgagcgagggggagaggacaaaccctggggtcgctggcgtgtgtgagatggaaatggaaggaggggcggcagggggaccaggggcgtgggggagaccagggtaggccctgagagtgagggagcgcccgggaaccctgctggccggcgaggccttggtgcggagcccccaagtgctcaccggggtgggtttgggacctggcggtcccgagcgcccgggtggggggtgggggaaggcagccggcgccggagggtggggccgggagggaggaggagaggcagcgggggaggggcgggggcgggcggcctgcccgggggagtcgcactcggccgccggcgcagcgagcggagacgggccgggccgaggcgacctgacccggacgagcggcgcgcgcggggcccaggcggggggcgggaggaagcgccgggcagcgccggccgccagggcccaggagaagcggagcagagaggagcggggacacgggcggggccgccgtagctccggatgggaccagcgcccgggcccgttagtccaagcaggagctccgggagaatccttcacagggagatttacccctgccttcccctgccctccggcccaggcctcgcttcgctccccgcctgcccatgatcccagtccttccgcggcgcgggcaccctcccaccttacccccttggtcctatgtggcgcagcgccctcctgccctcccggccctttcagctgtgaggttcccccaggccgtttctttgtaccacccgccccccacccccaccccatcccagtcccagatccccttttccttctcagctttagatttatcaggcttcttcacctcgcactgtccccatcctggccgcaggccccctcggtccctccctccccctgccaccccgttctcagtcctcagtccttgccctaggctggtagcccactccttgcccgccccccgccttcctcccatctccccctcctctccccggcccccagcaccttctgcatcccagcctacctagcctactcctcctcttcctggccctcttccccaggctccaggctggggggtgctcgcgtctcccctgtaggccagagcagccccaagttctgggggcggtggggctgctgctttatccccatggcgctgccatcacttctgctgttggtggcagccctggcaggtggggtgcgtcctcccggggcgcggaacctgacgctggcggtggtgctgccagaacacaacctgagctatgcctgggcctggccacgggtgggacccgctgtggcactagctgtggaggctctgggccgggcactgcccgtggacctgcggtttgtcagctccgaactggaaggcgcctgctctgagtacctggcaccgctgagcgctgtggacctcaagctgtaccatgaccccgacctgctgttaggtcccggttgcgtgtaccctgctgcctctgtggcccgctttgcctcccactggcgccttcccctgctgactgcgggtgctgtggcctctggtttttcggctaagaatgaccattatcgtaccctggttcgcactggcccctctgctcccaagctgggtgagtttgtggtgacactacacgggcacttcaattggactgcccgtgctgccttgctgtacctggatgctcgcacagatgaccggcctcactacttcaccatcgagggcgtctttgaggccctgcagggcagcaacctcagtgtgcagcaccaggtgtatgcccgagagccagggggccccgagcaggccacccacttcatccgggccaacgggcgcagtgagtgtggcctgggctattttagggtcatgggaggagggtcgctgtgtccctaaagctcagcactggggaactgtagatggagataggcattgagcagctgtatgtggtggttgggatcaagaagcacacgtggacagagcacctgtgagagggccaaggcttcatcatgggagcttgtgaacaccctaggcagatgcaaacaaggaagaagagagcatgaggggtgaagccttgtatcaaggtggaatgtgaaaatgaggggatattaagtttcgggagcaatgtttgtgccctagagtagtgaatgtgattgatagccactctgaaatg

SEQ ID NO: 12150 - DNA, 6000 bp, Homo sapiens; identical to SEQ ID NO: 2585

SEQ ID NO: 12151 - DNA, 6000 bp, Homo sapiens; identical to SEQ ID NO: 2587

SEQ ID NO: 12152 - DNA, 6000 bp, Homo sapiens
gcttaagatacaagtgcacctcttctaaagggttctgagtctttaatatgcaaactcctccaagccttggcactaaatgtattgcagaaggaacattcctttggcatgttaggcatgtaagggacttttcagagcatcttgtctaactctctcatggtgcagacaaggaatctgccaccaagaaagaatgcagatttcactgttgtggggacagagctggagtgacaaaccaggtcttacggctcctaattcaatgctctttccaatcctgagaggaaagaggaacaaggggatggataggattaagaaagaaagaaagaaaaaaggcagcaaaaaagaaagcaaagctggatgaaagagaagagggtacagggaattaagaagaaaaggaaggcgatgcatatgaggttgtcaagcctttgcttgaatgtaaggttcccagggtaaactggtcctctgaaattagtgtctcaagttatacaggggcatcagctaagcgtttagcctttcttgtctgcttagacatgaagtttctagaaagagagggcaatgtggcaggaggatggtccctagagatttgggaaggatgctggctctacttctctactcttcaatgtcaacgaatgcaatgcatgcctttcatctggattcctgtttttttctcattggaaaaaaaataaaggacagatgaacaggtggaactatccatagctcaccaatgttcctcaagttccctctgaatatttattggacttcagttgctcttgagacatcaccaaaaaaaaaaaaaaatgctaaatgtgcattagcaacttagagaaatgcaacctccggcatttcatagaaaggtccagaaagaatgtgtaactggttcaaagtggcgtagctaagaagaatatatcgatgatctgatgtggtgtcacaaagcacccaaacacgtagtggatgaagtagtcttcaaaaaatggctgctatcagctcttttattcctgaacataacacagtacccctcaagtcagaaggcagagtctatttcccctcctcttgaatctgactggccttgtgacttgctttgaccaatagactgaagcagaaataacattctagaacttccaaactcaacccttaagagaattggcagtttctattcctccctcttggaagcaagatgccatagaagaagtctaaccaccttgctgggaggaagcccaagccagctggatggacagagagaggtcatgtggaggagaactgaggtgcctgatatgtgaatgaggccttcttgaaccttccaattcagtccggctgccagtggccagttgaatgccgtcaaatgagtgacctaggccaggcacagtggctcatacctgtaataccagcactttaggggttgaggttggaaggttgcttgagctaggagtttgagaccatcctgggcaacacagtgagaccttatctccacacaaaaaaataaaaacaattagctaggcgttggggtgcatgcctgtggtcccagctacttgggaggcggaggtgggaggattgcttgagtccaggagatcaaggctgcagtaaactgtaatcatgccattgcactccagcctgttccagcctgtgtgacacagcaagaccctgtctcaaaagcaagcaaacaaacaacaacaacaacaaaaacaaacaaaaaaaccatgagtgaccttaggcaatactcagctaggcttagttgacccactgaatcatgaaaaatagtaaatgactgatgattttggcaactaagttttgggattgtttgttaagcagcaatcaatatctgaaacagtggctttaaacagcaaccatttattgtttctcatgaatctatgagttgggagggtggttctggtgatctggaccaagcctagccaatctcattcagacttgcttgtgcctccacagtcaagtgagggctgactggtcaaggatgcctcagctgttatgactcagctctgctctacagggtctttcatcttccagcaggcttattctggtgatgtcagaattccaagactggaaacagaaatgtgtaaacatttttccagcgttcatttacatcaagccggctactgtcttgttggtcaaagtaaatcatacggttgggcccagaataggagtggactacaaggttagagggaaagaccttggagaaaaaaggaggtcatttattggggggccactaatactatcaaatgtactactaggaacccatgcatgtttctcatagttagaggagtattcaatagcattattaaagttttggactgaggtcaggaatcaattgaaaaaattacatttaaaattaagcaaaataattagatgaatattttctgatttttaaataggtttccagaatttctggccaagtcactattgctcatgatattgatgttgttgtattatttccaatacaggatgactttcctaaatccctgttgatagagttggagatagaatcaggaagaaataccaggtctcatactacatggtcattcattccattaatcaattcacagtaataatgcaatcgtaaggctcttggtagagttccttagaatcctgcttcataaagttagctctctaaatagccagtgggcagtctggttggacacttctctctgaaaacctaaggctgtttgcttttgggctttacagaagtggctcaataccaggctcattaatgggaaaagggtcatgtgtatggatacatgtatttggacatttatacgtaatgcgtgatcacttttgatccaatgtttggctttacctgtcttcatctcccctgcattaccagaaactgactttgcactttcacttaccaccgcctccctgggaggcaaattcattttccactctggatttcatagctgaagtctgagaagcaggaaaaggagagactgggattaccattcccagattccaaactagcctgctagttacagcggtatgatgctgccccctatacagtgattcgtaccagtcagatgaacggttctttgatcggttcttctgtcctccaccactggtctatccaccccatcttgaactttgttaatacaatatttctgctagttattgttcagggattgagagtcagggaaactgtgttctggtccttgggttacttaatgtcttgagaccttagtttcctcatctgtaaagcgggagggctggactagatgtatgttcctcctgctctgagctgtgaagcgtctaggatgccaggagaaaaccagacccaagtcacagggttctaaacaaaccataccttaaatctctcagtaatggccagccacatctgcaagaagcaggctgggaaaacagctgaagaataacagatatttgttttatttgtcaattatggctcagtaaagctaaaaaaaaatagatacttctgttatcaagaaattattgcacttgattcaaggctgatattaaaccatagcagactcactcaaggtggggggtgagagaaacaaagagattacaaaactgaaaagaggtgttcatttgcagagaactaagggagtatccttcaaacagaaactggaagccagagatctctgaagataaggatcatgaaatgttgttattccccagacagaatgtatcccacgttttccaccggcgttgtttttggtaaagaagggtaagtggaaggaagtgatgaggctgaaaaataccatttgcttcaattcagccgcgaaggatccgctaccttttggttcctattaagtgaatttagctttagctttcatgatagcattttcccaaaggagtcctttagatctgacccctaccctcttcgcagctagactgacatcaggtgacgttgcaagtgcccccagcccactaagcgctatcagtaggaattggccctcagccccgtcacagcgctttcccatgacatcccccagcttctctctcctaggacctcctcgccagcctacccctacctgttgggtaggtcttacttgctgggaacacctgctgtccttagaatgggagcaaccaacgccttggaatcctggcctgtcccttcctcgtgaagggggcgcctgcgctcaagtgccggcttcgccgcctcaggcagagtctagcaggcgggcgaccaggcgtagctgagttctgtggcctggggaaaggggacgccctatccccacagccctgtttcgcagggcttcaagacgctgagaacggccgggaacccctggagtcttggaggcacccgccaattccaggggcccaccccaaccccgctctcagtctgggccagcggcggcgggacaggcgcccggtccccacacaccggctgagacgcccagcccactgcggctgaagctccggccgctgttgcggcaggtgctgcaaaccggtctgccttcgctgcagggcttgcggggatggggcaagtgggtggagagaaaaggggaagagcctgggcggccggcaggcggggcctgcagcctccccagccgcggcagccgccgcgcagccggctctctctgcgcctcgctccgactccggcgcgcaccaagcgggaacccgcgcccgagcccggcgggcgccgctgctgctcctctcggtccccggttcccggtccccgaacgcgccgcggcgaggctgcgcccggcagtggagccgctcggagctgctgggctttggcggccgctcgctgctccgtctggccggaggaccggcggggaaggaaggggaaagcggggacacacacactcgccgcggcgcgcgcgcactgcacactcgtagccgcgcgcccccgccaaggcgcgtccggagcgagtttggccccgcggctccagccccggcacctgcccgccctcagcgttgcccccggccccggccccgcccgccgccccctccgccctcccgcccctcccgcccctcccgcccctcgcctgcactgctctcccttcgctgtggggaagcgacaacgtcccgataacttgcagactgtggcgcaactggtcttggtagcggaggcacccgaatgctgcccgggtgaggtaagtttcctgtgcgtccccggccccttcccactagacccttctgaggggcttgcgcttaggggctctgcatctctgctgaaacccgtcggtctctctacccttccactttgcctgtctgcgttgtgctgggggtgacgtggagagggcgcccgtggccaccgaagcggaccttcgttccgcgggggccacagctgcgcgctcccaacggacacccacccgctcgtcacccggatccccggggccgcagtgacactcggagatcactctgggttcacttaaataggagtactctccccttttccggggaacctgcagagtttggcagcggaaggaaaggtctcccaccaccctcccccggtacgaaacagcggtgaacttgttaggcgccctggtatctcaagaggggcttgcgagttggtgttctgctcatttctggcgctggtgccggattgaacaggtgcggtatggttccagtctaaatgcagcaacagacttctgcgtttcccaggctttctcccccagcctggtcaacgtgacgcttcaacatctggggcaggggctgggagtgtaggggcactggggagggagaatgcccgggtttgatttactatgccggtgccaggagtcgccagaacagaagaaaacaaatgtctgcttatctggcatctatgcagatgagcgtgttgtcatttcttatcccccccaacccccagctctcttgtctggtgcccagcgtggctgagtagaaacctattccggagaagttatttgggtagattgattaattctttcatcgaatctactgaaatcagggctccgaacaaggcaatcctagttactctgatgcttttttaaagggagcgtgttacagatcagaaataacacccactatcatcactacctctctgtgacattctcagatgcaggaggccctagcttt

SEQ ID NO: 12153 - DNA, 6000 bp, Homo sapiens
tttttttttgggggggggatggagtttcactcttgtcgcccaggctggagtgcagtggcgtgatctcggcttactgaaacccccacctcccaagttcaagtgattctcctgcctcagtctcccaagtagctgggactacaggcgcctgctaccatgccagctaatttttttgtatttttagtagagacggggtttcaccatgttagtcagggtggtctcgaactcctgatctcagttgatccatccgcctcggcctcccaaagttttgggattacaggcgtgagccaccgtacccggctgaacttgtaaacttttcagtgttagttttctttgctcccagttgatgatactttataaccatattgcagatatatacatatatatatatacacacacacagatatgtttcttaagatctccacattcttgagaaaatatgactaaaaggcatttagtttatctcattaaggtcttctgaccaacttatttcttattttttgagacagtgtctctctctgtcacctaggctgcagtatagtggtgcagtcatagcttactgcagcctcaaattcctgggctcaagcaatcctctcccctcagtcctcgagtagctgggactacaggcacatgctaccatgcccaggtaattttattttattattagtttttgtagagacagaatctcactatgttgtccaggctggactcaaatccctaggctcaagcaatcctcctgtctagcctcccaaagtgctgggattacaagcatgagcccctgcacctagctgaccaacctatttcagagaccttatatattgtaatatacactgaaaagttgaaaaaaattgtccattgcacaaacaataactaaatttaaaaagaaaaatatatgcacaagcctgtcttttcatgaagtcatttttttgcatactttccagtttttattttttttataattttatcactgtcatcatcatacattagatgtaatttgtgtttttttgttgataattatagcattatcattctccttgttgtatagacttccttattacaattttaaatgatggtctgctatgccaattatgttgatttactgtaatttaatagcccagcccaccatcattggacattggtggtttccatcattcattattagatacaggcatatagtgaagtgctgcctcatacctagtcatccactgtaatctaacctccagtcgtatctttccattgaaaagctctggccaagataagcagtggtcctccacttaatgaacatcatcagttcttaccttaattgacctcctcgaaattccatgttgttggcctctccctctttcctgaagtttgttctttccttggctttttggacactctcctccagaagcgttttctttcctttctggcagctcctctttggtctctgttctggcaactcaagtctgccccctaaatattggcattcccagagatgagtcctgtccttagtcctctcttggcttaatctacatcacgtctctgaatgtgggattgtcccctcccaagacttcaacttttatgatacattgatgatacccaaatcactcccaaatctctctcctcaaatactcatcagtgcctagcacataggagacacttgatacatatttgttaaattactgaacatcttcacctggatgacccatagcacttgaaaatcagtctgtaactaaactcatcatctttcttcaagctcctcccaagatctgctcccactcctgtgttctgttttgataaaagccaccgtcatctcctttaagtaagccagaaacctgagagtcagcgtaggctcacttcccgctcgcgtctccccatatctagtcaggcagtcatccagcctgctgatctacttccttagtttctctagaatctggctcccttttgtctaacactgcctaacttcatagccacgtcatctctcacctgcattcccacaaaaatgcatttttggccggtcttgtcattcttactaacattctcctcccccaccaacccctgtcccccaccaactgtcaaatccatctttatacttgcctgggcaacttcaccttctggcacctcaagagtaagcctgctgtctcttccttccttacttctctctgtgttatttattccccttacctggaaggcttttttccttctttgtgtcttaaaaactcattccgacctctcctttagaatgtataagcaaccccatctctggaaagccttccctaagtctctcctgctagaccactctgagcctgccaggaatctcagtgcttacacagtttatcattacttgttgattgtctactgcaatagactgagtttcctaaggcaggatcctgagtattttatcaaggggttgacagaggtgttcagtaagtacctgttgagtagaagaatttttttttttttttttttttttttgagacggaatctcgctctgtcaccaggctggagtgcagtggtgcaatctcgtctcactgtaacctccgcctcttgggttcaagcgattctcctgcctcagcctcctgaacagctgggactacaggcgtgcgccaccacgcccagctaatttttgttatttttagtagagacggggtctcaccatgttggccaggatggtcttgatttcttgacctcgcgatctgtccgcctcgacctcccaaagtgctgggattacaggcatgagccaccgcgccctgcggagtagaagttctttggataaacacattctaggagtggggtcaaaatgtgcaaacccacacgtgaagaagatgactaataaattgtttctccaaagagttgtattgatttacactgccaccagcaaaaaagctaatatatcaactgaaccgtgtttctaacaaccatttactgaatgcttatcatctgtcaggtgttgtgccagaagaatggagtttgtctataaatatttcatcatttcgagtagtgcagtccaacagaactttctgcattgatggaaatattctatatttgcactgtccaatagggtagctattagccacatgtggcttctgagcccttgaaatgagacaagtgtgactgaagaactgaatttgtcatttcctctaattttagttaatttacatgtaaatgtaaacacttactggtggcaagtggtcatcttattgaacagtgccgctctagagagaaaaaaggaaatcagtcagtagatgtaactgccacattctggattattttttaaatgttagtggctctaagcccacatcattaaggtgtggccacctttcaagtgctatcatttttattagtcagcaccacctaatttgggaaatattttatttttttttccttttttttgattaaaacaatttttaaaaaatagagatggggtctcactatgttgcccagactggtctcaaactcgtgggctcaagtgattctcctgccttgccttcccaaagtgctgggattacaggcatgagccaccgtgcctggccagatttgggaaacattttataaataggtgcttagatcaggagagcaatgccttacatcaggaatacaaccaaaatgtctaagtccggagactcgaggcaaagtgggaaacgttactcacagtgctttttatccagaggcgtggacttagttactccaaaggagtccagaagcataacacttctggagaggcatctactggacttgtttttccacgaaacttctagacttgttttgatcaggcaggaagtgaagcaacttttcagggagagagcccagcatctgcatctcctctgggacagaccacaccttttaccttctacttgtgagcctaggacgagttttgctttccaattaagggaagagcagggcaggcaaaactattctcttacaagatggttttttaagatttcaaacccaaggttatatttttaatcggtacctgtttggattctccaaattaatttatatgctcttaaaataaagacacttaacgtcactgcacaattctttgcacatggaggacttcgaaaggaataagcacactgaattgcattagatgaatcctgtcagataagcacttgtgacctactggcaaccttttataagctgatgatgggagaggagtttcaatctctttattggagttgttggaaatgtgccaaagagataacctggaatatattgtcctgaaaagtcctgttttaatatttaatacgaacatcttataaccctcggaattcgggtaggcagttgttgggctgagaaatgtggggtacaaggccgtgtatgtgttggttagccgggcaggcctctagacaggacctaaaactttgaggttttcccagttcgactcttcgtaggagaactgaagctgcctgtgtgaggccctgcgaacctcgccaaaaagtcttcctacaggatgcccccgcgacctcaccggggaaacaccgcggacagtcgggccagcagcgcccggagctcactccaggtctccaaacttgcagcacttcccagagcgcgcgcgctcggagcgggacctgcttgctccagtgcacgccgcggagcgaaccatcgggctggcgggggtggaggggtgcaggcgtgggggctgcgggccgctcgggccttgggcttctcctgccgccgccgccgcctcccgcccccggccaggagtcgcgcgtgacgcggttcgccgcaggagcctcgaaggcgcggcgccggcgagcccttccccggcaggcgcgtgggtggtagcggccaatttgacagtttcccgggccgggcggccagcgcggaggcgccacgctcgggtcgggggcgggctgacgccgccgccgccgcgggaggagggacaaaggggtgggtccccgcgggtcggcaccccggcggttgggctgcgggtcagagcactgtccggtggtgcccaggaggagtaggagcaggagcagaagcagaagcggggtccggagctgcgcgcctacgcgggacctgtgtccgaaatgccggtgcgaggagaccgcgggtttccaccccggcgggagctgtcaggttggctccgcgtaagtgcctccttgtgccgcgcggttgggaggagggtcgtgagcgtgagcgtgggagcgctgggggctctgctcgcgtgctgctctgaagttgttccccgatgcgccgtaggaagctgggattctcccatccggacgtgggacgcaggggaggggtaggtttcaccgtccgggctgatgactcgtggcctccggggctcctggaacctttactctgaagtcacttgggctggagattaaggcgcgagtaggggacactgtcttgaacccggtgtcctggatttctgctggcttggaggcatctcgtgtctgttgtgtcgcttgcatgtctttgtgttttccttctctatttcaaaccacactcggtattgatgcaaagttacaggcttgtgtacgtgagagaaactgaaaactcatcacagagcagaatcccttttccctttcaatcagctgcgtctgtaatagaagtaaaagttgtttttttttttttttttttccagtagggaatggggatggaggtttggaaggacccacaaaagaggagtgtgatgaatgctttgtattctagtactagcctacctgtcaccagttctttttatgtcttcatttgtcaagtttctgcttttacacggtagtttaagttataaataatcagggatttctaccacagggttttaacattcttgaaatgtggacaaacttgggagtgagtgctcccgcgcttagtaatggaatacagcctcccacctctatttcagcttcagttcttaggctaggctgcttttctggcagctgtctggcctgagtaatgatggttgtggtttccctgaagttcccagcggagagtcatcccatgatagaaactgccttgcgcttctcactcacgctctcagcccggggaatcccagcggggaggagggagggaggt

SEQ ID NO: 12154 - DNA, 6000 bp, Homo sapiens
agaaacagtgtatgggttctttattattattatcatttattgagatggagtttctctctgtcacctaggctggagtgcagtggtgcgacttcggctcactgcaacctctctctcctgggttcaagcgattctcctgcctaagcctccaagtagtggggattacaggcatgcaccaccatgcctggctaatttttgtgtttttagtagagaaggggtttcaccatgttggccaggctggtctcaaactcctgaccccaagtgatctgcccccctcccccaagtgatctccctcccaaaatgctgggattacaggcatgagtcactgtgcctggcctaggttctctatttttaagatcattttattaataaacattgtgaaaaatggcttgtcagtagaatcaagtgcttcgtatttatgatgatgaaatgtgatctcttaaactttcaaatatagtgaagactatttaaaaggagagagttttatagttttccactgtaggaagaagattctaggttcgaatgagttaactgtgacatatgggaattcatagcccattttggtttttcacatatttttaaacatactaaattcagaaaacaatgttaaagactatgtttttgaagaagacatagcttgctttaaatttaaaacactaaatagcagaaataaatgggtactttatttcacaaattcttaccctaattcaaaatgtttccaatttagagaaataagcttagaaatgtgttttcatggactaccgtttttatactgactacagtgtgaatagttatttaggaatttctgccaatattgtgaacaaattaaggcttcaaaatatctgctgtgcagtgcatacatatagtgcgcattcaataaacatttagttgaattatgacagttctcactgtaataaattggtttcttaagctggatcctttatttaatattcacaattttcacatgacctttggaacttttggatgatgggggaagtagtgtggagagttacagtttactactgtaaagaagaaatccatattttcttaacaaacttttcacaaatgctgttcatgtccataattagacccccttagtgcttctagatcttatttgatctcacatttagttccacagacatttacctagaacctatggcactggttttattgttctgatgtgtgggtttcagttgcttaacatgtgtgtccagttttccattatttcagggcagagctcatgtttttcttatcctcctccttccttttatccttttgtctctgtaccatcttttgacagattataggatatggaattccaattccatatcagcaaattgcaggtcacttttattgagaacacttggaaaaaaagaagtaaggagaatggtggcccagcttggtgcctaagggctctggctcgggtgtcaaaagtgggttccaatcctcccctgatcactcattaattgtgcaaccttgggcaaggtactaaacttctacaaacctccatttcctcatacataaaatgaggatggcactaataactagctcataaggtagttttaacataggccaggtgcagtggctcacgcctgtaatcccagcattttgggaggccgaggcgcgcggatcacaaggtcaggtgtttgagaccaccctgaccaacatggtgaaaccccgtctctacaaaaaatacaaaaattagccaggtgtggtggtgtgcccctgtaatcccagctactcaggaggcagaggcaggagaatcgcttgaaccctggaggtggaggttgcagtgagctgagatcacgccactgcactccaagctaggtggcagagcgagactccatctcaaaataaataaataaataaataaataaatggaataatgcttacaaaacctagcacatggttatcaccagatagatgtcatgattggtatataaatataaataaatgaggaggtttttccagtaaaacattggaggaggtaaagacagctgagaaagcaactactgccttggtactacattcttttctttattagaatgagaactcagatgtgcttccgatgtcctttagccagaataacttctggaaagagcccaagatatattaacatgtatactacagaaaagatttgaacaatagcccctcagttgtgcaaagtaggccagcattccagagagccttccggacattcgcttttaaatttctgtgtccctaaaactatggtgtaaactgaaatgacaggacttacagctctaagttataaaaatcagaaaggaccagacacatttaaacaatgcctcagcatgcaagccatttgtgataaagcaaattaatttctaattttcttattgtaacttaggggaagtggtcttttgaaaaattcatattaagcaggggatgaaaacaggaaatggattttgcagtcttcagtcttaatttaagatgccaaatggcactgacaattgcatgtgctgcctttgttttagtgacggtaaaaagaaaaaacaggttgggcgcggtggctcacgcctgtaatcccagcactttgggaggctgaggtgggtggctcacttgaggtcaggagttcaagaccagtctggctaacatggtgaaaccccatctctaataaaaatacaaaaattagctgggcggtagtggtgtgtacttgtaatcccagctactcgtgagactgaggcaggagaatcgcttgaacccaggaggcggaggttgcggtgagctgagatcacaccactgcactccaatctgagtgacagagtgagaccctgtcccccaaaaaataaaaaatgaaattaaaattaaaaaataaaaaaacagctgggagtctgaggcaggcagatcacgtgaggtcaggagttgaagaccagcctggtcaacatggtgaaaccccgtctctacaaaaatacaaaaattagctgggcatgatggcaggtgcctgtaatcccagctactcaggaggctggggcaggagaatcacttgaacctgggaggcaaagactgcagtgacccacgacagtgctactgcattctggcctgggtgacagagcgagactctgcctcaaaaaataaaaataaaataaaaaataaaaataaaaaacaaatgaaaaccaaccaaacaacaacaacaaaagccaaaaataaaaatgcctgtgagagatttcttagagtcactcattattagttcatgctcccagtagagatatttcttcaatcaagtcccagtttcctcctcttttattgcattctttcgtgaagaaagcttaaagaaatgaattcttgtccttggaaatgagggaggactatactatgctttctctagaaggcactactgtgtgtttgagcatgtttttcaaataattagtaggtgtgagtggttctgccaatagacatactacatttattttcagtgatcacttgaaaaacacacctataagcttataattgctgacattaacaaacaacaggtatgaagatgctgttcacaaaaagtgcatgtagttccatgtgttttatttagtctgtttgaaatgaagtttagcatatctatagcacacagcatgaaacatgtcagtcattttgaatttaacattgtgcataatgtattcataagaattatatttatttattagcatttatcttcaaatcaaaggttaaaagtttcaagatgcacaaaaatggttaactttctgtgagaagtctgagaaatcactgaagacatgaaaatgacaggctggaggaagaagtaaagaacctagaaggccaaaatggaattctaagataacatgaatatagaacatagaaaagagaaaggattgattgaaaaaaggaaaggggaaaaaaaaggaattattaaatggaaacattagattcaagtaaacccaaaacaatcatcaaagtagatgttaacagcattttgagtacatgttgtgagtatgagaagtgcaattctaaatgttaggcccttatgttttaacatatcagcaaatacaatattttgtttctaatttaacaaatttttaagacttatgttagttgtgacatatttccaataaataattatgtttcccaaggacactgggtacaataaagtgggtctgacaattaacttacctttgaaacctgagcccttcattagttacaggaatagactggaacatgatttttcctctcctgcttggagaacccacaagttgtgttttctttatgaatattggaaattctttcttttagccaaatgaagggtgtgcatttcttcggccaggagttaccaggctgataatcctgatgcagcggttctcaaagtctcctcagaaggcccgcagtagcaccagcagcaccaaaggacttgttggaaacaccagttttctaggccgggcacagtggctcatgcctgtaatcccagcactttcggaggccgaactcctgaggtcaggagttttgagaccagcctggccaacatggcaaaaccccgcctctactaaaaatacaaaaattagccgggtgtagtggcgggcacctgaaatcacagttacttgggaggctgaggcaggagaatcacttgaacctgggaggcagaagttgcagtgagacaagatcacaccattgcactccagcctgggcgacaagagcaaaacctctgattagaaaaaaaaaaacaaacaggcgccgtggctcacgcctataaccccagcacttcaggaggttgaggtgggcggatcacctgaggtcaggagttcaagatcagcctggccaatagagtgaaaccccgcctctacaaaaacatgatggcgcgcgactgtttcccatctactcagaggctgaggcgggagaatcgcttgaacccggaaggcggaggttgcagtgagctgaaatcacgccattgcgctccagcctgggtgacagagcaagactccgtcacaaaaaaaaaaagaaaaaagaaacaccagttttctgatttcaccgaagacctactgcctcagaaactatgagggcagaacccagcaatctgtgctttctttcacaagccctccaggagttgctgaaatttaggaatcattgccccaaaaagtggccctcataatgatgccaggtaaggaaagacaacattattacctatgtgtggtgtgttaacattctttatgaaacatgtgtgaagacctaaatcgaagactttctccatgagatattccctaatcacattagtgaaataaaactatatttcctctacttttctactgctacagaaatctcccccagttaggatagtcccagtttcctatttatctttgtttttcttgcagtgcacagcatgtcacccagtaattgataagtttttttttttttgagacggagtcttgctctgtctcccaggctggagtgcagtggcgcgatctcggctccccaagtagctgggactacaggcgcccgccatcacgcccggctaattttttgtatttttagtagagacggggtttcgccgtgttagccaggatggtctcgatttcctgacctcgtgatccgcccgcctcagcctcccaaagtgctgggattacaggcgtgagccaccgcacctggcctaattgatatgtttaaatgttaaaattaaatgcaatgatttcctaaaataaacaaatgtgggacaatttattgcactctgttcaaattcccattttgaagtggaattcaaacaaacatgacagtaaagggggacagtgagcacagggacaagagaaaaggagaaagggaagaaatacagagaactagataggaggaagtgtcaaagactgatgggtgtaagccacctttacctctggatattggttttcctttgaattgtggtatgtggtcatattgcttattagttataacatacagctgtcagaagagtttttcaattaaaatttcaaatgtaatattaaaactgtttggattccttcctactgggcactggacactgtctgtggagctgctggaaca

SEQ ID NO: 12155 - DNA, 6000 bp, Homo sapiens
ggcatggttggtgcatgcctgtaatcccagctacttgggaggctgaggcagaagaatcgcttgaacccgggaggcggaggttgcagtgagctgagattgcaccaccattgtactccagcctgggcaacaagagcgaaactctgtctcagaaaagaaaaaaaaaaaaaaaaaaaaaaaaaaaagaaccagtatcagggagtgggatgagcaggtggcccaatcaggcaactgatcaggacagagtttctttgtggtcagctggaaaagggcttcttgggaggggatgtgatatggtttggctgtgttcccacccaaaccccacccaaatctcatcttgaattgtaatccccataatccccacgtggtgagggaggggcttggtggaggtgattggatcgtgggggcagtttcccccgtgttgtttttgtgatagtgagtgagttctcaggagatctgatggtcttataaggctgttttccctgctcttgcttgctctctctcatctgccgccgtgtaagatgtgcctcttcccctgctgtcatgattaaaagtttcctgaggcccccccagccaggcaaaactgtgagtcaattaaacctcttttcttttcttttttttttttttttttttttgttagacagagtctcactctgtcgccaggctggagtgcagtggcatgatctcagctcactgcaacctccgcctcccgggttcaagcgactctcctgcctcagcctcctgagtagctgggattacaggcgtgcaccaccacgcctggataatttttgtatttttagtagagacagagtttcaccatgttggtcaggctggtctcgaactcctaaccttgtgattcgcccgcctcagcctcccagagtgctgagattacaggcgtgagccaccgcacccagcctttaaacctcttttctttataaatcatccagtctcagaaatgtctttatagcaatgtgaaagcagactaatacaggacattaaggggcttattccaaattccaatgctggtttaggctgagactagattaaagggcaaagacctgatggaaggagaaaagcctcattgaagtttgatcaagtaaggtatttgcccagattgatcagtaggggcaaatggttcagctaaccatttataagatgagaatggaaatttggagcgcatgtctatggccttgttgtaagtgtgaaaggatgttatccatgatgattacctaagtcatttggggaaaggtggttctatgtagttagtggtttctcagaaaatacagccgggagaggatgttcactggtctccagtaacacaaagtataggtcaagcaacaccatccccttactttttttttaatttattcttatttatttatctatttttgagatggaatcttgctctgtcacccaggctggagtgcagtggcatgatcttggctcactggaacctccgcctcccagattcaaccgattctcgtgcctcagcctccccagtagctaggattacaggcatgtgccaccgcacccagctaatttttatatttttagtagagacggggtttcgccatgttggctaggctggaactcgaactccttacctcaagtgatctgcccacctcggcctcccgaagtgctgggattacaggcataagccaccatgccctgcctctgtcccgttatttgattgtacttgtaactatagttttattatgacattttaagaatatattgctattgtattaatcattactatgacagctgtgtttatcagacactttcccacatctataatattaggagagttgggtgtttgtgatcatgagtttgctccttgtgctggttattgaagtatgtcttagagttcaaactcaagcttctatcttctgctttgtgagccagggctgggacttagcaaatcacatttcctataaggttttgcttataaggggtgcttgaggagagggacttgctactttatagctgcttactgttcctgtccatgttaccaagcaatggctcttctccctggctgcagcaacagctggttccagtttcttagatttgtttgtttgttttaatccaccctctcccatccagcctcaatatttaccttcagagataaaagcaccagctgggtaccgccccctcctttgaggtctgactcccagccaaccaggggccctctcctggctgttaggttctgataaccccaacacttcccctctccccagctctgtgcatggcagctgcttcctgcagttactctctctctgttactacaatgtttttgccttgccaatcttcatgaccttaaattctctgtaaaagtaattgctgtgatttctgttttctgactgggccctgactgatacacccctaagcattccagaaataccttctaaactacttgtatagatttatgggtgtatgttattgcaggcattaaaaataagtgggctgggcaaggtggctcacacctgtaatcccagcattatgggagactgaggtgggtggatcgcttgagcgtgggagttcaaacccagcctgggcaacatggtgaaaccctatctctacaaaaaataccaaaaaattaccgggcatggtggcacacacctgtagtcccagctacttgggaggttgaggtgagagaatcacctgagcaggggtaagttgaggctgcagtgagctgtgattgcgccactgtgctccagcctgagtaacagagtgagaccctgtcacatacacaaacaaaatggattacacttatggtatacaggcagtatccaactgacaaacaagatatattccaaaagttaattcataaatctattgcttggccaccacccctggttaatttatctatttttattttgtagaggtgaggtctggctatgctgcccaggctgatctcaaactcccaggctcaagtgatacttgtacctcggcttcctaaagtgttggaattacaagcgtgagccattgcaaacagccagctatattttatttttaattaattaatttatttatttttgagatggagccttgctttgtcacgcaggccagagtgcagtggcacgatctcagctcactgcaacctccacctcccgggttcaagcgattctcatgcctcagcctcctgagtagctgggactgcaggcacacgccaccgcagctggctaatttttgtatttttagtagagacggggttttggtatgttggccaggctggactcaaactcctgacttcaggtgatccacccacctcggcctcccaaagtgctggaattacaggcatgagccactgtgcccagccccggctatactttaaacttatgtttagcaattaacatgtcagtattttaacttacaaatgactcagacatttaatgaatatctattacttaatttaatatgttcgaaatttcaagtcaccaaaaaagatttttaaaactatttttaagtagacaaattttataaaacaaattatttttaaaagtttataaacttttattccatttacatttacctaatctacttgctcttaacaattatgcttgaattgctcatgaaaaatttcatgagatattaaacaaagctagccattgaaggagttcaggagtttttcccaaaatcatttcctctcccctaaattgtccctccccaatgaagaggatacacaagctcctaaaatctcagtttttgttgggggaggcagagggaatattagtttttcttttctgtgataccccctacacgaaatctgtgtactttttctcttgttaatctacctgcagtcaatttatttcatagacttagttatccaagcctcagagagtagaggggaagtctttcttcctctataccatcatcttatgttaatttttgttgacaaatcaggcaagtgtcaaacatatcacagtctaatggcctctgagttggatttttttttttttttttttttttttgagatggagtctcgctctgttgcccaggctggagtgcagtgacacgatctcggctcactgcaagctccgcctcccgggttcacgccattctcctgactcagcctcccgagtagctgggactacaggcgcccgccaccacgcctggctaattttttgtatatttagtagagacgcggtttcaccatgttagccaggatggtctcgatctcctgacctggtgatccgcccgcctcggcctcccaaagtgctgggattacaggcgtgagccaccgcgcccggccagaattttttttaaacaacatggaaacaaataagacctcgttctgttttctaggagctaaaaatccaacgaaagaagacacagacacaatattccccttgttacaaagagaactgtgtcaacttttataactgacacaaagatctgtgctataagggcggggaaggttttttcctactttccacagcactgtggattgttccacagtttaatttgatcttaatttttatgtggaaatacacatgaatgtaatgagttcttaaatgctaaatttaggaagcaaggttcgttaggggagagaaaaaaacacctacatggttatctctaaactttacatatcgagaaccttggaatttaattttattgttgttctgtaacatattttcatgtttaaaatcagaaaaggcagcatttctcgagtttcctgctttcgaggaagggaggcataaaatgtttaaaaagacgccgctcacacacctcttaagaatcagagcacagtgaggaagaggagcgaggaagcactaggatcgcagcgctactcccagaccacgtcagtgcccagagggcgccctcgcctgtaggcgggaaccgcgagtccgcagcaagtccccagccccgagctcgcgcaggtgggcgaggcggggacgtggtgggcggggcctagaaaggcggggcctctgggggcggccccggggcgggccacgctggtgtgagggctgcaggcgcagctccggagcgcctagagcgcggcgcggggcgggagcttggtggagcaggagcggctgggcatcctcctgagactccggggtcagacgcccactccaggtaaccggctctccctcgtgttcccctgctcggccgcccggcggtgggggaaggctgagaaggatgggtgggagggagccggctctcagccagtgccccgtggccccgggcgggctgggctcccccgcggaggaggaagcagaaccggggtgcgcccgggaccggaatggagcggcgcctcttccttccaccttcattttccgtccgctcagtggggctgggacgccggtgccccgtgtcccctgaaagtcactttctggcctcttgcccctggtccgtgtagcttagatgtcggaggggttggctgcgggcgtggataggcagggaacgaacagactcgctgccatcccatgggtgccaggggcttaacttcatttaacttcattgaatcctaacgccagcccggctaagatgcattttcacccctactttactgataaagaggccaacgctaggataataaatgactcaccctggagcaaactattactaataagaaaagagacgttagtttaggggctccgaagcctctcctttcctgctccctcgctttccttcttctcgcggcagtctaggaaactcgcgcgcagggtctattacgaaaacaagtgattcgtcttaaaagcattttaccccctcctaggtttctctttcctcttttttttaagtatctcaggcagattcctccaagttttggttattaggtttttgaaatggaagaagcccttgctcactgcttcttttctcctggcagcgctttctgcgcagcacaggcaccctcgcctgtcacgcctccctctcctcttcccgtctcccagcgtggatgagggcgcctgcagatcccggctagggcacggaccgcctaggccgaggtaggttctgtaggcacctggcatgctgtagatgcatataaacgttgccctgtac

SEQ ID NO: 12156 - DNA, 6000 bp, Homo sapiens
ttttgtagaattcaccaatgaagccatctgggagtggagttttctttgtggaaagttttaaaccagacattcaagttttacaatagatataggattatttaggtaatctgtttcttctatagtgagtttcattggctttttatctctcatagaatatgttcattacatttaagttgttaaatttatttgcataaagttgttcacaatatatccatagtatttaatatctatgaaatattcagtgttttaattgctctcattactgttattggtcctttgtgttttctcttttttatttctgatcagttggactagctgtttttattgatcttcacaaagaaccagctcttgatttaattaattttctctattggttttatgttttctatttcattattttccactctgctctgtattatttcttctcttctgcttacctcgtgtttaatttgttctttttttccctctgatttcttaaggtggaagctgaggtcattggttagagatctttcttctttcctgatacaggaatttagtgctataaaattccctctaaaaactgctttagttgtatcacacaaattctgatacatagtgttttacattttccttttgatttgttttaactctattcgctttaatcttttgcgtgcttctttctctggcctcaggtagctttattacctgcatgtgtcaatcagcactatgctgaatacttgagaggaaccctctgcagatgtccatagttctttctgggcaatactcttctctttgctactctgtcttgtgaactctgcactccttgatttctcttgagctagtctcctcaacttaggtagatggcctctgcctgggttccttctctctgaacgatgaccttcattgtcttatatccattgtcttaactttaatatattttgttcagtgttttggtcatatgattgagagaacaaatccgttccctattactccattttaatcagaagttggcagtattcttgcttatttttttacaactcagtattggatgttaaaatcaatgtattgagttattacatgcattcagaaatgaaatggtgtagaagagaaaaggatatattagtttatgtactaagggtaagtaagttttgtattatgacacttcttttttagttagtatatgcctttatgtatgtgttcattgggttgtgatataaaaggcatttcttattgtggatcatggtcaaaagagtttgagaaacattgctctaggtacatcatggttcagtgcaggtaggaacctgcagcacttaatttctatgcctgcattcaagggatctagaaaaaagtcatctctatattgttcatctgaaaaatgttcatcatctcttacaaaggtgtgatctgagaatccttgaagtgatctctgggacatatcttataggtcttaaaatcgaggtagatccacaattctatcagttaagaaatagctactgatcaccagtgtgttctagacactgtccatggaggtgttcagttactagcatgaataagtgggaggccctctctggcccagtactgaagcctatctggctactaaatgagacagaaagtaaggcaaggttttaagcagtgctaggagcactcagaacgcaaggaagatttgaaattgtgaaggtgagaaggagcgtgtctgggggaattatccaggttcttgcagacttagaggttaagaaagtgagatctcctttattttattttatttattcattaaaaatacacatatattttaacacctactatgtccttgagagatatcaatgaataaaatagataaaaatccctgccttcatggagtgtacattcttctgggagaaattttaaaaatatatataataagtaaattatctgtccaaaggacaaactgctatggttgaaatagtagagcagaagtagggtgattagaagtaggaccgcaaatcctaattttaagtgggagatagtggaatatatttagaatccaactataatagtagcatatatttactctaatagaaactctacaaatattccaacataattagactcttctggtgtacaaaccaccgtaagactgcctattctccataccgcattgacatgctgcagccactagggcgaaaatgggccgtttcttagaaaaatgggctcagagtatgggagtgtgagagaaatgtgggtgattacgcacacactccttccttccccaagtgttcctcaggggcttctccgcttaaggttcactgacaagacaggcggagttttacgtgcgtctgagaccaggtcatttttgcccttggcgtctcttccttggcgcgtcctcacctagtagagaatagaggcgcagctcaggagtaaacttcagcctggccgttcaccactcgatgtgtgttacagccgagtgacagtggtgagatagacctgctggccttgctttcgggacctgcagcaagatttttgggtgctgtccaagaattcccgcggttacactcagcgcccaggatctgtacaaaaaagccccaatagatgttttacgttcccttcgtaatatttaacgcttggcctagatccgagcattcactctaacgttcggtttcttgatccttcccatccccaaactctgcgggtagatcagtgactattactatattttgaacgagactccaacccattgctctctcgagagagaaggattgcccgcctttttcccccgggcaggagctcggcgaggccaggagagccgcgcaccggccgggcagggacgcgcaggcgtcgggcgccgctggttgcgcatctggcgccagagcgcgcccccagcgctgtgcccgccgcgacccgggccatgggctggtgctccggagcgtgccgggcgctctctccccgcgcgggggcaccagagccctcggaagtgtcaggcactgcggtgtattttccccgttctcttttaaatgactgcggaaaaacagattccgagccgcaaaagggaagacggattctcagacaaggcttgcaaatgccccgcagccatcatttaactgcacccgcagaatagttacggtttgtcacccgaccctcccggatcgcctaatttgtccctagtgagaccccgaggctctgcccgcgcctggcttcttcgtagctggatgcatatcgtgctccgggcagcgcgggcgcagggcacgcgttcgcgcacaccctagcacacatgaacacgcgcaaggtacggcaggggagcaagggcttgggatgccctacgtgggggtgggcatcgcggggagtgaatccacgatctgggaatggctacatcccgtcaggttaaaggatgagagaaaatgacgcggcgccacacatcggacaggccagggtggccaccgagcatttagaatacgcatcaggcgcgctcccttcccctcacatgtctctatttcccgggcgtgtgatggcagaaaacggcaggaaaaagacccacttagagagctagaattgtgtttggagactcccttccctctgcaaaagcaccaacaggaagcccctccaaaaccaccgatccccaaataggtggcccggaatgggggcggtgatccttggttaccaatgcagaacacgttttggtgtttacaacatttatttatttttaggatagcttgccctcccttttaggcagggtgggaaaggagaacgcggggagggagaagggagggaggattcctataataagaatcagcgcatttttcagagctgaaccaagcacggtttccatttcaaaaagggagacagcctctaccgcgattgtagaagagactgtggtgtgaattagggaccgggaggcgtcgaacggaggaacggttcatcttagaggtacctggatgtaaatgcacacacacacacagacacacacacgcacgcgcgtgcatgtctacacggccaggatgtgtgcgtgtgtgcgcgcgtgtgtgaactcccacatgctgctgctgtctgcttctggccagtggcaccgatgcctccctcctccctgctcgcccccagattcccctcccctccctggtgcttttgtctggagggtgttatgggtttgtgtgtgtatgagcgtgtgtgtgtttttggatttcagactaattttctggagtttctgcccctgctctgcgtcagccctcacgtcacttcgccagcagtagcagaggcggcggcggcggctcccggaattgggttggagcaggagcctcgctggctgcttcgctcgcgctctacgcgctcagtccccggcggtagcaggagcctggacccaggcgccgccggcgggcgtgaggcgccggagcccgggtgagcagcgcagatagtgccctcggtcgcctcggccctcactgtctccccctggggcggcctcggctactccccaggtgggacgtgccgcgccacctgcccgcgccaccggcacccagcggccgtggcggattctgcagcatcattcgggggccccgtcgcggagccaaagccgccggcagtctccgcattcccctttaaagggtccttcgcccggcctgtaccatggaatcctgtcttggggaccctttccctacctcccctcccttggcctcaggctcgaagagagagtgggcacactggtggctccagcggcgtcagtgccatcgcggggcaagttgattcctgggccggagctgggcactcatccatccacagtctccgggctggggtcggggtggggatgacgcgagcagagagggagagtgccccaattagtggtgttgggggtcctacgctcagtcttacgcgtgtctgtttgtcctcagcctcgaggtgcataccggacccccattcgcatctaacaaggaatctgcgccccagagagtcccgggagcgccgccggtcggtgcccggcgcgccgggccatgcagcgacggccgccgcggagctccgagcagcggtagcgcccccctgtaaagcggttcgctatgccggggccactgtgaaccctgccgcctgccggaacactcttcgctccggaccagctcagcctctgataagctggactcggcacgcccgcaacaagcaccgaggagttaagagagccgcaagcgcagggaaggcctccccgcacgggtgggggaaagcggccggtgcagcgcggggacaggcactcgggctggcactggctgctagggatgtcgtcctggataaggtggcatggacccgccatggcgcggctctggggcttctgctggctggttgtgggcttctggagggccgctttcgcctgtcccacgtcctgcaaatgcagtgcctctcggatctggtgcagcgacccttctcctggcatcgtggcatttccgagattggagcctaacagtgtagatcctgagaacatcaccgaaatgtgagttcctggagcttttcctcctttttctccttgcccctagggcccgagctggccaggtgggtaggtcctggaagtgaatgctgtcccaagagtggggagaagtcaaagacaagggatgcaggacagggtcatctgtcagttacctgctgtttcactggcttgggactgctagtgcagggagaagtgtgacactttagaataagtttcaaatatagatatacatatgccgattatatatttattcctcgtgggaaggaactcactatgctttttatatttcaaagctctgctgggtgtgctttaggctttcagtatgcactaacttagttttgggcatttttgtttcataaagtgctgtgtgtatgttgtgttagaagttccattaatattcactagaaaagaggttaaaataattaactttcccaaatctgttgagggaagtgacagtctctcccttaacatcttttttgagatttaagttaaccaatttcccttttcattttatatatcggattttgcttaggagatggcatccagagatggccttgaaaatgatctgtaagaggagaagttctgagtgttga

SEQ ID NO: 12157 - DNA, 6000 bp, Homo sapiens
tgccactaagtgatttaacagaagttacaaagggaaatggaatgatgcacttgtggaaatttactctagggttctctgaaattctccacaaggacgtttttagggaactaaactttgaatcaaggtgctgaatgtatgtgttcctcctaaattgttgtattgaaatcctaacccccaaggtgatggtattagaagatgcggcctttgggaagtgattagggcatgagggtggagtccacacgaacgggattagtgcccttctgaaagaagcccaagggagctcagttgtttcttcttcaacacaaggacacagagaaaagtcagtcatgtatgaaccagaaagcagacccccaccagacaccaaatctgctggtgtctccatcctggacctctcggtctccacatgtgagaaatacatttctgttgtttataagtcaccctgttgaatccatccctacaaacgttataaaattaattagggaggaggggagagggagaaatgaaaataagctaagcttgcagcacgttcagcgtaaaccatgagggcagctgctctctgacccctttcctcatagttgttcgtgccaattgcctccgagtcacagagacctcgtcaaaagattacagtccccatcactgctctataggcagcaacttgaacattataaaatgttatgttttccaggtgagggactctgttgggtcctgcatacgaatggaaccactgatgccagctggtctgaaggaccccacaggagctgactcaccgaagaacacagcttgtacaccctgatggtttcatcctccttatcctgaccaatcaacaacctcaatcttctatccctcaccctccacaatctccttaaaaaccccagctcagaactcctccggaagatgggtttgggggtctccactcatcccttgctccatccctgtgatcattaaactctttctctgctacaaatcttgctgtcttggtgttactgctctgttattgtacagcgggcatatgcatccgttggtcctgtaacaccatttatggtgctttgttatagcagtctgtatggactaagacacatagttgagaggttctgtagaactatggggaagaggcaggagaaatttgattgaaactgcaaagagttgatatgcatggcctcttcagaaatggtaagtgcacaatgtgttttggtgaaaagtaatgcagtaggaacttgccagtaagaatgattcatcaaaatgcagagctacagtttgactcatgcctaacagtaattctattttccagacatgctagtgatgcccctttgtgcttcagaccctacagttatacattatttatgccaagcttcagcttttattatttaagtattcgaagatttgcattttaaaggtacttagcactgtacttgatccttcataagtgctgcataagtaaatataaagtgaataaataacttcccactgtaaccaccagtttccttgctatgctcctgtttcttagttccacctaagccacttgctatttggcaatacagtagccttgagtttgagttatagctccaataaaagatctttgttcaactaattaaggatgcatttgtttgattttggtgattactgagttaactatgcagcaaattcttctgtgatagaaaatatgtataaattggaaataaatttactctgtccaccagactggagtgaggtggcacaatcttggctcactgcaccctccgcctcccaggctcaagcaattctcctgcctcagcctccagagtagctgggattacaggcgcctaccaccacgcctggctaatttttgtatttttagtagagacagggtttcactatgttggccaggctggtctcaaactcctgacctcaggtgatccacccacctcaacctcccagagtgctaggattacaggcgtgagccactgcgcccagtcaacaagaacaatttatccaagaactctgttggtataactaagattatcttttttatcatataaaaaattgtcttcctataatccgtatgtataattgcataataactataaaatttggatgcctaagcatttatgtgtaccaaagggttcatagaatcaataatctgtactgtttccactgttcttcaagtagatttctagattaactatgaagtccaaaggaagactgtcagcaggatgatcattttttcttgcccaccagatgcacactcgcagcactcccctgccagcccgtattcccccatccgttttcctcatgcggaaattagggaagcaggagcgcacaggggtccacaaaggctgacaatgaaaacacactgaaatgtacctcaaggtctctactgagacattcagacattgactatgataaggctgtgcagctgaggtgcacgaatttcacgtgtatgcaacatgagagatatttgcaggaagttaagcttcacgatgggaaatgcctgtgtgggtgtatttgtttgttttaaatacttaaggatgatcagagactatggggggaaaagctgttcttcctaagagaaattcactctcattttctaaggaattcttcccctttcctctgcttccctgcaggaaacgtggagtgagaccaaagctgtgactccagtccacaccagagcccaggaagactcccaggaccctggagatgcctgaggaccaggggcttgtggtatgcgggaaggagggttctacagtcaccatgaggaacagcaattggctgtagtaaaatacggactgacaaaggcaggaaggcaaaaggcacccaggttcgcccaggtgagatgagaggcccagttcttccgaggtaggtgtggtgtccctcaaaagcccccagggttctgttgtgggcaccacagtgtctggaagtgtgtgtggttggcggggcggggggggggtttgtcaaggaagggccttgaggctcatttcccctgcagcagcaggagcaaggggctggcactgggaagcctcgccctcgttgcagcaggcaggtgggtggatggttggatgaacagcataaccctgcagtgaagtctgtggagggaacagaggtgcatggatggagacatgcacacagcccaccagagactgggaacccccacacccacatggtcctctcatttatccagaaaggcgaacatcaggtttgaggaggaatggaacctaaaacaaatcttttccctaaatgtggagctgatgcgaccagttgtctctgctctccagttcctgtttctcacacagagcgcacctactgacctggcagtggcttgttgggaggcgattccttgcatgcccaagcccaattgcataggtcaagatgagacccacttctcaggcttcagttccctgcaaatgaagtagaacttaggacccccatacttcccagtgatcctagcaggcgtcactggggtctccactcttgccagttaacccagttgaccacattagggactgtcatgcctccccagtgacaatctcataaaggaggaagagactgtagacagataaaagcagcagtagatgaagcagatatgctcttgaagatgcatgttcatgagaacagacccaaatagactcagatggtctcactcccattgaggctatatagaacgcatgacaaagatatacatgattttcaaggccacttttcaagtattaaataaatgtatcacatagtgattaaaaagtgcaatctctaatcctgagtttctgctgcccaaaagatgtctaatagtataatgagaacatttcctccagggctcaaagtatgctccctatcaggtacaggccagacatgaggccccagtggtctggagcaggcaggaggtgaaaaacaggacacactgtggagcagagaatacaaatgggaggccgaggcgggcggatcacaagctcaggagttcaggaccagcctggccactatggtgaaacctggtctctactaaagatacaaaaattagctgggcatggtggcacacttctgtagtcccagctacttgggaggctgaggcaggagaatcgcttgaacccaggaggcagaggttgcagtgagccgagatcatgccactgcactccagcctgggcaacagagtgagactccgtttcaaaaaaaaaaaaaaaaagaatatgtacggaggacacgagtgatctcagaagagtctgctgaacactggacttgagcctggcacggaatgcccagtcccgctctccacccaaaggagctggacctcagatcaccccaaaccactcctggctcatggtggagcacacatgttccaaaacttaggaaagtgaggactgtatttggggcagagaaagaaaaaatggatcaggacaacatatgaaagatctaaagaaaataagtaaaggcttaattattgttttgaaaataatttgtcaaagtgtttgaggtttttttacagcaagctccataattcggtaactcaaaattatgttcctaatataaaaatgtcatttggaggtttaattatttgtaatttttatactttttagttttgtaaatttaagagttctattctgggttgatgaaagtagaaaatgtaaggtgtgggaaaattacaaaaacagaggagattctgaaataatccttaagaaaccacctaaattcctaggagaatttcacagtttcaaaggctatgaaatgggtgggctcaggcctagatctccaaggtacaaggagagccaggtgacacctgtgttccaggggaagagaatagaaaatggactgaggactgtctctgacagggtgagcagctggagtgggaaggagcgatttgggggacccaggagggtggagggactgggggctgggagctgagggcggggctgtgcttcagcctcctcctcccactgcccctcccccacccccaggagccctttgtgaggaggaggccccagctgtgtgatacaagcctgggccccagtccctagtcccaaaggggatgcccagagctcagttgcttgaaggcgatgggaaatctcgtcatccctctagggaagggcagggcaggcagggttgagagtgggcagaggattccacccccagctcccagaccatctgtggagtgcacaggagacgacattgcacttcagatggagaaaatgctctttcctctgaagagccctagtgccacatggctgagccctagctccactccctggatgatggatttcatcctcaccagtgtgtgtggcctagtgctcctcttcctattgctcctctacgtccacagtgacccaccctcacccccgcccgggaggaagaggagcagcagggaggtaaggagtcctcagcccagccccacagagaaagattctctcttcttttcctcccctcatttccacttttcctaagcaatgtgagacccttctgtgatgggaaatctcgtcatccctctagggaagggcaaggcaggcaggggtgagagtgggcagaggattccatcccgagctcatctgtggggtgcacaggaggcgtcagggcaaaaaccaacactggactcagtggcaaggaccgggtcaggagaggggtgaggtctctgtgggaggagaggccccagccctggctcatcacccccttcctggggcaggtgcctgggggcccagcctcctctgtatgatctgggtgtgatctgggagctgtgctgagctcctgagagcctcccagtagagcctggattcgcctgtggctgcaccccggccacatgtgctttttcctccttcaccacagccccatggtaccctggcctcctctccattctcatccaaagcagaatcctactggcagctcagaggcgcctgtgggcctgagcctaggtgttccttgagcggaggagcagggactggggacagccaggttggagtcacacagacaacccttccttgcatttccctaagaaggaaaacagaaaacatttcattcacggtaaacatgagtaaaaagcacacacagagc

SEQ ID NO: 12158 - DNA, 6000 bp, Homo sapiens
gagaatcgctggaacctgggaggcggaggttgcagtgagcagagatcacacctctgcactccagcctgggcgacagagtgagactccgtctcaaaaaaaaaaaaaaaaaaaagagggaaaggggaaagtcggggaaaagggatggggagccctcagaccatgatgcaggtctgatacttgagaaaggagaatgggaagtgacgagggaaagtctcagccaggcagatgggggattcccaagcacgggttgtgtcctatatcatgcagatgtggccaggttctggtaccacaccatgctcggtcactgactgggagtagccagaggataccacaaaggatccaaaggcatagccactgggagctggcagtcaaccgtgtttcccctaaaagtttctcccaaagggtaatctgagcaatgcacctcatttccaacacaattcctttcaaccaacttttttaaattaaaattttttcttaattttgaattttttaggcatggtatcttgctttattgcccaggctggagtgtagaggctattcacagacaccatcgtggtgcactgcagcttcaaattcctgggctccagtgatctttctgcctcagcctcctgagtagctgggactataggtgtgtgccacggtaccaggctcagccagcatttactaaataccttctgtgtgctaggcattatgtgtgttgaatgatagaaacatggcctcatggctcccaggaaatcccacatgactgcagaacagtggggtctatgagttttcatcgtcaattcaaaggaagatgtcacagtttggaggatgccactgacagcttcatggcagagcttggctacaagttgggcagaaatgatgggtggggtctaggtcgttgtaggaaaaaggaggaaacatattggaaggagagagcagggggacaggaggaccacagactgacagagtggattaggcaggagataaggaaggcttagaagtaaaataatctcgaaagagtacaatatttactttaaatgtcttttttttcctaataaggtaacgattgttttaaagaattctgatgttgtagaaatatagaatgtaaactccttgagatcaatggctttggatattgtttacctcaaatccccagaatctagcacactgactcccagatggtaggtgatcaataaatatttgttgaaaaaaaaacaaataaatggaacaaaagtgaaaggaccacagaatctcacccatcagaagtaaatataatatagttaatggtttggtaaatattcctttagattttttcccctttcatatgttaatatatattattttacaaaaataggatcatactattcatatagctccacgacttgcttctcttttctttacaatgcatcttgaacacatgtgtatgttaaatgcctacaactaactcatgcttgcaaatagcactgtggtatattatggtattgtacggatgtgcaatattttattttataatctcttgatggaaatttggattgtttccaactttttgcttttatatacaatactgccataagcttccttgtatgcatatcttttgagcacttacgagtctatgtttgttggatagattcctagatgtggaattgcaaaatcaaaaagatgttaatattaacatttctaataaatgttgcctaattgctttccaaaaggttatactagtttgcattcctaccaacagtggatgagagtgttttttcacatccttgccaacactggaattaatagccattttcatttttgccagtctgataggtgaaaaaatatttcagggtaggtttattttgtatgtattttagagagatcgagcatattttcatacttttataaactatttatatccttttgggtgggaactgtctatttaaatcctttgaccatttttatttctgtttgttctctttatttccctattgattcacatactgggtaaatgtcatctgcaaatatctctttctgacttgccttttgtttctggactttgtattatactggaagccttacagaattcaaaatttttatatagtcacatttagaaatattttccatatggtctctggtttttctcattcaatacttttataattaaattccttcccttcccttccttccttccttcctttttttgcttatttactgtggcatcttcagatcatttggaatttattttgatgtaaagtgtgatgttgggacttgatttgaattttttccaaatggttatcaagttgtcccaattattacttgaattaggcacatgttccccactaatatttgaaataccacatctaccatagatcatattaaactctaaaaggaatgtaataactcctatgaagagagctaatatgacaaattaaaagcatcttctagagatatctacttgttggtgagcagccgatgacataacatggtactgttagtgaacagataagccccctaaaaatagcaataaacccaagggctttacctctgttgaaaagatgctagatttccaacaagctcccaggtggtaccaatgcttctggtctaaatatcatacttcactcagcaaggtgctggacatcttccctttgccttactgacactctctccactctgttttgtgccccgggaggctgactgtgcagactgtatcactcaatcttctcaacaaccctgttcaggtggtgctatcattagatcaccatttaatagatgagcaaattgagccgagataagtaaagcaacttgcctgaggtcacactgcaattcgtgatggggctgggttgagctcaggcaagtgggctccaaggttgtgttccgacctcctaagctaagctgcctttgcatctcattgcagcctgcccaacagtgagtggtgtggtgggaaatcctggactgtgagtcaggagacccagatacaaatcctccctctaccgcttgcatgttgtgtaaccttgggcaagttgcttcacttcttgagcctacatattctcatctgtcaaccttgcaaggttgtcatagggtgaaatgagaaagtacatgaaaaagaaagtccagcagtttacagcacacagtgtgtgctcagtaaacaatagcttttatctgttacctggggcttaagtccatgtcttgtaaggcctaattgcatttctcttttctctgtatctgaacctctattgagaagcattccaatttggcaagcggatccaagacattatgaattgtaatccttgtctgttttctaatctgaccgcagatcttaaatgtgttgggtgtctgaacagaggccaaagggctcaggtccagacctacctaacacaaccgccttctggcattaaccagcagcctccattctgcgtgggaagcaggcggggccctgagcactgtgggaagagccacttccctctagtctaatattagcagcaggttgtcctgagtgggagctgctttgcatggttcatcccaaaacccacccccctcctgcaacctgagggagatttcctctggggataccagtagccaaaggctgtatgaagacaacagcaagtcagattctacctctacctgagccgccaagttcaaggtcctctccccaccctgtgtctcagaccccgcatttatcaatgagataattggaccagatttgtgctttttaaactttctgggcttctggtctccttgagaatatttgataaaaagctttggaccaacttcccatggtaaaacaaacaacaacaaatagagcttacactctatccttctacaggggatacagaatgattcttttccctgagctagacaccagcagagggagttccagattaatttaagatatgatttgaaatctctgctatcacttttacattcagatatctgtgtagacattacttcatcagagaagctttccaaaacccccaaactagatcaagttctactattctaagcccttttagcgccctgtaattcttcttcaaaatacttaacacaattctaattatctttttaatatttgtctactccattagacttacttcgtccctggcagctcaaggctcccacagcagtgatctcatgaacagggcggcagcttcatggccttttttggttgttgtttaatagaaacaggatctcgctttgtcatccaggctgcagcgcagtggcgcatagttcacggtaacctccaattcctgggctcacacaatcctcctgcttcagcatcctgagtagctggcactataggcacgtgccaccatgcatggctaattctgaaatttttctgtagagatgggagtcttgctatgttgaccagtctcgttttaagctcctggcttcaagtgatcctcctatctcggcctgggattacaggtgtgaactatcatgtacagccttcatggccttttgctcctagcctcagaggtcacagagctatcacgaggcgagccaggcgagggtttgctattcaaggactccaaagagtatggcagaggctgggcctgcagaagtcagtggggcagcgtggtgtctgttgatctcatcgcacctccatctcctcatctgtaaaagggagctcgtaatcctagttgatggttgttttattggactgtgtaaagatcagatgagataatggcagtagaattcataacaccctgcagggtgtattcagccaacacttagcgcctacaatatgccaggcgctaagggttttaccaccactatctctttaataatgcaccatagcccaagaaggaagatgcaagtctcagccagcccacttgaagaccctgccgaaatgagccaccccgggggctgcgcttgggctggcgcggggctggacggaaagggggcggcgcgcaggtggggcgggccgggggcggggcggcacggcggttccgggatccgggtcctggcctccaccgccgccttggggcgcgcagatcgctggctgcagttggcgggcgcatgtgggggcgcacggcgcggcggcgctgcccgcgggaactgcggcgcggccgggaggcgctgttggtgctcctggcgctactggcgttggccgggctgggctcggtgctgcgggcgcagcgtggggccggggccggggctgccgagccgggacccccgcgcaccccgcgccccgggcggcgcgagccggtcatgccgcggccgccggtgccggcgaacgcgctgggcgcgcggggcgaggcggtgcggctgcagctgcagggcgaggagctgcggctgcaggaggagagcgtgcggctgcaccagattaacatctacctcagcgaccgcatctcactgcaccgccgcctgcccgagcgctggaacccgctgtgagtgcacagctctggggaggaagcccgccctcagagccccgggcctcagtttctccatcagagcagtggcagggcggggagctggggtctccaggatggcgcgtcttattgagtctttctccgaagacgatagtgtaagagctcacatgggggcggggaggcaagaaagtaaaaaagacgaaagtagaaaaaaaattaccagaaattggcaagtctgttagtgatctcttagctcccttctccttgagaagttatcatctccctgaaaaggtgagggtcagggctaagcagaagggtttaaggcgaggaccccccagcacccaaaggacaaccccgctctgcccgcctcgcagtgcctccgcgaaactgacaactcctccgggcggtgaccggctccattcattctctgtgtgtgccagggcctaagggacaaacaagatgcgagggagcgccccacaggtgaagcgaaagatggctgtaaggccccctcagcgctagaaagcctccttgtgctctccctgggcattggatttctgagctttgggtggaggaaggcgggaaggggcacggggtgggaagggctccttctggccgtgatccaccccagctcactcctgtgggtggtgctggactggagccagcgtgg

SEQ ID NO: 12159 - DNA, 6000 bp, Homo sapiens
agacacaatgtgtgtgtggcgattcctcaaggatctagaattagaaataccatttgacccagcaatcccattatagggtatatacccaaaggattataaatcattctactataaagacacatgcacctgtatgtttattgtggcactgctcacaatagcaaagacttggaaccaacccaaatgcccaccaatgatagattggataaagaaaatgtggcacatatacaccatggaatactatgcagccataaaaaaggatgagttcatgtcctttgcagggacatggatgacactgaaaaccatcattctcagcaactaacacaagaacagaaaaccaaacatcatatgttctcactcataaatgggacctgaacaatgagaacacagggacacagggaggggaacatcacacacaggggcctgtcgggggtggggagctaggggagggatagcattaggagaaatacctaatgtagatgatgggttgatggatgcagcaaaccaccatagcacgtgtatacctatgtaacaaacctgcatgttctgcccatgtactccagaacttaaagtataatttaaaaagaaagaaagaaagaaagaaatgtgacctccaatgttggaggtgggcctagcagaaggtgtatgagtcatgggggtggaaaaaaaagtgttcgtaaacatgtacacacttattttctcttgatatccttgcctctttgcaatgtgattttgcagttcctttttatcaaaaaaaatggagtctttttccccaccctttgaatttgggctcagccccagttcatgcccaaaccaatgggatatggtagaagtgatgttgtgccagtggatgtttttttgttttgttttgtttttgagacagggtttcactcttgtcacccaggctggagtgcagtggtgtaatcatggctcactgcagcgttgactttctgggctcaagcgatcctccaacctctcagcttcctgagtagctgagactacaggtgtgaaccactatgcctggctaatttttgtattttttgtagataagtggttttgccatgttaaccaggctggcctcaaactcctgggctcaagccatcgccccatcttggcctcccaaagcgctgggattacaggcatgggccaccatgcctggccggtgccagttctaaacctagactcaaggctcttgcacgctttcattcattatcttggataatgaatgtcatgttatcaagcctaggctagcctgctggaggatgaaaatccacatggaggagctgatctagctcattaccctcttccacccccttccacctgacaaccgactcataagtgagctcagtggaaatcagcataaattggcctaaacctgaaaaactgtcctacagtctcatgaaagatgatatatggttattattctaagccactaaattttgaggtggtttgtttttcagttaggagcaccaagaattagcaatagctaataatggcagaagtcaataatgtcttgtaggttagaaaataagatagaaataaaatatgcaacaataaataggatggacaaatgagcagaatagaagcattctaaggtgaataaaaatagattaatttttctcatataataagaaataagcattatggagctggtgcagttattcaaagtgaataaaaaatagattaatttttctcatataataagaaataggcattatagagctggtgcaactgttcaggaaatttatcaaaaacctagactctctccattttttctctctacagtcctcagttttggctatcgcctttatgtttacaaaatggctgctgtacctccaggcattgcaactgtgttccagggagaaagagagaatatgatgagtctcttctttttttaactaggaagtatcttttgtacaggctccgccttgtggaaagtagatttctgtttacatgtcactggccagaactcttgtcacatggccatacctaggtacaaggagcctgggaaattgacatatatattttttctaggtgatctgctttcccaaagaaaaacaggactccattataaagcaaatgtaagaatgggtgtagtttagatgacaagcagtctctgctctctattttggagaaatcctcttacttaaggaactaatccaaaaggaaaagcaaacaatgtccttggcataaagattaagagacaacattacacagggtacaaggcactggagtgagactcctagtcctagctctgcagctgacttgctggggaactgatcctcagtttccttccctttaaattaagacattggagtaaataacatgtaagcattttaaacaacaagtaagtctgtaaagactgaagggaattaacatttatgacagattccttaatgtgcaatagctcatttagacctcacaacagtatctccctttaccctgggggatgctaaatctcaaagcagtcaaatagtgttcccagacccacatctagtgagtggcagccagaatttcaagtcgggtctgtaggcctccaaagccagaggcttctttctactgcccatccaacctttctcaaaaggcaaataaggtcatgcatttttatttactgaattttaagtaaagcagtgtcttttgaagcgggcccagtgccacttgcagcagaatcacctgggatgtctattacaaatgcagattcctgaaccttctccacatgaactgaagcagacttgctagggccgagggagacccaggaatctgtattattacaagctctccaggtaattggagagactttacaatttgggaaccatgattttaaactaataatttagtgttccattctagtgtagtttatttatggatctgtggctcatggaaatttcctcctagtatcaggaagatacaacttaaaaatagtctgtttttccttcctattgtatccactgaattccacggaaaatgttaaggaactggaggtgtgattaacactgattaatctaggctccgtacgtcaaaggcacagactgacatgaacatacatgctgattagaatcatacagagctggaaggggatgggcaaagaaatggcattagctaaatatttactatgttccagacactgtaccagacacattacgtcatttaaggggcccaagacaagtgattcaatcccttttatttataaacggggtaggtactattattatttacattttagagatgaagaagctaatggccagagaaaaacagtcactttctgagatcattcattcattcatacaataaaaatctcattagctcttatcttatgaaagacattgcaaatagagcagcaaaaaggcagtctagggacctcaggtggcacaaagtccaccaaatctccattgaagaaactggaactgagagggcaaattgggactggagcctgccagaagccatctctctggaatccctcagcctgagcaagaggggagtttgctgctgaggctgctggagctgcggtgtagagcaagttgcaggcctctgagcctgttggaggttcagaaaggttagctgacttgcttaagtaagtgtcctagacaggagggagaaagcgcgcgggtctcagatcccagctccaatatccacgccttttcccttttcatctcccggaaggaagccttcacaggtggggaaaatgctcacccagtgactctaaagtagtgcacaaattggcattaatcagaaccattctgattcctgctatcaaggtttatttaattctaagctcaaatgacacagaaaataaaatttcctccttaaaaggttctgcggaaaaatattctctgttctacgtaacagcctccttggctgtgtttgtgtctgaagaaaggactagtctgacaggaagaattacaaatctggagctcattttggcgtcgcagagggaaggtgggtggagcgtctcgcagtaaattaggaattcagaatgaaaacgtagagtttatttgggtttttagtgacacctcaggattattatacagcagtgtcagacacagctcaaagtaatgatgactgctccccctccgccccgcgggagctgggtgctaagaagggggaacccctcctttgaggggttggggtggggatcctccctttccaacctggatcgggaaggggtttgagaggagtgcggcttggatccccatcctggatctgtgctggagggaggcgggaggctatttgggggtgtgtttgggctcaggatctgggtctgacgctgggatctgaggactttctgggtttggaactgggtgggggagctgggtttggggtgaccgctgggagcaggaggaaataggagagtgagtcgcatgtgaagggcactgaggagggatcttcgggggaatgctgaagttgatgcgtggacttggagaggggaagttgaagtggatgcaggggcctggcgctgcagcggatctgggtggcatgtgctgggattgccaatgcggagctgtgaatggggtcagggtggggctgaggcagtaccagatcttccgcgcctagaggaggttagaagaaaagagcgtcgaacggccacagcctttttccgaaagagactcacacagacacacccatcgctctacccggccctccggggctagcggctgagcggtgctggggctggcagaccccgcccccacgcggcctctcggagccgggagccgatcgggccggggctggggtctggcggcccagcccccggggagcgtggggcgtggccagaaaccggcgctcgcggctgcggattggctgcctggcgggcccgcaggcggggctcccggctgggtcccgcttggcagctcgcggcggcggggaggcggggccggcgggagcccggcagccaatggacgcgcgtcctccgagcagttacaaagggccggagcgaggccgccgcggcggctagggaggtggggcgaggcgaggtttgctggggtgaggcagcggcgcggccgggccgggccgggccacaggcggtggcggcgggaccatggaggcggcggtcgctgctccgcgtccccggctgctcctcctcgtgctggcggcggcggcggcggcggcggcggcgctgctcccgggggcgacgggtgagcggcggcgcggcgggcgggcgactgcggggcgcgcgggccggacccggcctctggctcgctcctgctctttctcaaacatggcgcggggccgggggcgcaggtggcggcgccggggcccgggccgggctctcgtggcgccgcgcggctcggcggctgccgggcgaaccgcaagcggggagcggaggcggggcaggggcgtgtgtccgggcgcgggcggacgtgtccggctgcccgaggccgccccgctcgggactccccggggaggtggagtcgggcggagtcgtccgaggtccggggctgccctctggggtgtgagtgggcgagggccaggggcggagagtgcgaggccggcggggactggcagagccgtggctgcccgccgccgccccctgggcacggcgtgaccttgttctggggacccccgccccaagagggtccgtgccagaggctgccgaacccggggcggggtttgaggttggggtggaaggcggctcccgggcggggtgtgagctccgagcctctagggcttcgtccagtgggagtcgggggcgacgtgtggtgagacccctgggtccgcaggccgccctgactcccgcccggctcgacccgagccgaccctgctggaaggggctgctcctccagccaggggggctttgtgtgagaagaaggaagcgcggagatgcgcggaatgtttcttctttcgtgcgtctggggagtgttgaagtgagtccagtaaccagacggctacggattgttttcatagtggaaacttgaacgtttgctcattctgcgggttttggaaattttgggaacgactgtgaattgattaaacgctttttatttcctcgaaggaacatcactcacg

SEQ ID NO: 12160 - DNA, 6000 bp, Homo sapiens
catctctgtgtgggggctctgaccccacatttcctttctgtacggccttagcagaggttctccatgaggaccccacccctgcagcaaacttttgcctgggcatccaggcatttccatacatcctctgaaatctaggtggaggttcccaaaccccaattctttacttctgtgcacttgcaggctcaaaaccacgtggaagctgccaaggcttggggcttgcaccctctgaaaccacagcccaagctccacattggcccctttcagccacagctggagcagctgagacacagggcaccaagttcctaggctgtacacgcacgaggacccttggtccagcccatgaaaccatattttcctccaaggcctccaggcctgtgatgggaagagctgctgtgaagacctctcacatgccctggaaacattttccccattgtcttggcgattaacatttggctcctcattacttatgcaaatttctgcagacagcttgactttctcctctgaaaatgggattttcttttctgtcacattgtcaggctacaaattttccaaactattatgctctgcttccctgataaaactgaatacctttaacagcacccaagacacctcttgaatactttgctgtttagaaatttcttccaccagataccctaaatcatctctctcaagttcaaagctccacaaatctccagggcaggggcaaaatgctggcagtctctgctaaaatataacgagagtcacttttgctccagttcccaacaagttcctcatctctatctgagaccacctcagcctggaccttattgttaatatcacgatcagcatttttgtcaaagtcattcaacaagtctctaggaggctccaaactttcccacactttcctgtcttcttccgagccctccaaactgttccaacctctgcctgataaccagttccaaagttgcttccacatttttgggtaccttttcagcaacgccccactctactggtaccaatttactgtattagtccattttcatgctgctgataaagacatacccaagactgggaagaaatacagaagaactgtatttggacttacagttccacatggctggggaggcctcagagtcatggcgggaggtgaaaggcacttcttacatggcagcagcaagagaaaatgaggaagatgcaaaagtgtggaaacccctgataaaaccatcagatctcttgagacttatttactaccatgagaacagtatgggggaaatcgcccccatgattcaaattatctcccatgattcaaattatatcccaccaggtccttcccacaacatgtaggaattatggaagtacaattcaagatgagatttgggtggggacacagagccaaaccatatcagtgggagaagcttcctaggtgagatgacttttgagtccagcagaataaagagtaatttctttactctggggtggggggaaagagatgggggaaagcaggcaaaaaatggcattctaagaagaaagagtaatagttgcaaaatcaatttggattttttaaaatgttttattatagaaatcataaagggggcctggtgtggtggcacacacctgtaatcctagcactttgggaggctgaggtaggaggatcacttgagctcaggaattggagactagactgggcaacacagggagtcccaatttctagaaaaataaaattagcccagcatagtggcatacacctgtggttccagcttcttgggaagctgaggcaggaggaggtcaaggctgcagtgaaccatgatcacccccattgcactctagtctgggtgacaaagcaagattctatctcaaaacaaaacacgaaggaaggaaggaagggagggaaggaaataagaaaggaaaggaaaaggaaggaaggaaataagaaaggaaaggaaaaaagggaaggaaggaaggaaataagaaaggaaaggaaaagaaagggaaggaagggaaggaaggaaggaaaaaagaaagaaaagaaagaaaaacaagaaagaaagaaaaagaaagagaaaaatcataatgggattttgataaatttttaagttagtttggtggaaatggacaactttacaatattgactgtattacttttccacatagtcaagtctttacttgtatcttatatggaaatatggaagtcaggttaaagtataaatactgttacgtaagatttgagtcttactcctgttatgtagtatatgagacttggaccttggtcaagttactctctaagcctcaatttcctagtttgtatgaagggggtgattgtaatacctacttcatgggttgtcatcagtattaaataacatattgcatgtaaagcgcctaaccaagtgctttacacatcacatgcaatcaaataaaaagctacttcttcccccctccctttttacatggctttatttaggtataattcacatacaataagcacttatacataaacatatttacagtgtacaatttggtaagttttgacatatatatacgtccatgcagctattaccacaatcaagataatgaacatttctatcactcccaaagtttccttatgcccctttgtgatccttccttccacccctatccctcatctagctattattctcaattcttcaaataggtcttgtaattccttataaacacaaacttgatttttgtcatttttgaatgtaatcttcctcccagtacatttcaatttttttttttttttttttttttgagacagggtgtcagtcttttctgcaggctggagtgcaggctggtgggatcatagttcattccagcctcaaactcctgggctcaactgatcctcctgtttcagcctcctgagtagctgggattataggtacatgccaccatacccagctacgttttttttgttttttttagaaatggggtctcactattttgcccaggttggtcttgaatttctagcctcaagcaatcctccctcattggcctcccaaagtgctgagattataggcatgagccatcacgcccagtcttcttctcattacattttaaaattgatgattgttgtttaggagaggtattttatagccatcttattgaattagtttcagtttattccatggattttccaagaaagcaatcaatcataacaccctaagaattttttttaattttctttccaacatatacacttaatgttttgtttggacttgctgggttcagttaggacttcaggaaaatgtcggccagtagtagcaggcctgcccctaacaacttgatgacctagagtacacaaaagaggtccacacaccatatgtttgaatatttaaagattataaatcaagctaaccaacagttagattaaaaggttttggtcgggcatggtggctcacacctgtaatcccagtactttgggaggccgaggcgggcggatcacgaggtcaggagatcaagaccatcctggctaacatggtgaaactctgtctctattaaaaatacaaaaaattagccgggcatgttggcacacgcctgtagtcccagctactcaggaggctgacacaggataatcgcttgaatctgggaggtggaggttgcagtgagctgagatcatgccactgcactccagcctgggcgaaagagcaagactctgtctaaaaaaaaaaaaaaaaaaaaaatgtttatcctactactttgacacacctaacttacagcaaacatacatataacaacttagaagtccaggtccaaatttagaatctttgagtaccacacctcctgattttgtacctgaggaagctttttcagaacttaacacaaatgatcttttatttcaaaagatcttatttcactgatccttgcataaaaaacattttctcacagtattgcctaatactttaatttttctccttagaatcaaaatttgataaatacattctggagctcattgtaaaacaaatatcagtatacattatgtccccaaagaaaatccaaattgcttggtagatttggtgctttgttttagaaattgtctttcaaggctttttaaaggatctacaggcccctaatcttccctgtttacctcctactctactggaagaccctaagaactcagtttccttaactgtggtttgaacatcctgatcacttctgagacaatgccattagtgaatacattctaagcacgtcatctgaatattcacagacatctttttaaaagggctggatctggaagttaggccatgaagagaggaggacctgtgacttggacaaggcttcaaagccggccacctgcttgttcatgtggttgcagctggtctaactggaataacttgggaaggaaattaggacacccagttggagttccagctctgccataagctggctgaactggagtgagtcacttaaaactctttgttaaaccccagagtcataatctataaaatcgggataaagacgtttgccttaagccctccaccagtttttggaggaaaccacaatttgctgagctttaatttttacacctgttgcaattaagatggcactcctgccctgtccacttcacagggcttttggggacgggatggggaggcaccacctttctgagcttcagtttcaaaacagagctaagaatacatgcccaacccgcaaataaaattctaggaagaacagaggaaaacggacaggaaaactgcgaaatgcagtcggccatacaagcatgaattgtcttaaacacaacaagcagacctaaagagcgtttgtgcgtctctctcctcttggctcgagtcacaaccccataacgtaaatcaatatcacttttgaaaaaggctttcgctgttctcagcagcgtccgcatttgtactcacctgtgcgcccccagcgcccggcctgggggccctgcggggcgggggcgggggcgggggcggggcccaaccctgcccacccctcgtgatgccccgccccgtcgctcctgcgcctgcgccgtgcccaccgaccggcctcgagcgccccggcgggaggtaaggggctctctggaggccgcctttgggggcgtcgggccctcacaggcttggtgggcctggcgcccgtgtggcgcgcgcaagaggcgctgggcggcaagtagggcattggatccgaagtgcgagcgccatggtggctcctcctgtttttcagaagtggcggagcctcgcttggtttcgtttttggaagctttattggaagctggtatagggaggccgcagacgatgcgagcaggacggcctcccggggtcgcggggtggaaaagtttccggcgcgcgtcctgtctctggcgcgctgtaggccccgggtcgccagggtcgctggcgtctgggtcccgggacagacccgcgcatccgttcgctggtgggggcgtttggtgtgtgtggcccaggtgtgctgtgggtgacactgcgaggaatgacgcgacgctcgatggtagtgaggctcggaggactgggagcgagaggccggaagcccctgctcgccaaacccagaggtggttggcagaaggtcccacaccttggctccctccttttagctaaccgaggttcagagaggagactttactttgacttttctctccaaattcggtatctcttccataagtcagaaacattaagcggcgggccggaagaaatcgggcgccactagtatcctgaaaagtgggagctctgggccgatggaaggtgttcgtcacttttgggggctgggtttcctgagaaatggggtctttcacttattaataacctcctaagtaacttactgggaaacatgagtattatggtacccatctcatattagttgtaagcactacatgataaagtttgtaaagcacctggcacagtcctggcacccctctctccaagtattaatgcagtgaatacgatggcagttctttgacttctaaatgtttttacctgtcttacgtgaaacatcctcttatactaaaaaacttttttattttgaaataattttaaaattaca

SEQ ID NO: 12161 - DNA, 6000 bp, Homo sapiens
ggctcactgcaacctctgcctctcgggtacaagcgattctcctgcctcagcctcccgagtagctgggattacaggcgcctgccaccatgcctggctaattttttgtaattttagtagagatggggtttcaccacgttggccaggctggtctcgaactcctgacctgaagtgatccgcccacctcggcctcccaaagtgctgggattacaggcgtgagccaccgtgcctggccgaccttgtttttttaggttcttactaaactggctggcattcagatgctcttactctcaggggagtgttccctctgcctggagcactccctcttcacctggttaacttctactcctccttctgatcttagcacaagcatcactcctttagggaaacctctctgaccttctctttcatagcatttgttaacaatattgcaattttaattttatttgtataactgtttgattaatatttgactgtaaacttcctaaggacagggaccaggtctgctgtacttaccattgtatattcccaggcactaggagtagaccttcagcacaaatttgttgaatgaataaataacatcaattttacaaagacccccctatctagaaattggggtccagtttcacaaattggatcagagattaaccccaggctttgccagtgctgcaccataaatcattgctttcccctgtttctgggtcaagcactgtgactctctcctactggggccaatttgtcagtcccaaagtgtctcattactgtttatcaggacgtcattatgcagctggaccctccagcaggaggtctaggaaagccaggatattggcagggctgggagtatgggatgggatttgccatttacatctaccccaccctcactccatttatatttagtatttatcacactgagttgtagttgttaattttcaagtgtctccttctctcccacacagtgagggcaggatctcttgcccacagaggctactctggtgtgcagcaaatgctcataagggtttcttgaaggaatgcaatgttttccatgagtgaagcttaattgagaacagaaatcaactcataagagagggcactacctctggcatttttttttttttaaacctgagccaataaatccctttttgtttaccttaacttggattggggttttctgttacttggaactgaaaacattctggtagagcataactaatgatgttcaatataagatctctgatagatttttgttttaaaatattcacttcctatttactccctctcacttacctccataaggagaataaacttccctatcccttgtctttgagctcggctataggactgatcttagccagtgagattttagcagacatatacaagcagtgtgtaaaaagtgctagcacagttgggtgtgcccccttgtaccactgccatctccgtgacaagagttcttcctgggtcccatccccagaatgaatactagaataatgaaccagagctcaaccagcacataggagccaaacccagctgaacctgtatcttgaagcaaagccatccacccaagcctagcctagatcaaccagccaacccccagtcaacctctaaacctatgagaaatgaatgctccttgtggcatgctgctgagattttatggtggtttgttagggagcaatagctgactgatcaggttcagggttttccatacttgacagtgcatctgaattatctagacaactttaaaataaataagagatacttgggcatcacctagaatgtttggagtactgttcagaaatctacatcctgtaaaaattcactgggtggtatttaggtagtgagtcccacagccttttgctatctgatattttggggtcaccagtattaaggcatgtcatgggtgttacattaattcacttctaacaaccttttccctctctgagattatatgatcaaagtcagacaaattctgtttctgaagcagagttcttttcaagaaatctgtattgaatttgttttagctgatttggggaaagatgcagatgtaaattaatttgtgacttatggccccaggatttttttttttacttgctctgttgcccagtgcccaggtggtacagtggcatgatcatagctcacttgtaaccttgaactcctgggtgcaagtgatcctctcacctcagcctcctgaatatctaagactacaggtgcacaccaccacactggctaattaaatttttttttttttttttttgtagagacaaggtctcactatgttgttcagtctggtctcgaagtcctggcttcaagcaatcctcctgcctcggcctcagaaagtgctgagattacaaatgtgagccacccactccctccgattttttgctttttatttaatggttgacttctcttagtatttctgcctgggctatggtgagcagtgaaatgaaaattcaaggcagaatactggggcttggagagccaagacacaggtcaggaatgaagcatggaagaggtcaaccttagcagagaagctgctgaaggtctgagaaaaagccttagctgtggcttagcagttaggaacctgagatcccacaatattcagaaaagccagaagttcaattttagttctaacatttggcatgccactaacagtttagacgtgtgaggcgagtcttaataaaatgttaaaaaatgtgaatttatttgtataaaaagtataatgaaagtactatttaaaatagttttttttttctttgagacagagtcttgtgatcatgcctgggtgacgaagtgagaccctgttagaaaaaaaaaaagataaaaattcagatcacagagaaaaatataaagaacaggtaattataggtaattattactcataagctggtctttcagacataaccactgttaatatattgctgtatagtgttcttcacttttttctcctagggatgtgtacacattatatatattctagaaaaatagggttttcctattactcatcagtatcctgctttttccatgtcagtaaacgctaacctaattatcatcattgttaaagctgcataatactccattgtactaagaggtaccgtactttagtccccactgatggacatttaagttataaaggctgtgatgaacatcctaatgtatacatttttgtgtgcttatccagttatcctttagataaattccaataaatggaattgctaaagagtaaacatattttaaaggttttttgatacatagtcaaattgccctcctaaaatgtataaattagtagtgctcagtctgccaattcttttaactcttgttaatcatccaaagggaaaataattgtgtgtgcgtgtgtgtgtgtgatggagtttcgctcttgttgcccaagctggagtgaaatagtgcaatctctgctcactgcaacctctacctcccgggttcaagcgattctcctgcctcagcctcctaagtagctgggattataggcgttacaggtgcgcgccaccatgcctggctaattttttctatttttagtagaaacggggtttcaccatgttagccaggttggtttcgaactcctgccctcaggtgatccgcccacctcggcctctaaaagtgctgggattacaggtgtgagccactgcccctggccagagttttgtggttttaatcttttattactagtgggttcaaatctgttttcatgtatttattgtctgtactttttgtgaataagagtcaagcttcctatttttctattatgttaactttttcttcttgacatataactttatattaagtatattgtctcatatttgcactgaagacatttttcctaatgtggctttgcttgcggtggcttttcacacatttcttaattttatgaatcaaattgatcagtttttcaatgagacttaaaattccttctggggtgggatgcaatataatagaatgaaaaaggcagaggactttcacacaattcagtccatgatcttagtacctatgtctagttatcacctagcaggatgtggtaggaagagcactggactgggagtcagatcaccttgcctctctgggtccctacttcctcatctgtagaatggagataagaacgaaaactccctccgaggcctgtaaaaaaataattgaagagaatgcacataaagagctttcaccaggccttgtatattagaaaatcctctctgaatctcagcttttgttagggggagagggcaacacagacttttgtaaaactattttcactcacttgtatgtgagtctacgggaatgaggtggggatgaggaacctagaaatctaaccattcacccaacatctctgagaactgcatggctagagtcagaacttgggctcccatcctggtcctgcccatttcttggtatgcaaccttggacaagtcacctttacctcttccgtgactcagtttcttccacctaaaaactattatagatatatgacagaccacctgccctcattcccagccctgctgctgggcgaaggaaacgcttcaaaaacagctcacaaagggcggcaaacaagtctgctacggtgcagcctaccgccgaggggtggccccaaccccggcccccgcgcccctgccctgtcgcaggaacaatagctcccctggaggcggcgccggccgcggccgggggcggagctgtcggcgcgggagctgggggtgtgcgcggggcggggtcgcagccacccctcccgccggcggctccgtcacgcgcccctcaccgggcgggccggggtctttgtgacgcggtggcaacggccacggacacaaagggaaggcgaggaggcgagcaagaggctgggcctgcctccggcccgcgacccccgcccgccgcgcgcgcgcccgcccgctcccctcgccgcggtgtcccccacgccggctcgcaccctcgcgcgcacccttgcgcgcccgcgaccctcgcacgcgcccggacccgccgactccgtcccgagcgccgcgggcccgggcctggcggacgctgcgggtggggcggggatgctgacgggctgctccccggctcagcggcgcggctgctaggaggcaccgaggcagcggcggggctctgggcgcgcggctggatgcccccggcctgcggctccctgcgcttcccgccgtccaggggcaccagtcatgggcgccgcagccgctgaggcgccgctccggctgcctgccgcgcctccgctcgccttctgctgctacacgtcggtgcttctgctcttcgccttctctctgcccgggagccgcgcgtccaaccagcccccgggtggtggcggcggcagcggcggggactgtcccggcggcaaaggcaagagcatcaactgctcaggtaggaccggtcggagccggccctaggtcttcccacccctccgttgccgcctccctcgtggtccctgcggtcggccgggctgggaaagaccccgtcgtgggggtcccaggggtgggcccgagggtgagcgagggcggagggcagggcgcgagcgtgcggtgtggctttgggaccggcgctggggatgggagtggccgtgggtgcgtccgagtgtgtcgagtggctgggcgagggcggcccggcgtgtggggaggcggtggggccggggccggggccggcgaggctgagcggccggccggggctcccggtgtggtcgtgggtgtgctcgcgggagcgtgtgtttgtgttgtgaaggctgaggggagggagggcggccccaggcagggatctgtgtgtgtgtgtgcagagtgcggtgggtgggagacggcgagggggctgggcggggtgagggcaggggagtgaccatgtgctgatgtgctggggagattcttccttaaggcactgggggtctcgggggtgggggtcgtgtggataaagggaacgggttgtcttgaggacgcggtttggcgatgcagagtgactgtgtgtgtgcgcgcgcgcgcgcgtgtgtgttctttgggttctgagatgggatctgggggctta

SEQ ID NO: 12162 - DNA, 6000 bp, Homo sapiens
agtttatttttcacaatggtgctgttttctgacttctttctatcttcttgctccatggggactccctaaatgaatctatcatttggatcccatggagaaaaatagcatatacttgaaatcccatcaactttcccaaagagctaacaaccacaggagccaagaggaccacaggcaatgttctccttcttttgattctgtgcagctatcacatatgttttaaatgaccatttattttcaaaagatcccaggcaaaaaagaactaacacaaatataaacatttgaggggatcctggcattcctttcaaaattacttttgtccaagggaagcttcaggttgctgggaaatgtcacactcatagctcttgctcaacaagactgacttttactcacacaacgggccttggcaagtcatttcccttttggtatacagagctcttgttttccccacaaaggaattggctatgatcgtttgtgattctcaaaggactcatgttctaaaatagattctgaaatttttattaacaaaacatctattttgcatatctagcattctgtatccttttcgtataatgctttgcaatgaagcatctatcataaaaaccactaaaccgtacagatggtgtttatgcaacacaatttaatgtcccagcaagaactagtgatttgttacatacattatgcatcattgtgatgtatatatccagattttaaatgtttggagggcaaatagtcaccaatatcattgtggcactagactacgattttttttcttaataccaggccatggccaaacatctaatataaaataattatacaatatgtttattaaataaatagcatagtttgggttttaaatgcctgtgtttgtaatgggttcaaagattttaaaatactaaaatttagaaagttgaaagaagtgctggaagaggaaaaaagattttccctctgctccttggccaaccatcaggcagtcatttcatgtgccttcctgtttcacctagggttcttggtcccaagcaacagaaatagattctggctgataggagcagaaaaagaatgaaatgaaattgtattagatagctcacaggagagatggaacgtccaaagaaggaagcttgggcaatgggtacaaccaaaggtgaactaatagcctgaaggaattctctaacatgctcagtctccaaaattcttggcaggcacacatgcctgactgagccgagattgcctgccataccatggcttcagggggatctggggaacaagtgtctgatacctcccagcttctaccacaggatgtggctctgcctctcactatggcttttaatatgggaaatccccaaagatgggaaggagttcacaaattggccagccagaggaaaaaaaaatgtgtatatgaacaagtctgttacacttcctacctggccagaagcattttgaatttcctctcttctttggctttttgtcttacctgctttgataatccgcaacactgaataaacacaagctttttttattgtgggtctcagggcagttaaaaatcacttaggaagtacacactattggtcatgagtctttagtctattcctagtaaattcaattagtacaaaggttctaaacccatccctaactcccacatcaccctgtagaaatttaattctgtacaggtcttcaggagattctgatgcagatttctgattaggaaccatgttttagtctttctcatctttcacagtttctttacaaacgatttctatttttctgaagccccaaccctacgccatcagtcttaatcaatgactctttgttcaattgggaaaaccagtccatctgatgcaaattcacttaacctctctcctgagagttgaactcaaactttcttcttgtctttatccatttcttcctccttccctacttcgttattccttcttcccaaggctaactggctaatgtgatgctcatctgaatgtcctcttgactaattagagactttgactaatattcaccttcctttttgactgtatctttggcctaatttccctgttgtctaatttgctttgacccccaaacatccaagtcttgcctgacctaaaaaccctttccactagaccctgcttcccatgggctatgttcctgttctccaccttcatctttcacatctgaagagctgaaagaagcagtttgtactcatggttgcttctctgatctctcgctcatccccatttttgtttgttttattttcaacattcacttggtagcagtcattcctcacctcttgtaagtgcttccaagctcatcttctggacacaagtcactcatggcttactgacagccctccaatggtctcttcttcatctgcatcccccatgacctttcagaagcatatgaccctgttgaaaacctctttccttctttgtggcttttggtgcaaatccctttgaatttttccttctacttctcggatgatactttatcagtcttctttgctgggctctctcctcttcttgctctgttttctcatcctggctgttctcatttctttagctgtaaccgcaaagtagatgacacttggatgtgtgtccccaaccccgattcttctattcagagttcagatatttccaactgatcacttccaaagggtgcccaggcccttttccttctccatctccccattccatcactccttttaaaaatttattgcggttaaaaatacaaaacttaaaatttaccatttcaaccacttttaagcatatggtttgatgacagtaagtacattcacactgttgtgctcaatcataccttttaaatatctgtatagctgggagtagaaggaccatttctggttcaattgtttattcctggggcctgcttctatctccatatcattggccaagcctggtgcttaatggttaagagcatgggctctggtgagtgtgatctgagtttaaatcccagctctataactgtagctgagtctttcaacctctctggtctcattttcctcatcttagtattctctacaatcactctgctgaagcaataacagctttgtttatttgtgagcaaacccctttaaataacttgtcctgctggggcttgtgctggaaatgaagaaaaaaggatgcatttgaagaaaaggatgggcttagccagaaagtagaagtttctgatatattggagtgggatgtagaatctggcactggcttggatttattaaacaatcagctccacctacacttgttatgaaaaagatgggaaaacaatccatcagtaaacgattttggtgagtgcttccatctttggtcagaggagtaattgttcatcagtgacaggtgaacctctgtgaaaattgaaagggcaatttagttgaaatggaagcatttattcaggaaacaggtgatctgggaaaatttgatgtgcatttttttttttttttttgagacagagtttcactcttgttgcccaggctggagtgcaatgatgtgatctcggctcactgcaacctctgcctcccaggttccagtgattctcctgcctcggcttcccaagtagctgggattacaggtgcctgccaccacgcccggctaattttttgtatttttagtagagaaggggtttcaccatgttggccaggctggtctcgaactcctgaccttaggtgatccacccgccttggcctcccaaagtgctgggattacaggtgtgagccaccgcatctggcctgatgtgtatatcttttaacatgcctttaaatcctatggctctaaagaggccatattagttatttcagtgtttatttcatttgatgaagaaacgtttgcatatgaatgttgggaattctagcaggtcctgcctcaatgtgaagaggcatttttttttgcttttggcattgatctccttttggactgggcctgatccacttcttacatccagtccaggacctgtcacaaaagactcacattagtaccacatggtatcctgttttagtaaagaataggtgaaatattttagtgagtagatcctacttttcctttcagatgcaatgaacagaagaccctgaaaggatttcaatccagaatgtcacaggataataagagcagatgtctgtgatgccctttacaaagcacctttacatactgtctctcattcgtctctaatgacacctatgtgatcctccattttttcagatgaggaaactgaggttcagagtgattaagcgagttgcctgagatttcacagctaacacattgtgaaatctagtctagcacccaggactaaaaactctcggcttcttttaaggccacatatcgcctcaccagaagggtggcctctctggagatataccctaccctcggccgacttgatattgagaacttggtcatcttaagcatgtgggccacttgggcaaggcagcccttcccaaattgtaaatgtccccacgtggagctcaagcgtctggcttgagccagaaggtgccctgaacactcggtggccccagcccccacgtaacagcacgtgctcgggtcccacattcggtcagacgcccctctccactggcatctgcccggtggaggcgccactgcgctctgcctccgccccagcaagcgcgtgtccacgcgggcgcgccacgccagccgtgcgccccagcggctcgccgtgcgcccgcgccccaggtgcccactggctcgcgcgccctccgtctgcgccttggagacccgcggcggcgatcgctcggagccgccttggaccgcggcctcgggtccatcacactccaggggcggagcgaggcaccgagacgtcagggcggagaactagcgccgggctagcgcgccctcccggcggctgccggcgtcccacgtcctcggctggcgcggccggcggcggcggcgaccgggagatgcagtgagcggcggcgctggggcgcagccaggcggccgggagggcgggggccagaggctgagcccgggcgagcccgccgtgcgcacagctctgcccgccgcccctggagcggatccccagccgtccctgggcgttctcccgggttctagcaaagccccccggggtgcccatcagtttccttgggtgactacagcgtgtgttttttctttcctctttcccctgcctgtgtgcccttctccaggatggcagaggcggaattgcacaaggaaaggctgcaagccatagcagtaagtccactttcattttattttcttgctctattgtctggggtggaagggggcccccgagggtttcggggcaagcggcatgccagcacagtagccgcaggtcatatgttccaggggctaaaactctgtcagggctcagctaggctgccttttcttttctatgtctatagatggagacccccaagggcgcgctttggactgaggatttgaatgtggaagattggcttaaaaaaagatgcttgctgctgggctttggggaaggactaaacagaggcttggggtggggggacgactccaggaatattatgaccgaatgctcaggcatacgttggcttcatagcctggagaaccaagagaagggtgacctgaacggtggctgccatcctctctgcggaagctgtcctcctgttaagtggaaaaccaggagtcagcgactcagccagccacgcggtagaacctcctcccagaaaccgggaatgttagttttcccttctctgtttgatattgacaagggcactggcacaagccaccaccctggaggtctggggacttcatacaactgggtcctggttataatattccatgagagcctccttcttatggtgtggagtatctgaaaacctattttcagcctacaaaggagtagtcagttttggcaaagttcgtaggcactttcagaaaagtgtacccatgtgcatcttgggtttaaaaaagaactctctgagactgcctagatttgagcaatcttaacacagtgttgccaatgatccacagatgtggtatttttactggagccaccacagctggattatatatt

SEQ ID NO: 12163 - DNA, 6000 bp, Homo sapiens
gtgttttttttttttttttttttttggagacagtctctcactctgtcaccctgctggagtgcagtggcacgatcatggctaactgtagccttgacctcctgggtccaagcaatcctcccatctcagcctcccaagcagctgggatcacaagcatgtcaccacaccccgctcattttttaattttttgtagagatggggtctcaccatgttgcccaggctggtctcaaatttctgggctcaagtcatcctcccaccttggcttcccaaagtgttgggattacaggtgtgagccaccacatccagcccaggtttgttttttctattaaggagttggtagttttcttcaattttcttattgatttgcaaaaactcttcacatatgaggagtagtaactcattgtcatatatgttgcaaatatttcccccagtttgtttcttctctgaaattttcagtggtgcatctgatcccatgaggatccccctgggcttgggattactgctagcttttcagtgaggtcacccactgtttggtgggaaagccccagggacatagagctatttgtttagtgtgagcgagtctttttgtttctgttgttgtttgcttttcctgctttttctttttctttctttctttttttttttttttttttttttttgagatgaagtctccctctgtcgcccaggctgaagtgtagtggcctgatctcagctcactacaacttctgcctccagggttcaagtgattctcctgcctcagcctcccaagtagctgggattacaggcacctgtcaccacacccagctaatttttgtatttttagtagagacggggttgcaccatgttggccaggctggtctcaaactactgacctcaggtgatccacccgcttcggcctcccaaagtgttgggattacaggcgtgccaccacacccggccttccctctttttcttacttttttttttttttaaattttcagccaacttttattttctgtaggacatatttagcacttgtgaattactcccagctgatactttttggtctttcgccttgctaggaggaggaaatagtaaattcccttttatgatgcactgtcttgcccccaccttctggttttcagatcagttctctgagacacttctaagtctatttttcagcttctactgttctctaagtttgggggcatgtgtctactgctagaccattattatttgctggatttagttcattttgctcagtttggggagagagggagaagagcttctctcaacctgtatctaggctaacttcctccccagaaagctgttctttactttgtgtgtttttctagaaagaacattctacttcttgggtcccctggctcaggggtgtagtttaaagtgggccagcagcatgggagaggcaaagtgagtaaaaatgtacacttaggccacagtgaaagaaatcttcatctcctctccccctaaaaaaatttccatggaagattttgtgcccttgatggtatagggcctgtgggaacatgtaacatttacacgttcgagttatatttctctcacataattaatagccatttattttattcaaatatgctcctaaaatacatctaggagagtaaatatgcttcttttattataaaatattctcagctctaataatcattattatgttaacacacgtatgatgtgatgaaccacaagcaggcagtgggtgataaagctaaccttgcccattgccagtgtttcccaaactttcatgtttttaagaatcatctgggagctgttaacgcagtttccttggccctgccccacacattctgattcaataaaggtggagcccaggaatctgcctttcttttttctttctctttttttttgatgcagtctctctctgtcgcccaggctggagtgcagtggtgcaatctcggctcactgcaatctctgccgcccgtgttcaagcgattctcctgcctcagcctcctgagtagctgggattacaggcttctgccaccacgtctggctaatttttgtaggtttttagttgagatggggtttcaccatcttggccaggctggtcttgaactcctgacctcgtgatccacccacctcggactcccaaagtgctgggattacaggcatgagctaccacaccctgccggaatctgcctttttaacaagcactatctgtggtctttagtactggcttcgaaaaattctggggcaagatatctcaacctcagcattactgacatttagggctcaataattctttgttggtggggcgctgtcctgtagatgccagtagcaacccccctaatcgtgacaataagaaatgtctctagacattgccaaaatgtcccctggggagttcaatcaccctcaattgggaaccactggcctaggagaaaataaatgagaaaatgttaattaaaaacagtgtttacttttgcatgcagccattcatactcttgcatggatttcattgaacaaattaaacaactatttctgagcatctggtatgtaccaagccttttatattaaaaatgtttaatcatggctacctctttaataatttggaaggtggaagaaaatgttcttataaattaatatctattaagcatatatttttcctaaattaatattcctaatagttttctgaagaatattctagaactttaaaattaatattaacaaagcattgacgttgttttagtaaagaagcaattcagaataaagttggtatgattgctttactttttttttttttttttttttgagacggagtttcgctcttgttgcccaggctggagtgcaatggcacgatctcggctcactgcaacctctgcctcccacgttcaaacaattctcctgtctcaccctcctgagtagctgggattgaaggcatgcgccaccacgcttggctaattttgtatttttagtagagacgaggtttctctatgttggtcaggctggtctcaaactcccgacctcagatgatccgcccacctcggcctcccaaagtgctgggattacaggcgtgagccacttcacccggccttgctttactgtttctaataatgaaactaattttgtttgtaaattttacacttattctaatttaggaaaatatgagaagggagtgatgaagtacctgccatgatattgtttataacatctcacatctgatgtaattctaaaattcttccttagagagtctatggtccatataaataaataagtgatatccaagcacactcattttaatgtgagtttttcacatgatattaaaatgttaaaaatagatcagtatgtagggcatccaagcatttaattccttaaatcggagacatgaggagaaaaaaatgaaaaggaagaaagaaaagaaggaaaaggaaggaaggaagaaaaagttgagtcaaggctgaagctctggcatctctaaccactggtcagtaaattctattgaaattcaatagtataagagacaaacaggcaaaaaggatcgtgaaaccatttccaaataccaagataaaggaggctattgacattcaggaaccctgagaacagctgatgtcccattgtagacttcatcctcttccttgggtgaaagtgtgaatagcgctcaaggcagggaagaagtcttttctctgaaggtgctatttatggtgcccttggcctggatgggctttctgggtagttcccaagggtatcatttctttgtattggaaatcagggacctttgtgggttaggaaagtagaatcaggccatggctattgtctttccctgctgtgtttcacatgtaaaattgactcccagaagagcatcccagggccttgtcaaggagtggggaaaatagcagactgccctagggtggaaacctaactgagagtgcaagggcgacttgcaaagctggggagagagaattactgggaaaatcgtgcctagggcaaagctgaattcaagaaatctgacttttgtgatcttcctctgctgagaatgaatgcggccacctacagcagagtaagaccacagcttgcttttgaaagtgttgctctctaggtggggtgtttgtttgtgtgtgcctgtcctctctcaggatttctagacggttcattttcaaagggtcattaacattatttaaatattcatggtggaggaggggatgagagactgaaatttcagacatctcaagagtgagggatggctggccacccgcctaatacagccccagtctgcggatcagctgcctccttcccctccgctggctttgttagcacacgcgctctgacaccgggccaccggctgccactacacggagggcagcaggaaggctctggcgagccagtgagctggaagcatctctgtccacacctcagcctctgaaccccatcgggggagtcctcaaacacgcggagacaccattactgccacaaagacgcacttcgcaaccagttccgggagtcgctctgaccctgaggacagtcgtggtgctaggtaagggacgaggggctgtttccccgcctgagtgggaactcagcggctcctggcatttgagcgcacacaggcactcacacacttccacatacgctcatgcgcacatatgtgtacaccaacacacacgtccacatgcacacacagcgacacgccaccccgctccaaagccccgtgcgctaacaagtatccatatacccagacacagcgctcccctgagttaggaaacactcagctttgcccgccccatccatccctccgtctttccctctctccagtctctgcattcattcatttcttcgtttgtgcatcgattccgccgaagccactgagaggagaaggtgtgggtagatggggaggggaggggagggaggggcggtccgtgggcgctgggctactggaggggaagcgaggaggcggggaaggggcgggccccaggagcaggcgggcggggctccccgccctccagcgcgcccggaggctaccactccctgcagatgcgctggccccagcccggggctgccgctcgccttcccccggagtctcctggacccccggagtctcctggacccccggagcgggaggcagcggccgcgcggcgctggactggagcagaaccccaggactgcgcccccgggagcgggcgcccagaggtgggtgtccaagctggggaggggaggggctggagtgtcctcgagtgtgaggaaggggtggccgaggaaggggttgccgaggaagggctggaaatctgggagtcctcggaagcaccgcgggcttttaaagggctttttgtggtccttgtcgagcggagcgtgtgctgggagagggcccgggtggaggggctgtggccatgtggatttgaattcctaggtttgtgggagggccaagcctttggctgctttgttcaatgcttatcatttatatatgctttaaaaactaaacgcaggactccgcttctccctgtatacacacagagctgggctgtgtgtccttttcaggaaaagcagtgaaatcaaatgtggtcgtggccgcatctcctgccccgggagcaccgggaggtgcagccgttccttctagctcgcgaggaaggcgcgggtcctgccttttgggtggcagagccgggggcattttcgcaagtcctgaacttttcagagagactgaagtcagggagggccgggccccggccccggtcccggccccagccagagtctttcgggatagggtccagggagctgaactcaggagatgatgcaggaggagccagcagcctcttctgccctgggagggagaacgcggtccgggtccgagctgagccagaagtttggcctgaggctgggacctcagcagttagaatgtggtatcttatccgagataaagccggagtttgcgtctctgtgggcccttcttggggacactctggggtatgggaagagcagaccgtgggggagagcactgggcaagccgtacctgtaatgtccgtggaggcgacgcgcctgcaagaaccagagcaa

SEQ ID NO: 12164 - DNA, 6000 bp, Homo sapiens
ttgtgtgaacatcatagagtatacttacagaaaccttgatggtatagcccactgcacacctaggctgtatggatagcctattgcccgtaggctacaaacctgtcagcatgttactacactgaatactgtaggcaattgtagcacaatggtacgtatttgtgtatctaaacatagaaaacatacagtaaaaatacagtataaaagataaaaatggtacacctgcattgggcacttaccatgaacgaagatttcagcactgaagtttgctctgggtaagtcagtgagtgagtgatgtgtgaatgtgaaggcctaggacattactgtacactgctgtaaactttataaatactgtacacttagactacgctaaatttatttttaaaatatttttctttctttaataataaattaaccttagcttaccacaactattttattttataaacttttaaaatttgtaatctttttgactcttttgtaataatactctgtttgaaacacaaatatattgtacagttatacaaaaatagtttttcttcatatccttaagctcttttctatcttaaaattttatttttattttttactttctaaactttttttgttaaacactaagacaaaaacacacaatagccttggcctacacagggtcaggatcaaaacatcactgcctttcaacagcttgtcctactggaaggtcctcaggggcaataacacacatggagctgccatctcctatggtaacaatgtattcttctagaatacctgcctgaggctgttttacaatcaattttttatttatttttattttttatgtttttaaataagtacagggtatacacagtaaaataataataaaaatatagtacattaaaaaaaccagcaacatggtcatttattatcattatcaactattatgtactctacataattgtatgtgcttttttattcaaaaagaaaatcattaagaacacagcaatattaatatttattcttttttttagaagaacctgatttatttatttaatttttttattatactttaagttctgggatacatgtgcaaaacgtgtaggtttgttacacaggtatacatgtgccatggtggtttgctgtatccatcaacccatcatctacattaggcatttctcctaatgctatccctcccctagccccccaccccttgacaggccccagtatgtgattctcccctccctgtgtccatgtgttctcattgttagctcccacttatgagtgagaacatgtggtgtttggttttctgttcctgtattagtttgctgagaatgatggtttccagcttcatccatgtccctgcaaaggatataaactcattgttttttatggctgcatagtattccgtagtgtatatgtgccacattttctttatctagtctatcattgattggcatttgggttggttccaagtctttgccattgtgaatagtgctgaaataaacatatatgtgcatgtgtctttatagtagaatgatttatagtcctttgggtatatacccagtaatgagattgctgggtcaaatggtatttctggttctaatccttgaagaattgccacactgtctcccacaatggttgaactaatttacactcccacaaacagtgtaaaagcattcctatttttccacattctctccagcatcggttgcttcctgactttttaatgattgccactctaacaggcatgagatggtatctcattgtggttttgatttgcatttctctaatgaccaataatgatgagctttatttcatatgtttgttggctgcataaatgtcttattttgagaagtgtctgttcatatccttcgcccactttttgatggggttgtttgtttttttcttgtaaatttgtttaagttctttgtagattctggatattagccctttgtcagatggatagattgcaaaaattttctcccactctgtaggttgcctgctcactctaatgatagttccttttgctgagcagatggtctttagtttaattaggtcccatttgtcaattttgacttttgttgccattgcttttggggttttagtcatgaagtctttgcccatgcctatgtcctgaatggtattgcctaggttttcttctagggtttttatggttttaggttttacatttaagtatttaatccatcttgagttaatttttgtatgagatataaggaaggggtccagttccagttttccgcatatggctagccagttttcccaacaccatttattaaatagggaatcctttccctactgcttgtttttgtcaggtttgtcaaagatcagatggttgtagatgtgtggcattatttcttaggcctctgttctgttccattggtctatatatctgttttggtaccagtaccatgctgttttggcaaaccaggaagaagctgaatccctgaatataccaataagaagttctgaaattgaggcagtaattaatagcctaccgagcaaaaaaaaaaaaaaaaaaaaaaaaatccaggaccagacggattcacagccgaattctaccagaggtacaaagaggagctggtaccattccttctgaaactattccaatcaatagaaaaagagggaatcctctctaactaattttatgagtccagcatcatcctgataccaaaacctggcagaggcacaaccaaaaacagaaaatttcaggccaatatccctgatgaatattgatgtgaaaattctcaataaaatactggcaaactgaatccaacagcacatcaaaaagcttacccaccacgatcaagttggcttcatccctgggatgcaaggctggttaaacatatgcaaatcaataaatgtaatccatcacataaacagaaccagtgacaaaaaccacatgattatctcaatagatgcagaaaaggctttcaataaaatttaacacccctttatgctaaaaactctcaataaactaggtattgatggaacccatcgaaaaaaaatgagctatttatgacaaacccacagccaatgtcacactgaatgagaaaaagctggaagtattccctttgaaaactggcacgagacaaggatgccctctctcaccactcgtattcaacctactattggaagttctggccagggcaatcaggcaagagaaagaaataaagcgtattcaaataggaagagagaaagtcaaattgtctctgtttgcagatgacatgattgtatatttagaaaaccccatcatctcagccccaaatctccttaagctgataagcaacttcagcaaagtcccaggatacaaaatcaatgtgcaaagatcacaagattcctatataccaataacagacaaacagagagccaaatcatgagtgaactcccattcacaattgctacaaagagaataaaatacctaggaatccaacttacaagggatatgaaggacctcttcaaggagaactacaaaccactgctcaagggaataaaagaggacacaaataaatggaaaaacattccatgctcatgataggaagaatcaatattgtgaaaatggctgtactgcccaaggtaatttatagattcaatgctatccccatcaagctaccattgactttcttcacagaattagaaaaaactactttaaatttcatatggaaccaaaaaagagcccatatagccaaggcaatcctaagcaaaaagaacaaagctggcggcatcacactacctgactctaaagttctataaatgaactcacgaggccaaagaatgaagaagacaccaacacaaaggggaaaaaatcaaaacaatatggtcattgcaatggtagagatatgcacagtatattatggaaacccagagaagacaaacgtaacacagctttgggaagatatggaatttttctcccaggaggagaggatgatcaagctgagagatgtgtgaactgagtggaaaggaggggagtagtattccaagagaagcaaacagtatgagcaattcatggaggtaggaaagctgtatacagggaaccatcagcaggttgttgaataaaggaagctgaatgaggctgggcacagtagctcacgcctgcattcccagcactttgagaggccgaggtggaatcatcatttgaggccagcagtttgagaccagcctgggtaacatagcctgaccacatctctccaaaaaataaaaataaattagcctgctgtagtggcagtgcctgtagtcctagctactctgaaaggatcacttgagtccaggaggctgaggttgcagtgagctatgattaccccattgcactccagcctgggcaacagagcaagaccctgactctgaaaaaaaaaaaaaacaaaaaacaaaaacaggatcgtaaaagacaatactaacatacaacaaagcatgcagattccagtaaagcctgtcatattaggcagattaggcaggtttaaatatatttttatgtgatgatgagcccctaaaggcttttgagcaggagggactatctgaaaaaagatatagaatggttaagacccaagacagagagaaggtacaaggactatttggttgataaaatctgtaggaattggaatgggctgaatgtgggagtgggggtggggtgagagatggggaggactgaagactgaatagacccagatttctggtttgagtccgggagaggtggggtgctgaattcgaaggtcaggacacctatacctctgggaatacagcgatggttgcaaaaggcatctggtattgtccttctgccactgtcttaaaagggattctaaagggattttcttgcccttgttcctccagccctacacttgcattactggcctacgtggatgctcaccagctggctgtgtccatcattgcagccaagtctgagaattcctgattatacttagagcctgtggagctgctgacacaaacagtcattagcagacaacccttttgcaacaaagtatgctttaaaatgtaaactgtggagccattttccttgcgttgtccagaaggaacttcgtcctgcgtgagcctggattaatcatgagagagctcgtcaacattccactggtacatattcttactctggttgccttcagcggaactgagaaacttccaaaaggttggtttgagcaatcgtgtcttcttgttgtcttgtcatggttgtaaagtgtgtgtatatgagatatgaccaagactgatttatagtatggtgggcttgggttttacttgaagaagtaagggtgaaatgtatgatgagggaggaaattatatacataagcaattggttgatggtctctctaccaatattttactccgaagttctgcaataaaaggcttagccacatagtgcatgcagagctctgacttctagggcaaaacataagcatgtacactgcaagttatcaaggtctattttgtttatgcgaatgtcaaatttcagggtggtctaagtggatgatgacaaccttttcgcatcaggtttgccaggaatagaatcaaccccattctcagacatccagagcatttgcttctgaataaaaatcacttttattttcagttttagctttgccaaactcttaataaatattttagttgctaaaaattggaaatacagaaagacgtacacaatttgcctgtgtaacaaacccggaagacaatggattttaaataactttgaggctggagtcatgatttggcttggcaagagactgcaaaagtttttttcagagcctttggaatgtaccggaaataacaccacctcaggggaaaggaaagcaacttaagaaactgacaaacacctgttgcagtagcaagaatgtccagtgatatagtttctggccagtgtattatgaaactgggactagcgtatttgaaatcagaaagactggaaagtctgtgatttgcaaagtgactaagggtatcactgaaatctttttttaaaaagacatgagaaagcagatcgagtggtatcaatacaagagttttcaaatttaa

SEQ ID NO: 12165 - DNA, 6000 bp, Homo sapiens
tacatagtagatcaacatggggatatcaacaagatgctcctgtttgaacggttttagggttcctgggggtgaaaatccgtttatttcttcaagatgaggaaaacctgctgtagaggaaatttactgtacacaagctgaaacccgctttgccaaatctctgtaagattaggaaatggcgtacagtcgggatcaggtagagatttttggggatacgttcagaactctgaatgcagcaggaagcctacacagggacagagagagggggtccattcctatcttcttttcatgagactgaaaagaagtacagggccaagcttctagataagcactcacttttttaaaacattgtatttatagatccacattcactgcagcattatttacaatagccaaaaggtgaaagcaacccaagtgtccatcagtggatgaatgaattagcaaaatatcatatatacttacaaagaaatgttattcagccttaaaaaggaagaaaagtctgatacctgccacactatggacaaactttaaggacattatgttaagtgaaataagtcagtcacagaaggacaaatactatgtgattccacttaagaggtatcgagagacattcaaatcatagagatacaaagtagaatggtggttgtcgggggcagggggagaagggaatagggagttgttaaatgttcatagaatttcagttttacaagatgaaaagcatcttggatatgggttacatgatgtataattaatgaatataattaacaatactgaactgtacacttaaaatagttgagagcaaattttatgttgtgtgtgtgtttgttgttgttgttttgttttgttttgagatggagtctcactctgttgctcaggctggaatgcagtgatgtgatctctgctcactgcagcctctgcctcccaggttcaagcaattcttctgcctcaacttcccaagtagctgggattacaggcacccattactacgcccagctaatttctgtatttttagtagagatggggtttcactatattggtcaggctggtctcaaactcctgacctcaagcgatctgcctgcctcagcctcccaaagtgctgggattacaggcgtgagccaacatgtctggcctatgttatgtgtattttgccgcaagtttgcttaaaaagtatttgtaaatttgctgtcgtcagctggatgggacatggatggctgtttttcaaacctgtttaccctgcaaatgtggggcagtctgagcattggccttccaagctcagtgcagcattgttggagaaaccagggcccctcagtcttcctgcaggaggcaggcatgcagggcctgggagtcccgggcagctggagtagacaaccttgcagcagctgtgaaaggaacctgtcaagacaactgaggtaaagagcctatacctgtgaattctcaggggtgtttccctcctcagccctggcttcaacagtgaagggatcctcacagcacttaccttccctgcaaagctaaaacaaaccattgctttcttctcagctgtccagaggcctgctgtttgctctggtttggctcaaagcccttccagacagtcaggaaagttataaatgtggatgacccctacaattggctggataatggccctaaaaattatccaggtcctgatggtcggaacctgtgaatgttatctggcaaaagagactttgcgcacgtgattaaattaaggatcttgaaatggggacataaccctggattatctgatgggtcctagatgtaatcataaggatctttaaaagagggaggcagccaggcgtggtggctcatatctgtaatcccagcactttgggaggccgaggcgggcagatcacgaggtcaggagatcgagaccatcctggctaacacggtgaaaccccatgctactaaaaaacaaaacaaaacaaaacaaaatacaaaaaactagccaggcgtggtggcaggtgcctgtagtcccagctactcgggaggctgaggcagaacggcatgaacccgggaggcggagcttgcagtgagccgagatcatgccactgcactccagcctgggagacagagcgagactctgtctcaaaaataaacaaaaaaatttgttaaaaattagctgggcatgctgtagtcccagctactcaggaggctaagctaaggcaggaggatcacttgaggccaggagtctagactgcagtgagctatcattgcaataatgcacttcagcctgagtgacagggcaagaccctgtctctaaaataaataaataaattgggtggtcagagtggcctcactaagagagtgacatttgggaaaaaagaaaaagaacaaaatgcagtgagaaaacatacatattaaaaacccattggtagttccttcttgtcccagagtaaattcctgactttcaacacagcctccgggttgttggcggcctggctcctgcttcctccagccttaccagcacaagatccagtaaacactagcccccacgacacgcacacccactgtctccacacaggccaaccttgaatgtgcacgctcctcctgtgtcacacacatcagatccacaatactgctcatggcataaatataaaataatagaggtatcgttggagagaagatggaaggctagttgatggagttaacagggaaaatatgcaaaggtcctggccataacatgttcaactccaccctcaggctcacttataactgcagatcagcacgtggagggcagttgcaggtcatccattccacccctcactgtacggatggggacatcgaggtcccagagacgggcagtggcatccttggggatcacacagccttacctacacataaagacccaacattctgcaggaattacatgttgtgcatgtggtcttttcatgagtctcaagttcctctactgaacctcagaaggagaaatgactggttggatttccgctctatcaactgactacaaatgagcccaggttaaagggcctctaaataatctttgtgacactcaaggcagtgccatctttcctgagtggggattctgtctcggggggtctaggtgtgctatggaaagacaacaacagactattgctccgtgaaaggaggggagtcatgggctgtcaaaacacagaatccggaatctcttgccatggacccaggcttgggtggctgtgttgtgatcttatgatctaggatcccatggtttgcaacaagctctctgcctgggggacagggaaggagtgcctctggtggtacagaaagaaattttaggactccctggctaagtgttgtaaccaaaacatccatgaggaagttagaagtaagtgtaaaggtcatcagattgtgacaaagccaacaaaaaccgtcaaatgaataaagctgtgttgcagattcttcaatgcaggtggggggagtggggtgcaccagagcccacttatgtgaaggtcagattatcttactcctgcttcccatgtaaggcccagagaggtgaaaagctacacccaaagccctccccagctcttggaacccagatgcttcagagatacccttagcccttctccccagtgcttccccatggcccagtaaaccatgacagcagcagctctccctctccagccccatcacagtgccacggcccatgttctctccctgaagctgctccattagctttcagactgagaatcttaaaagctgtgtgggccgggcaagatggctcacgtctgtaatcccagcatcccagcactttgggaggccgaggcgggcagattacgaggtcaggatttcaagaccagcctgaccaatatggtgaaaccccgtctctactaacaatacaaaaattaaccaggcatggtggtgcgcgcctgtagtcccagctactcgggagcctgaggcaggagaattgcttgaacacgggagatggaggttgcagtgagccaagatcgcgccactgcactacagcctgggcgacagagcgagactctgtttcaaagaaaagaaaaaaagctgtgtgaccctgaggattctaccatttactgaacaagctcccactgccaggttacatgataatttaacatgtatgttttcatttaatccctatgacatagattttattattattttcattttactgaccagaaaactgaggttcagagatgtaagctatttgcctacggtcccaaagccaatagttgatgcgtatggatgtgaactgaggttagctccaggctcaaggtctctgctaatactgtccttagtaaggtttctctgaagagcctctttactcataggctgattagcaaagggttcctaaatatgcttaagaatcaataaccattaaaaatccctcaccctacaagaaactccccatcaaaaaactggatcagtgaaatgaacaggcaatacacagaaatggaagtacccgtaagaaaaatagtttactaccctagtaatcaaagaaaaacaaaattacacgggtgtattccttttggcttatcagattggaaaatatttttctaaaaagaaaaatgtaattatcttgtaatgactacactaaaaatctagggcataattgacttaatttactccaaatgtgttgctattgcgtccatagcacggacttgcccatttcaactcaatatatgttacgcttggggtagtttattacaatgagcaataaacattctcataatcgccaagacaagccaagtgcaaaacaggaagggcgaagacagagggcagcaggtggtccctctcgctcgcgactccgggaacgccaagcctcagcccttgggaacctggggcgaggcgcctgggtctcggccagggggcgcgcccgaggacgccgaagtagggcgcgtgtggggaccacaactcccaggcgcccgcgcgccgcctcgcccggaccacgtgatccgtgcggccagggtagctatcgcggcggcggcggcggcggcggttgaactgactcggagcgaggagacccgagcgagcagacgcggccctggcgcccgccctgcgcactcaccatggcggtaagggccgggcgctacggtgaagagggtgggcggttggggcggggtctcctggagctgccatctcggcaccccgaatcctcgctgccgctggcccggggctggtgaagggtgtgttggcagcattgccaacagctggaacagggttgggggacgcggcaggtataggttgcggtggctctgtggttttcctctttatttgtccctcctgctgggaggcagtccggctaggcgagcagttaccgagcgcccgcggtggcgcggcttgagagtgggggcgcggtggctgaagacagctgggtccggggcccccggccccggacctctggccggcgccccagggcggagagcagcgccttgggagattccaggaaggcttccacgaaagggaaacccccggcgcatttcagcccgcagccccgcgcgcacaccgagcgcacatccccggccctgctcttgtcaagtttgtagcctgattcttcggggaataaaacagaaccagctactttccagcttccctacactttcagtcagaaaacagcgtttcagacaagctgtttttcttggtagggttcacctgggctggagagaacgacagcttgcaagactcgttcgtctttgaagaagtcatatcattttcttcatcccatgaagaatgtcatagaatttaagatacaggaagctcagcctgggcaacatagctagaccccgtctctacaaaaattagccacaagtggtggcaggcgcctgtaatcccagctactcggaggctgaggcaggatgaggaggattgcttgagcccagaagttccaggctgcagtgagccatgaccttcggcctgggcaacagaacaagacgtcctcaaacaaacaaaacaaaaaaaaaaagatataggaagtgtatgtaggccatttagtgaaatgatcagccgtcctttaaaaagggaaatagatggaaagca

SEQ ID NO: 12166 - DNA, 6000 bp, Homo sapiens
tttcactatctttaacacagtgaaaaatgtacaaagcttagcacctagttaagataacatagcttatgcacagattactgataagaaatgaatgtccttgttagcttcagtaaaccatgagtattgggcttgctgttttaattttgcaggtatagcctttttaaaaggaaagacaagagtgtcataagtgaactgtgtttccatagatgttctaaagaccagccaactgaagactacaaagtcgatccaaaagccaggtcaacctaattagttttcagattaattccattttcttttttttttttttttttgagacggaattttgctcttggcgtccaggctggagtgcaatggcaggatctcggctgtgcaacctccacctccaggcttcaagcgattctcctgcctcagcctcctgagcacccgagattacaggtgcccgccaccaggcctggctaatttttgtatttttagtagagatggggtttcaccacattggccaggctggtcttgcactcctgacctcaggtgatccacctgcctcagcctcccaaagtgctgggattacaggtgtgagccaccacgcccagttttttttttttttttttttttttttaatgagacggagtcttgctttgtcacccaggctggagtgcagtggcacgaccttggctcactgcaacctctgcctcccagattcaagcgattctcctacctcagcctcccacgtagctgggattataggcacctgccaccacacccagttaatttttgtatgtttgtagagacggggtttcattgtgttggccaggctggtctcgaactcctgacctcatgatccacctgcgttggcctcccaaagtgctgggattacaagcgtgaaccaccacgcacagtcccattttctattaatatctttaatggactctgcatcaacttgggagataagttacttgtaaatttttagcagggcatggtggctcactctcagaggctgagacaggaggactgcttgaggccaggagttcaagactagcctgagcaatatagcaagaacccatctttacaaaaaattaaaaattagccaggcgtggtggcatgcgcctgtaatcccagctacttgggagactgaggcaagtggattgcttgagcccaggagttcgaagctgcagtgagccatgactgcaccagtgcactccagcctgggcaacagagaaaaaccctgtctcaaaaaaataaataaataaacaaaaataaataaatttttagatttttccactactaaggaactctcaaatgtacacaatctccctatgttggcaagaatgagcttgctaactctggacttgaatctatatttataattcataggaaaagtcatgacagaattaactacattaaaaaaaaatgttagacaatgcatttagtcgccaaggacctcacctcacctcagttttatattttctttctcatcaaaaacaaaaacacatgcatttatactgtatcaatgtattttaataaacagagattctttttgttggtaaagtattaatacttttttaaacaaactgacatcaaacatccatttcaataataacaacaatagcacataggcaggtctggtagaatctgcctacctgatttcagatccaggctctattactttctagctgcatgatcttgggcaatttacctctctgagcctttcccatttgtaaaacggatataataattaatagtacctcatagagaggagtaaatacaattatatatatatatatatatatatatatatatatatacatttctcatttgtaaaatgggcatagtaggtaaaattatttcatagagtagaagggaggaataaatacaataatgtctatgtatttcttagaacagtgtatggcattaagtaagcacagagtacgtatttatatacttgtgaacacatcctattatctcaaaatgtggttcaactcagatacccctgcaagggtgaaagcatgcttgattgacacggaagttgacctgcaaccataaactggtattagcattaacattaaaactacagaactggcaaaggtctcaaagtttatctaggtcaaacctcattattgaataggttggggtatggagggacaaggatggaagataatctgtccaaagtcacattcctaactggggatagaatcaacatttgaatctaggctttttcctatcttttacagaactcaaaatgctttctgatgatcggttaatttatctttctaccatctttagactggtgatttatcattactatgctaatcggatctgcctacacatacctttataatctaaaacaaatatatacataattggccccttaaaaatgctttgtgattattattcctggattgattttattctactactaaaataaaagtttcttaggggcagaaactgtgccttattcctatctggattagctgaagccaagtactattagttcattactattacttcccacaacggtgaggaatgggctaaaacaaactaacaaacaaaaacaaggctcctgattactacttctagattaatagtaaactctaagaggcctagaaactcagaaggcagattatcagatactcctacttctattaggcttgaatatccttcatgaaatcaagcaaatcatgtgtttaaatcaagagacttggaacttaagcaagtatacttacagtaatatatggctataaaagaggaagtgaaaagtagctgcagtattcactgtcatatgttctacttccttagagaaaaccaaaaaaggaatagctaaatcagagaattgtggtgaaactttctgtattctcagtgttaaatttgatttggttttcctgataactgtggggaacaaaaataaactataactttcctcagtatgtcttttaccatcaaattagctgttgtctatgtctaggagcacagtcacatgcctagaattcaagtgtctcagatccttgagaagcctgctcaggaaaaaagaatagttgagccaccaagaatttatctctggccaggaatctggaaaagagcacatggctgtcattacctatcccataattttcagtcagcttggactgattgttgcatgaaaattgggagccctaacattacagacttctcccaaatactttcacatagtgaagaatgcgaatttaaagtggaatagggaaaaaaggaacaaaagcacagcttaactgtaaaataactgagaaacggaaagaactcaaagtggaactaagtgaatgcaggccatctaaagacggggtaggaagggaacagagtggtgagagtgaaaaagactaaaaggtaggtaatatagagctagtcagtgtaaatcaaaaattcctacttaaggacaaaagaaggccagtgtcattttatggtcattcatctattaactcatttgtttatgtattgtctatgactactctcaccctacaaggcagaactgagtatttgtggttgcaatagaaaccacatggcccaacagatctggaagcaacttaagggcaggcacagcagtttaatcatttttgtaacctcttagcatttagcagaataaggggcatatgtggtgcatttgtcatttttccagtacattcttcagcacgcacaaaatttgttaagcatatgttcaaagaaaagctctgcaatgatcagagcttggtagctcacaagtttggaggaagtcaagctgtccactggcacaacacaatggaaaaggctaaactgactactaaaagagacaaaacccttcctctctttaaagatttctattccaggctggtatatattaatataatgcttggggaaactggagaatgacagaagtctgttacgttggttttaagctttaagctttacaaagtgcaatttcgcagctattattcattcaacagccacttcctgagcactcactatgtgctaggtaccatgctgcatgctagacagaaatgaacaccataagcagtccctgtccggtgaggactcataatctaataggtgcggggtataagaatagaggcaaacacacctagctgcaggaataaggaagagaaagcaattcattctgcctgaggttgcagaaggaaaagcatccaaaacgtgacatccgagctgggccttgaagaatgctagagctgacccaccaaggcctggttctaaagtgtcttcgccttctccatggagaaaagaagtctcacatcagccccagctgactcctataaaaattctgaggcaggaagtctcatcagcaatcattcccatttcaccggagaaattgtgacccagaatgcaaaaggcaaacccagggctatcttcccgccaagagagatgccgggtcccgaacctcagatcggcagggtcagcacagttgcaagttctgcccagattctgagaggtgtagagcaccggaatgtggcaagggtctccccccggaagttgggaaaaggcctgagaagagatcgacccccctccaacaatccgccggtatctctcagccacgccctccagcgcatacttctcagtcactcacccgccgctcggcgagaggaaatcggtgtcgtcctcgtcccccgcaccgaacattgcgttggctttcaccgggttgcggggaggaagctgggtattcccagagtcccagggcctgtcaccgccgacgtcgtaaaatgccgcggcggcgtgctgctttccggcagggcgaactccagcacggtctctggaccgaaagtagactgggctctggagaaggtggggcaaaggcaaatgagaggctcgcgcgggcacgagcgccgagtgacgtcaggcctctccagcccgcagcggggcggagcttcacagccccttgcagggattggtcggtaatgctagggggcgggagggggcgggaaatcctcggcctcggtggcggtggtggacacgtcgagccgggtagaagtggaggggccgttcgaagagtcgtgagggggtgacgggttaagattcggagagagaggtgctagtggctggacttgacctggaaaggtaaggcttctctcggcccctctttcgcacccctgtgcatgggtaccgtccttttcccagcgggacaaggaccttcctcgccgctttcctcagctccgcggaaggagaaagagctcgggactggagggttaaagactggggcttcggcccggcccctgcagtggcatagccagagtgaccttgggccggggtgctcggtgcctcagtttccccgtgtatgcaaccggccatttgtccagttcttccatgtgcctgctggtccagaagattttagagctcagaggccatggatttcaatcccggcctcctcgtaatctcagaatttacagatagggagacgaaggaactaagcacccgggtgactagtccgaggtcacaaagagtaaagggcagactgagactggattcctcgtcctttgattcaggacatagtgagctagtgggtgaacaagaaccttatcagcccttaagcactgtgtgcccttacagagtgactattgaaagactgtagcatacacctcgaggaaagtcccctttctagagtccacctgtattctacgcggatgaggtgcagaagagctaagatattctggcggtgggtgatggaaaggaggatactttggaggcagacacatccccaccccaactttggcgtgggtttccctgggtcttcctgcgacagccctaaatcaacatcaattgtggcggactcctctgcctccagtttccaccctatctgtatcttacataagtatttctttggttaacctggtatcattctcgaaacaatcctggggtagtcctggcttagacaaggtgtggctaaggagatagtgtcccagcgtagcgtccacagactcactggagttcttgggcttcccctcacagtcaggttggtactacaggtgtcccttacgtgaatgtttcaatctg

SEQ ID NO: 12167 - DNA, 6000 bp, Homo sapiens
actctatctcctttcatagatgcaaaataaacattagtctaatacatgttctaaggagtccttagaaaataaatctgtttttctctgtttaactatttgtttcttttacttacctgaacagagcttttttttcttcctagtaacaaactgttgttgtatataaggtaccactgattataaggtgtaccattactttatttgccactaagaaagaaaaaaaactctgccaattataattgtactatattgtcaattatatgagaaccattctgctttgagaggtgttgacatgaaaaaaacatgaaacttaaaaacttgagatggttggatggaatgaggtttggtttttagatatgtcaggttaatgggaccttttttaaaatcactatgcaatggaaattataggattctaaggttgtggcataaatacaacctgctgatcaacagaattttgtgttcctcttccacagtatagtattggtgctgtgaagtggtgctcaccattaagtgtgtgtgtgtgtttaagttttgggtagggggaagagccttgaagcttagaagatagagatcccttgcaacttggtattgtgttgggtctagttttggtcaaatgcaatgagagcagagataatgcatgtcacttctgagcagaggtagttaaatacatgatatcatcccctactttcttcacattctgcagtaaacttggaggctgcatgttgaatatgaaagtataatgaaataaaagaagcctagaaccaggaatcatacctggggtaatccaatcagaaatatcctcattgagtgtttcatgagccaggaaaacttttattaagtcacaataaaatctggaagtttatacagcaattagcttagtctaacacttgtcagttttgtgcatatttcttacagcatatgcattacctgccaaataaaagcaaacacttctaggtccctggcaaatatgggattcctccattgactgactgattatgggtcctgagttgaacttgctctgcatgaaggatgtaggcgatcaagtggcttgttttgcctctggccaaatctctaccactatgcttaagatgcgattaattatgtacaacaaacccccatgacacacgtttacctatgtaacaaacctgctcatcctgcacatgtacttctgaatgtaaaaataaaagtaaaaaaaaagaaaacaagaggtggttattattctactgtgggagaaattataggcctaatggtaactaatcaccacggtcttacctcattataatactgcatcggtaagttcatcaacataagcaagttagatctgataaccaaggggcttacagtttctaatttgtatttgacacatggtctgccttctggaagagcaacatagaacctagatgtctttgattaaggtcagtaaatgattgagtgttaatcccattcatttcccaggaaaaggaaacctctttacaagtcaccaccagggattctccaatcacacataggaaaaatttccaggaagacttctataaaacacatgtattaacatctccgaaaacatagttgaaaggacttccctgggcccttttccttagttcctcatctagactatcaagcggtttcctctccaaatgatgggaagaaagtgcatttgtctattacacacttgtattactctattcacttaagcactgtgtcccagtaatggggtctagttatgtctggcttgaaatgacccacatatttgtttctcattcttaggaagtggagtgtttctgtatgtgtatatgtgatgggggtaggccaggagattttttatctaggcaatacccagcctgaaatcattattagcatgacatgagttaaacgtatttctattttagaaagatgttttcaacagcaggatgaagaatcaattggaagagctggtacattgaaagaggtgaatctagactttgggaggcttcttaaagtatattgaactagtctaggccgtgggatatgttcaatagtaatggtagtagaaatggcgactgacattttggaattattttacagatacaatttctacaacttggtggaacattttttaaaatgtaggttttattattcggctatggtgaaaacaacagatcagaagatgatgccactggaaatatagtttgttgtttacagttcctaagaagcgggggcatgccacaccatgcagggccacattggtagcaccagagtccgtcaggaggcagagggagcaagaggaaattataggcacaagcttttattgttgttactgcagaaaaggcaaggcaaggcagggtaagcagggataggactggctagtttgaataacctcagtgggctctggggtagagggtctgtctctagttgtctggtacctggacctgtgatgattagggctgaataacggtgtctacttgggtgtaaaagccaggtagaggaggtggttcagaggaagggctctggattgcttagtgtgcataaggcatgctccagagcaaatcttttgctattttttagaactaactagccctggtaagtgcagtctcttcccagatgccagaacatcaagaacacagaaaagaagacaattgggttaatacatgtttagcatgagaaatgaggaagtaagggaaataaagtcaaagagatttccaccttggatgactatgtcaaagtgaaacaccattaactttccagggaactaaactttattgagcacctactctgtgtcaggcactgctctaaaatctttacatgaataatctcaatactcagagcaaagctttgacatggaggttgtttttatcttaactctactggtgtgttgatggagtctacaagagtttgtgcccagtccaccacaaaatggtccctcacagcttggtttttgacacgttggattggaagtgcttggaggatattacagtagaactatctaggacttagcatgcataatattcctgttttaaatcaggttcttatttaacagaaacttacattgcacttgctactttccagacactgtcctaaaagctttacaaatgccagttcatttaatcccaatacaatactttgagatacatattatcatcttcattctatccacattttcaatcctcatcatagctctcatttatggaatgtaatgatgatgctctagactagacgttttacgtaagttagcttaattcagtaattcaaaacacatgcgattatcttcgttttaaagaccagaaaactaaaggttggtaggtttgtataatttgactaccattgcgtatctttattttaatacattttataaatgcaagcttctgctatgattaaaagtgattaccacattttacagaccagaaagtaataataagtgttggtgaagatgtgaaaaaatgagaactcctgtacaccatttgtgggaatgtaaaatggtacagatgctgtggagaatcatatggtgggtgctcaaaaaattaaaaatagatttaccacatgatccagcaatctcacttctgagtacgtatccaaaagaattgaaaacagagactttaagagatatttgtacaaccatgtttatggcagcattattcacaatagctaacgtgtggcaacaatgcaagtgtccatgaacagacaaatggataagcaaaatgtggtctatacatacaatggaatattgttcagctttaaaaaggaaggaggctttgatctatactacacagaaaagaaccttgaggacattatgcaaagtgaaataagccagtgacaaaaagatacatactgtatgattccacttctaagagctgcctagagtagtcaagattatagagacaaaagtagtgcatagattcaagggcctagggaaaggggaaatggggagttatttattaatgaatagtggtgatgattgtacaaaaatatgaacataattaatgccactaaattgtacacatacaaatggtcaagataataaattttatgttatgtcatgttatgttatgtgattttaccataatacagaaaatgaaaaaagaaaagaaagaaagtaaagcttagcggtttacatgacttgaccaatgcctcaaagccatgagtcacccagctgagatctgaacttcagtatattccattctgaaatcccagacttttcccaatcttcttgtacttttcaaactgtgtttcagttgaggtttattttcagttttgtatgtgagtttcttcacaagaaggggcgggccaaattgtgtcctgcaaaaacctacatatcgaagtcctaacccctctacctcagactatgactgtatatggagagagagccttgaaagaggtatgtaaggtagaatgaggtcattatggtgggccctaatccaacataactggtgtccttataagaaggggagattagaattcagacacacttgctgacaccttgagttcagactggaagcctctagaattgtgagaaaatgaatgtctgttgtttaagccacccagtctgtggtatttccttatggcagccccagcaaactaatacaaatagtgtttccacagctgaaacaaaattggaaaatcaccgtcatcctagagagttacaagggctattttaatagaacctgattgttttcctaaattcaccaagcccaggcagaggtcagatgactaattgggataaaagccaactagcttcctcttgctgtttctttagccactggtctgcaggcgttttcttcttctaacttcctctcctgtgacaaaagagataactattagagaaacaaaagtccagaatgctaaggttgccgctttcacttcctctcaccctttagcccagaactgctttgaatacaccaattgctgtggggcggctcgaggaagagaagacaccagtgcctcagaaactgctcggtcagacggtgatagcgagccacgcattcacagggccactgctgctcacagaagcagtgaggatgatgccaggatgatgtctgcctcgcgcctggctgggactctgatcccagccatggccttcctctcctgcgtgagaccagaaagctgggagccctgcgtggaggtatgtggctggagtcagctcctctgaactttccctcacttctgcccagaacttctcactgtgtgccctggtttgtttatttttgcaaaaaaaaaaaagagttaaattaccttaaagactcaagaagccacagagatcaaataattcattgttacagggcactagaggcagccattgggggtttgttccatttggaaattttgagtgctaacaggggcatgagataacatagatctgcttaaggtccctgctctgctaccttgtggctctgtgaagaaattatcaaacctgtctgagactagttttcgcatctgtaagagaattataataccttcttcactagagagtaagcagactgcttcagtgtcatttcttcccactggtggtctttacactcagcttcaagcagtcaccctgctcctttcaatctcaggaaaaagatggcttttgtgtgtgtgtctctagagaaagaactttctaagtgggtgtcagacttctgtatgcagtaatatagtttagtccagaggatgaaaaaaataagagaatgaaaaaggaaaagagagagagagagaagaaaaaagcaagagggaaatatgtataatgtcagctaatgcaacagtttctttcttagtgaaataccaatcagctggttggtaatcttattcatgatggatctcttttgtttttcccctgcgcagacttcacagttgctttagaaacccatagtagagccgaacagctaagaaaatgatttacagtgaggcagggtcagaaactcaagagagaaaaagccagctgcagtcctgaagttgaggatataggagaaaatcaagtaatatttagcaaagactaattcattatcttgaagccatcccttccctcaattccctgcccatagtcctcctccttgt

SEQ ID NO: 12168 - DNA, 6000 bp, Homo sapiens
cggtagagaggtgggcagaggagctgggggctgaggatattgatctgtgtttgtgccagggactgagttatgaagcgttctgggcatgagtctcaggaatttagacttggccttcgtgcaactgggggtcaccaggcaagagacacagttgagatttgaaaaaaatccctctggcaattggtgtagaacccaggggcctcctgggcatcgttttgggcatttgtggggtgctttcagttatcatgatgactggggggtactactgtgagttagtggatggggcctgggatgccaaacaccctgtgatgttgggaacagtccacatcatgaagggttggcccatgtgccatttgattttgcatttcccaccaggcacgcgtgcagagggaaaacacctgtctgtaattgtctaagattagagcacatgtctggcttgcatagaaacggagagcatctttgcgtggtttttagcgaagactgatttgccagaactatgccttccatgcacattttaggaagattgcgccttatcttgtttggagccttacccagattcgccaccattttgaaaaactacatacttcatggcagatcttctcatgggatttgagcggccaacgggaccttccccacattggtgtgcatctgtggctgtcaccttcagtggagttctgtgtaggcacacacttctcattgctttattgtgtctgctagcatagtgtactcaacaggagcatttacaatttgaaataatggatcaccttaaattaccttcgttatgtattcttttttttttttttttctgagacagagtctcactctgtctcccaggctggaaggcagtggcacaatctcagctcagtgcaacctccacctcccgggttcaagcgattctcctgcctcagcctcctgagtagctgggattacaggtgcccgccaccatgcctgaataagttttgtatttttagtagagacggggttttgccatgttggccaggctggtctcgaactcctgatctcaggtgatccgcccacctcggctcccaaagtgctgggattacaggcatgagacacagcgcccggccctttatgtattaatttaaccaacactcatttaactcttgacattgccagacacttttctaaatgcttgatgagtaattatttaatcctcaagacaagtctatgcagtaaggtgcagttgctgtctcttttttttaccagggagctaactgaggcacagagaggtgacttacccaaggctggagtcgggcagacccaactcgaatcctgccaggcactggtgctgggccaacctcacttctctgtgccttggtttcctcatccatagaatggggccagtgctgaccttgcagtgctgctgggaagtggagaagccgggatttgaatcagcatctgtgcacctcaccactggcctatagtgtctgcctctgatgtttcagttagggcattgggttggttttcttttggaagttacaagcatacatatgttgagacaaggttaagtgccactggtggagagcctgtgagagctgggctgggagggagtggaggtctggtcactgaagctggggcatggacacgcttgtccagggaggaatgtggagtgaggagggcagggggctggagacagacccggacaggtcacaacattctgggaggaggagtgaggaacggttaacaaggtagagagaccagggtagcaggggttggggagcccacagggacagagttccaagaaggagggcatgggtgacaatggagaaggccttagagaaacccagtgaggtcagggctgatggtggccccagactcagacacagagggagcagggggacctgggccgtgagagccgaaggggcctcagctggagctgcagtcactctcaccccaatacccaatgtagggagaaggaggggaagaaacaccccaacctccatctcctctctccctggcatctccggcctgtgcctcccactggctcacctttccaggaagcagatggaaggaagccagcatgacacagcccacaggtgccagcagggcaagggcggctctgggtggggagtagggacaaacagaacaaccagtgagaccctgagaagggagatgtgagaccctggggaatgatccagagcaggagtcacctggaagggtctgaaggggttccttctggtgggctcctcagtggggagggtcactatcctcccacgacgaggctctgacagcagccgcccagtccttgcaatgttctcaggcagatgctgtgatgatcccatttacagatgggagaactaagacgcagaaaaggaacagaccaacaaaagctcacctaagggcagagagcaggaaccggattcaaacccaggtctgcctgatgccaaagctgggactcccaaccactgaaccttgctgtcgcatgtgcccatcagcttgagagttggtgggaatcccggcccaggacagcgtcccctcagccagggaggtggcagcaagtcatgctcaggctagtggaggggcagttagtaacctgcagtcggaggttcaccagtggaaaggctggagtcgggcagacccaactcgaatcctgccaggcactggtgctgggctgctcacctctctgtgcctcggtttcctcatccatagaatggggccaatgctgactttgcagtgctgctggtgggtggggggggggtaaactgaggttatgtcgattcccttcccaggtggggaggacaggggaagtggatgcacctgggggaccatctcagaggagctggcccactcttactgccttctccagatccggaccagggagcggtcaagatggtgtgcccttgtctgacctccgtcctgcctgctgtccagcgactccctggcttcctccccgtcacgtgggactcctgtacccggtgctgtcgggggagcccccctccataccctccagacctcacaagacacttccaggtctggccacaaggtggagtgtggcggctgcaggacagtgctgggggccgggctgcagaggagactggacctgcgccgggtgacctccccgctctgtgaaagtgtgggagtttgtgtctgtgcatccagagaaccagagggtggtggttgacttgccgtgctccccccagccccccattgggattgcctgggtctctgggggatcactgagaagctggataaagagagctggcactgtcgccttggctcactaacgccaccattttacaggtgaggagactgaggcccagagaaggaagtcacgtgctgaggtcaccggctaatcagtggctgagctgggctcgaacccagatctcttacgctgtgaggcctctgcttttcctgtggcatggagaggggcttctcccacctggggagagggatcctgttgtattggagaggcaggggattaaagatggactgagagaggttagtgtcccagaaaccaaggggcaatccctgccctggagagaacaggcctcaagggcagggatggggcaggggcagtggataaggagtctacccaggcctttttgggttccctcctttggtccctggggacccagggctgtggcacttgccccgggctagagggtcggccagggcctgtgtggtgcccactgctccctcccctgcactgcaggggacccttgcccatccctctagctcatctggacctccctcaatggctcctgctgtctttccaggctgtgtcctcccgtgtcagggacacatcccagagcccagggcctgcgtgggctgtatccacggttactgaatagggacaaacaggcatgtattggcaggggccggtggctcatttcaggaaagtcccttcagcaagaggattctctccccactggggctgagggtggtagaagaaaggaatgttgttctatgttgtagtgtctctgagatgacctggcttcctgaaccaggtccccctgaagagctcctcctgtccaccccaacaagaggccagctggagagcaagcaaacatcgagtgcagcaggagactataaggttagacaacaagaaggacttcctggcaggggagagcaatgcttgcttggttagagctgcctttcagtagaatgggctgctttggattgcagtgaggtcgctggagttgcaaacagcagagccagagatcaaggtcaagtggaagaaagctgggaaaggttcagtttggctggtgaagggtggagagggtaaagggaggcagggaccaccgtggtgcaggggtgaggtgccctgcagggagctgatcctgaggccgatggtgggaggagctgtgtgtggtcgggtgggacggggtggggacagcaggagacactgagaaggtggcatggccaggagctaggggctgaccgagtgtggggaggggggagtggggagggggcgttgggctgcccgatgggaggtgccttggctccgatgggagcactggggagcagcaggtggggggacgagctgggtgggaggggctgcagcttcccagcagagacagggtctgggaggcgactggactcgaaggcctgggcttgggagagaggcccgggctggagaggtggggagggggatccaggagaggggataactaaggacttgggagtagctggcatcacctggtgagacgagagtcctgaacagccccctctccaaggacagaaatttctccaaggaggctgacctgagaggtgggaggagagtggggcagagggtcaggagggagaaaccagtgggtgccaagaccaggtcagccccacaggctagggggcttgaggacttggggctgatgtctagggacgtccacgaggtggagcagcccaggaggcctgggtgggaggaggaggcggtggcggggaggggagggaggggctgggcctctgtccacagcattagtgctggttggagggacgaggggggtgcggagccagccaggccgccctcccgttctcacagcagccgagcagagcgcagagcgggctgccatggcgctggccaggcctgggaccccggacccccaggccctggcctctgtcctgctactgctgctctgggcccctgccctttccctcctggctggtgagttggggcccatgtctggaggggcctgggagagggtctgtcccccaagacagataccccaagccttggctgctggggtggtgggtgggctggtccgcgtgggtgcaggcctgagctgtggggtgcacaggagtgcgcggctgtggcccccagactctgtggggctccacggaggtgagtgtgttctgaggctcggggctgtttcatgttgaggggggttgtaagtttcggggttgggggatcgggggctgggcatgatttgggggagctgatgcgggtgagggatggggtgcgtgttttgggaggtgctgtgttgcatcctgtaaagggctgggggacttctgggtttctaggggctgagtttggggagttgcaggtggcataagcctcaccccagagcttgttctgtgtcgcatgctgggttgtggggcacaggttgtgggtgtgttagagttgggaggtggatgagctgtctggggtgagccgtgagttgtgtccgaggagttgggtgtggtgagctgtgtcctagcacacgctgtggggtgtaggttgtccagggttgaactaggtctttgctctcaacatgaggggtgtgggatgtgcacagccgaccccaactcgggactgagtggagaagcgtgagggagactcagggagctgggtgcctgcccgcacccctccatttgtgcggtagccctgcctgtgctgagggctgctggggatgctctgggtccctgtggggtggctggggatttgggaacatgtgtgtgtcccctgctgccccctccccagcattccaaggccaatctgaaagggctccctgaagccagaccacatttgccaagccctttttgcttttgtccaagctctcggagcctgga

SEQ ID NO: 12169 - DNA, 6000 bp, Homo sapiens
aaaacagacagccaacctgtaaacaagtaagcaaataaaatcatttcaaatagtgacaagtgctacaagaaattgagaagaagtgacggggctggcacatagaaggtctactctgagagaggggtcaaggaaagctttttgaggaagtagcattgggctgggcttggaataaacggtaagaagctaggggaacagcccttctgacagcaactacctcagggcaagggccccgaagcaggcctagcatggccagttaaaaggcaggaggaagagtggacaggcttgagcatagagaacggagccaggaactgtgtgaggccgagagtgggcagcagctgagccaggtgggcttttgcaggccaatgagtatttgtggaatgcattaactctctgagaagtggaaaccaatattggtcaaattaatatgcagctattgagagagtcctgaggagctggaggaaacagagggagtcaggggtgccctgggaggctggagggatcacaggcctagtcccggaaccttggctatgagtttcagcctgatcctcaggccctgggcacccatgggagggttttaggcaggatgacattatctggatttgcactttagaaaggtaggtaaataatgcctcacaaacaccttccatgtgtcacacactcggcctttaatcctcaaaaccccctgaggtgatgggggtggcattccagcacttccccacctctaccacataacagtgagggtttggtgagccaaactcatgagctcagatgagcaggaaattgccagaaaaaaataggcccagttctgtggtactcccaaagatcctcttacagtgacttttctcttctaggatcccatcaggctccttggaaagtgcttctacttccgaagccaaccctgaggggcactcagccagctctgaccaggaccctgtggcagacagagagggcagcccggtctccggcagcagccccttccagctcacggctttctccgatgaagacattatagacttgaagtaacagagttgaatctcatttgccatctttagttttcttatggaggtttatactctttaaacagttctgatgtaatttctcaacaaaatgtggcttttagcctgtcagtgatctattggaccaaaccttctgcacactcggccagttccctctccaatgtccggtgccatctttcctgacctttgtttctttctgttcaggaaccatcagtccccttgtaataaaggtggtagatttcattgaggttttagattgaaactttgaataaatcaaaaatactcattcttatttactgcaaccttctcatattttatatacttagatggaaaattattttttcattacagttttgatttatgtcacataatgtgtttcttttataaagaaaagtcgttgctttttaactttattataagtaagttttttttctgcacctttggccccggttgctgtttcagttcaccgtgattggaaccagctgcattcctgcctgtagacttttgagaaaagttgaatggttagatcttagaagctcctccttcttccctgcatctcatgaaaaatattaaggcataggagcttgtcaaaagtcttcagattattttgtgtggttttattgttactctgcaataatgtaaccagagaacagctactccttgtggttaaaagtattctcattgtaatcccagtgctttggaaggccaaggtggaaggatcccttgtgcccaggagtttaaggctgcagtgagctaagattgcaccactgttctccagtctgggcaacagagggagaccctgtctcaaaaaaaaaaaaaaaaaaaagaaaagaaaagaaaaaaaaaagaaagcattttcaaactcctccttctttttgagtccccctcactctttcacataaatgatatgaagataataatttggtttatctgcctttcctggctccctctccagtgtgaacagaaagaaatgtggactgggccaagtgcaaaagaaatagtgaaatctcagccactagccaaggggagatccagtttcactagcattgtttgcaaatattttaatctgtgtgaagaaggtattttacctttggctttagtctagccaattcaattttattctgtctcttcctacttatattattacattattcatcaaaggaaacttcctgttaccccgttaaagcagctcagaagagttcttctgcaggcttttttttttttttttttttagacagagtcttactctattgcccaggctggagtgcagtggcacgatctcggctctctgcaacctccacctcccaggttcaagccattctgctgcctcagcctcctaagtagctgggattacaggcacgcatcaccacacccagctaatttttgtattttagtagagatggggtttcaccatgttggccaggctggtctcgaactcctgacctcgtgatccgcccaccttggcctcccaaaatgctgggattataggtgtgagccactatgcccggccagcaggccttctttgtgagtgtggagaactgagtttgacaggaccttggtctgacagattttatagaagtttgggtcgtacctcctagtgggccttgcacactgtggggaaagttcccctctctgtcttttgtacaaacagatcagcatgatagcccaagctgaaggttgcttggttcatctttggcagaaggcaagagtcaagagtagtaaagacagtgctttttaggtatacccagatggggctgtttataaccaaatgtgtctgctcatattctttgcagcagttagcatgcccattcttcctttgtgtgttttatgcccttttcctatatagggggaaaaaaacactgtgtctcaaccccaccaacagtttaatgaattatgttttattattcttgcttttcaaataaggaaataggcttaggaaggggcaatggtttgaacctgcaagttctttgactccagagcccttgctttccccacgtctgccatgcagagccaggctcagtgccttgtgtcagctggatctggctggtgtttttcatgttaaactaatttgtaagctttatgagcttgtatctgtgtttttcctttttttctggaagtttcttgcttcacagtgtagcataaaaaaaacccaaggactattttagagcattcttccaaatcagcagcattagagccacccacaatttgacaagagtcacaggtctgaggagtgatgtagcaagggcaagaggtggaccctactgatcaggctgatggtgctttgcctatgaaaagggggcaggaggctgttctggcaacattatttgtctacaaaggccaagaagtgagttctgcacactcacgggaagggaagccatcggccacagggtaggagcaccctgcctacataatcctttctgtgtacccgactggctgagtcacacagaaaatcatctaactgcagtgtctgcctatggagttggaggcattgatccactctgcacacaccaagtgcctcctctccagaggaggtcatgtccattgggggaaggacggaagtaaacaagggatcacaaagcagtgataaatgctgtgataagaatacacatctagtgctcgagttatcaagcattagatgctgtgggagtacagaagggcagttgcctaagtctttaaggataggcttgtggtcaggactgaaaaatgttggttgctagaaccatcaagtgactgcaacatatcagatgactgtcttcatcataccggttagcctttgagtgcttcacatgtcttatatacattaccttgcttcacaactctcctggaagataatggtcatccccacttagagatgaggaaacacaaggcccagagagggattacaagccaagcctcttactcccatgccctggctctttccagaattacaccagcattccaccacagctgcctgcacccagagtgttgggtatgaatcgggtacaactggtgagatccaacagtgcctcatcattcgacttgggtgcacacgggagaaggtggcattaaaatccacagggaactcaaaatatggaggcaggtagatgaagattcaagagtcaggactccctgtgaagtgagtgacacttaagagggggagtggagcccagatctgtcacacatacggcgtgggggaccccacctaccactggtcctcagcacctggagacccgagccttcagcaatctgggaagcatgaaagtgggtttcggtgcacagggccacgcctccgccgccagcagcccagcgggagcgtctgaccagtctcgccctccgagaggagagagaggcggcccaggacggtctgcttagaggctctctcccctgcagagctgggcccaggcataggtcagacgcctccaatacagtccccagggcagcgattaaagcggagcaggaactgcagacccgaccgggcaggacaggtgcagcttctcggagttgggggcgggaagtctcgggctgaggcccacgtgcttcgccttcgccccgcctctaccctcattggttgaagccagattgagaggaggtgccagaaaaaaaactcctccctccaacctcattggccagctcagttctgaggcagctctctggccccgtctatgggctcgcactacactccaattgggtggttgttctcccagacggaaactccgccccacctgtaccttggaccgctccgccctaggggcggttccagcgcgcttcgctaatcggttctatgctcccattggtctgctttaatgtgaagggcgggtcctagctgattcgctagccccgccttgcgttcctattggctgctcctgctctgcggttccgatcccgcccagcaccgtcccccaccccccgccgcccattggctgcgagaggccggtgcgggccgcactcgcagggcccgtggcggttcaggcgccagagctggccgatcggcgttggccgccgacatgacgcccgaggacccagaggaaacccagccgcttctggggcctcctggcggcaggtgagctccggggaacccgggcccggatgcggcctcgccctcccgcccctccgcgtccgctccgctcaccctcggccctgtccccccagcgcgccccgcggccgccgcgtcttcctcgccgccttcgccgctgccctgggcccactcagcttcggcttcgcgctcggctacagctccccggccatccctagcctgcagcgcgccgcgcccccggccccgcgcctggacgacgccgccgcctcctggttcggggtgaggccccgggctcgctcctcccgccctgggaccccacgccctcctctcgggacgggcatcgggaccctccgccccccacccttcccctcgggacaggcatcgggccccgccgccaccacctttccccacgagacaggcattgggcctctctgccccccatcccttccctcgggacgggcatcgagcccctcagcccccacccctcccctcgggacgagcaccgggcccctcagccccctacccctcccctcgggacgggcgcggggccccggctcttttacctctgagcccgcggggagtgggtggagggggaggatgggctgcggcttcggcgccccctcctcagcagccgcccgcctccaggctgtcgtgaccctgggtgccgcggcggggggagtgctgggcggctggctggtggaccgcgccgggcgcaagctgagcctcttgctgtgctccgtgcccttcgtggccggctttgccgtcatcaccgcggcccaggacgtgtggatgctgctggggggccgcctcctcaccggcctggcctgcggtgttgcctccctagtggccccggtgagtgtcccgtctctcgagtgtcctgtctcgcggcctgagaccgagggggagtgggacaaaccgctccccaggcctgggggcgcggctccccctggcgggaccttctgggtgccaggc

SEQ ID NO: 12170 - DNA, 6000 bp, Homo sapiens
ccttttactggctgatccccaaaagagagacagttcagctggctgcaaactgggggagccccaagtgggatatggggcagctggttgggcttgaagccagagagaaagcaaatctgagaagcatagactctcaaagcagatagaccaagaactggagtaacaggaacatggatgcagcccgcatccttttccagaacagtgctctgaaggtgtttggggtttgtgatcactggctgattggggctggcctcaccaaatcacaaaaaggacctccagaatgttctggaaacatttttgaaaagttcactttaggccaggcgcagtggctcatgcctgtaatcccagcactttgggagtctgaggtggacagatcacgaggtcaggagtttgagaccagcctggccaatatggtgaaaccccgtctctactaaaaatacaaaaattagctgggcgtggtggtgcgtgcctgtactcccagctactcaggaggctgagacaggagaatcgcttgaatccaggaggcggaggttgcagtgagccaagattgtgccgctgtactccagcctgggtgacagagcaagactctgtttaaaagaaaaaaagaaaagttcactttggttctcgggcttctcagtgtcccagaagcactactttgttttgctctcacttcccctgtttaaatatgtctgctagtgagtcaggttcctgcaagcttttattctaggaactgttccagtttttccctttatctttgtcttacagttaatcttcagttggagaagaaagccattactctggagtgggaggtgccctcagcggcattcaagctttcaaatcctgaggggctgtcttctcggaagcacagagaattttgcttattgtgtgtgtaactgccaagtgtaggcaggtttcattggaaactggctacactaggctgtcatggcaacctgatcatcaaatgacactgtggccacagccgccaatgaggtttgagagccttaagggtgggtggggcttgagcggctggatgctggcaaagcttcctcatattaatatttctggctcagcctgagtcattgcagaggaggggagaggaactttctgacctaatgctacactcccagaggcactgtacctgccctgttcttattcatggtattccggcctttacctgaagcacctgctttcttctggcatgtaacatagtggtagaacaaggaaagcttttggtggcattggcagatttgctgtgagaagatgctcaggagaggaactgctactttatagattaattgcaatctgatgccactgaatcctaagggacctagtgttgctgtcactgtttccgaatactagtcataggaatggacatcggaggagctgaaacagatgagggtctgtgccacaaagtcagaataataaagagcagcgaggcatcgcacacaatgcgcgttgtgcccagatcttggagtgtcaagaaggccggtgtgaagcatcagggctgaaacccgaggcctgctttagttcctccataatctagttctcacagaggcattcagaagctgtgacacaaacaccgtttttggttgtatttagctagggctcaacttgctcaagttacacctttcccacacacctgccgccttccagtatgaggtatcacctactgtctggcttaccggcatcctttgggaactgaatactaaaatctgttttgggtgctgtttgaagtggatgttgtaacaagaaccctgggtgcaaggccctgccctgcccttgacaggctttgggaattgggcaaatcaggtcgcctctcccaggcctgtttgctcaactcggagattaagggatgatcccagagcccctctgggcccccacagtctgcagttccaggaatacagcagttgtcctggacactagcacctagagatgggcttatttgggtagaactctccatttttatatgaacatggagtcttgagttacctgtgaaactcagtaggatggatgatttaaaaaaccaaatgccaattgaagtttatccaatgaagacattccatgagactcagtcacagcagcaaataagttagaacccttttaaaaattagctgggtgtgctcgtgggcacctgtagtcccagctactcgggaggctgaggcaggagaatcgcttgaacccaggaggtggaggttgtagtgagccaagatcgcgccactgcactccagcctgggcgacagagcaagactccatcttaggaaagacaaagaaaaaagaagaagaatacaggtttcacttttatttagtatcattttcaaatctcagatttcttttgttaaatacattataaaactcaatggtacagtaatatgtgccataattatttttaaaatatactttaatagaaagtgaaatctccaattgaacttattcagtcaaaatatttgcttttttatattagaatgactgcagtcatcactaaaatgagatattcaacagatctgtataatttagtttcagaagcaaacaataatttaacaaaggaagaccagcattttttttaatagggcaacatctcattttataaagtagagtgagcattcctaaagaccagcattttagggttcagcttttatttataaatgtgaacctcctttaaaataaaataatagaggctaggcgcagtggctcatacctgtaatcctagcactttgggaggccaaggcaggcagatcacttgaggccaggagttggagaccagcctggccaacatggtaaaacctagtctctactaaaaatacaaaaatcagccaggcgtggtggtgggcgcctataatctcaactactcgggaggctgaggcacaagagtcgcttgaacctgggaggcagaggttgcagtaagccgagatcgtgccactgcactccagcctgggtgacaagagtgacagtctgtctcaaaaataataataataatgatacattatcttgtccatttgaatataatgccctgacaactctatttgcagatgctcagaaaaataggccttcatcaagcatggttataagtttgtttcttggggtcttagagccccctgagctaattcactcatttggaagctgttcatgaagcaccttatttgatcaaggcaggaggttatttccagacaaggaggtccaagggtttgaagtaagagccttctaccttcaaggaccctggtggtagagataagaggcgtgttaaaatagcccaaggcagaacattctggattgggcagcttaagagatagctgagtgtcatggatttagcggaggctgagcaggaatctgcctggataatccagtgcgacctcataggatccgtcactagggtagcccaagacctgttctcacagactcgttatcagatctctgttagaaggcccaaatgtcatatcacttgtcataatctctgtttcataatgttgtgtgtaagtatcaacatcttgtaacaccctctttacgagttaacaacaagcgttttagtgcattaaaaagtccttttacttctgtgatccccaagtaataactatccatttttatccatcccggtagtgggaagatatagtctatattaggaagtggcgcactgtagaaggaacaagggtgagactgagcctgttctcatcttggtgacgtggtctcttcctccgcagcacgaatctgtggggaaggaatgagtggagaattcaggccggcctgcagagagggtcgtcctgccctgaaagggtcgttctcgagctgtgttgcccagtgaagtttccgctgtggcagaaatgcccagtgactatgcgtggctatcctggggaactgagtttgtaatttcatgtcattttaatgaatttacttttttgcatgagacacagtttcactctgtcacacaggctggagtgcagtggcacaatcctggctcagtacaacctccgcctcctgggttcaggcaattctcgtgtctcagcctccccagtagctgggattacaggcgtgtgccaccacgcctggctatgactttacatttaaaaagcttctgtattgaacagcaaagttctagctgtgactaagactgggctcctacgtgttctgagcggacgtgggcgttgaagactgtgggtctcatgtgaggcctcgactgaccccagattgatgcttctggggagtcctttggcatggtgtcctcttaccaaccccatcatgtcagctcctgggcactctggggctcctaggtgaaggctggtgctcacattgcagaatggcctggaagaggtttcaatgcaatgtgggctgtggagggctgcaggttccctggagcaggagccagctagaactgtgcctggagccgtgtgtggccagggcagctcccctgtgggatacatgggcccataggggggtccactttccagggtggctaggcacctggctctcggccacccctcagcctcctatcctcacagctgaactgggcccgtttgcagtggcaatcagctctgtctctctccaactactgattttttggttgggaatgatttactaaaaggagaaaaactgttgtgtgacacgtttggggaccttgtgtgaaagcagccataggctgtttgttcatctgaaggggttggcagctagagggtgaaggtttgtttgggctctgtacctggtacccaggcaggcagaacgcaccacccggcctcttctccaagagttaactgcagggagggagcggtgacgtcagccctgatctttgtgcctctcacttgagcaacctgatgccaccttctcccccgggctctgtgttcattggctgttggcaggacttgccgtgggagggcttttttcttttttcaattaagtaaaagggcagggcttaagcagccaatgacagctgaggccaggcttgtcttatgcaagtttcccgggaccggcagcatttagggaacttgctcccggtggtgagggcagtggagcacccagcaggccgccaacatgctctgtctgtgcctgtatgtgccggtcatcggggaagcccagaccgagttccagtactttgagtcgaaggggctccctgccgagctgaagtccattttcaagctcagtgtcttcatcccctcccaggaattctccacctaccgccagtggaagcaggtctgtggggtgaccgcgcggaagggagaggcgcattcaaccggtatttgttgagtgaatggctgagcatgcatgaaccatcccccactgagaggaaagaatgtctgaaatgtagcagttttttcccattgccatgcggctatggccggcacgtgtacgtcacaggagtgaccggttttcatgtgacttcccaggaaggctggaattccagcgaaggctgttgtgagaaatggactttcagaaaggaaattccttttgctggaatgaggggggtgttcctgagaagtacagagccagaaagggacctggggggcaggccagtagtgcatgggaggagaaggcagggaggcccaggagttgagggtgctgcgtggtggagctgcccgtccctggtgtgggggtgagggagcctcccgccttctcgactctcagacatcgctgtggaacagggcctgtgtctgccctgaaagtgaggaagccgagctgcagagtccggaggccccttgccacctcggcttctcggttaatcagtttccctgctacccccagtgcccactgtgcaccaagggggatttgcagatccaaggaaggagacagaaggaggcccaggccctgtgaggcagaagcaagcactttgagaatgcgttgaagccagctgcggtgagcacaccctctgctctgggtgtctgcgacagcacccaccccagggaggcatgtggctcaccctggcagcaggcggctgggtcccagagggctccatgcctgatgttcgcctcctgcctaaatggcttgtccactctatttccattcctgttagagatttggagcagt

SEQ ID NO: 12171 - DNA, 6000 bp, Homo sapiens
aaaaaaaaaaaaaaaaaagacaggggaattacaaaggagaaagagtaattcacacagagccggctgtgcgggagaccggagttttattattacttaaatcggttctccccagtcatgtggggatcagagttcttaaatataatttggcaggtaggggcttggaaagtggaaaatgctgattggtcagattggagatggaatcataggaggtggaagttaggtattcttaatgtcttctgttcctgggtgcgatggtagaactggttgggccagattactggtctggctggtgtcagctgatccatcgggtgcagggtctgcagaatatctcaagcactgactttaggttttacaatagtgatgttaccccaggagcaatttggggaggacccaaaggctgcatgacccctaaattgtaatttctaatcttatagctactttgccagtcctgcaaaggcagactggaccccaggcaagaagaagggtctttttgggaaagggctgttataaattttgtttcagagtcaaaccatgaactgaattccttcccaaagttagttcagcctacgcccaggagtgaacaaggacagcttaagggttagaagcaagacagaatcagttaggtctgatttgttccgctgtcataatttcctgagttacaaatttgcaaaggcggtttcacaggggccgttctgttgaggaggggtgtgcctcctgaggctggctgagggcagaggtggaaggtttggaggctagaaatgagagttcccaggtaatggcttctattttctccaaaaagtagtagagagatctttgctgggggagaggggcggtggaatgggggcttgagaagactggaggctttgttttgttttgttttgttttgttttgttgagacagaatctcactctgtcacccaggctgtagtgcagtggcgtgatctcaggtcactgcaactcccacctcctaggttcaagtgattcttctgcctcagaatcccaagtggctggggctacaggcatgtgccaccacacctggctaatttttttttgtattattactatttttttttttttgagacggagtttcgcctttgttgcccaggctggaatgcaatggcgcgatctcggctcactgcaacctctgcccccctgggttcaagtgattctcctgcctcagcctcctgagtagctgggattacagacacacgccaccatgcccagctaattttgtgtttttagtacagacggggtttcttcatgttggtcaggctggtcttgagctgccgacctcaggtgatccacttgcctcagcctcccaaagtgctgggattacaggtgtgagccactgccccggcctttttttgtatttttaatagagacagggtttcactgtgtttcctaggctggtctcgaactcctggcctcaagtgatctgcccacctcagcctcccgaagtcctgggattacaggcatgagccaccgtgcctcaatgactagaagcatttgaaatgccctgaggggagtgggcaggggacacagggaaacaggattcttgggctgggtgagagcccaagtgagggtagagaccctgagtttgcagttgccccaacctgccccaaaacaagatggctattgggttttccaggcaggtgtgatgggaaaactctgaggcaagaaagttagtaacaggctggactcctggggagggtgggaggacttgggggaagaggaggacttgaggccagggaagaatcaggaagccccctgtcttagtccgtttgggctgctataacaacatatcttagactgcataatgtataaacaacagaaatttatcagccgggtgcagtggctcacacctgtaatcccagcattttgggaggctgaggcagctggatcacctgaggtcaggaattcgagaccagcctgaccaacgtagtgaaaacccatctctactaaaaatacaaaaaattagccaagcatagtggtgtgtggctgtaatcccagctactcaggagactgaagcaggagaattgcttgaaccaccccccaacccctggccaaaaaaaaaaaagaaatttattgctaatagttctggggggttgggaggtccaaggtcaaggcgtcagcagatttggtgtctggtaagggcccgttcctcatacctggggccttctagctgtgtcttcatgtggcagaaggggttgacaagctccccaggcctcttttttctttttgagacggagtctcgctctgttgccaggctagagtacagtggcatgatcttggctcactgcaacctctgcctcctgggttcaagcgattctcttgcctcagcctcctgagtagctgggactacaggcacgcgacaccacacccagctgatttttgtatttttagtaaagatggggtttcactatgttggccaggatggtcttgatctcttgacctcatgatccacccccctcagcctcccaaagtgttgggattacaggcgtgagccaccgcatccggcccccaggcctcttttataagggcactagccgcattcaggtggggcagcccacccaatcaactcccaaaggccccgcctgtttttttttttgttttttgttttttgtttttttttttttgagacagaagtctcgctccgtcgcccaggctggagtgcagtggcgcgatctcggctcgctacaagctccgcctcctgggttcacgccattctcctgcctcagcctcctgagtagctgggactacaggcgcccgccaccacgcccggctatttttttctattttttagtagagacagggtttcgccgtgttagccaggatggtcttgatctcctgacctcgtgatccgcccgcctccgcctcccaaagtgctgggattacaagcgcgagccaccgcgccgtgccggccccgcttcttaataccctgacattaacattaggttttcaacatgtgagttttgagggtcacggacattctgaccatagcacccttggaccaataggacaggcagaggctgtggaatgactctggggtgggtgaagtagggaacactgctttgctttagaaagggaatccctcttctggggctgggagtggcttcccgcaggggactaccgtgcaagggagaagaaatctggcatctctccagaatgcttctcattgcagggccgctggcctagaaatggcctcaaatggaagctgccacccgatcctggtggaggctttgagctaggctagagatcaggactccagggttcagtgcgcacgtgctgcccctgcactaggtaagttccttcctctatggaccttcagccctccccttgcagtggagatagtgtgcacagccctggctcccctccctgaccctgggaaaaggctgaagggagaccccgtgctgttcctaggaaaggagatcttcccagcggtgggagggtgaagggggagcctccctctcctccagtcctgtcttcccagccccagggcggagctcttcctgtgtgtaagcctccacgcgggaaaagctgccagtgcattcattctctcgaggaatccctgcaaaccctcccagatgggtggcgttatcagcccgattttacccgagaggctcctgagggaaagggacctgtctgaggttggtgacagacacccagttcgatcccatctgtggtgccgccaggccgctcccttttctgctcctctcccgagaggctgcagagttctttccctcccagcagggtcctaaggaccccggcggtgctccaggggagccaacatcccctgctttggaggacggacgggtcgggtcgcagtgagcagctccgtggtgtcccctagttctacactcagaccaagagagggctgtgagggctgtgctctttttttttttttctttttgagacggagtctcggtctgtcatccaggctgtagtgcagtggcgcgatctcggctcactgcaacctccgcctcccgggttcaagcgattctcctgcctcagcctcccaagtagctgggagtacaggcacccgccacgacgcccggctaatttttgtatttttagtacagatgggatttcaccatcttggccaggctggtcttgaactgatctcaggtgatcctcccgcctcggtctcccaaagtgccgggattacaggcgtgagctaccacgcccggcctggctgtgctctcttaaagggccgaagcaatgcgggtgctggcgaccgacgcaaggaggtgacgcacaggggacttaaggagcggaccgccgcgggaggacgcgcccagctcagggggactccctctgcgccccccacgctgggtctccggcccacgcgtggcccggctggtctgcggagctagcgccagggccgccagagggcgcccggggcggaggatggggcgggagccggggaagcccgggaggtggtggccgagtgggcgccgcccctctgggtctgcggctcaggtcgaagagtcggctgcgtgggccggggaatccggattccgggggttcaacgcccaggggttccatgagcccctactgttctcggacgcccggccggccccgacgcactcgtcctagcacccctcccctgtccggtcctccggcccctccgccgtcgcccctccggggtccagccgggcggggctgctccagggtcgcggctggcgcgggtccccgggccctggccctccggtgccccgggccaaggagagaaaacttgagcatccacgcacaggggtggggagcaggatcccactctgagggtgcactgccccgccctctccgggtctgcctcggccccgcccgggccccaggccccgccccctcccctcggccggcccgagagctccgggggccgctgcagccgcccaagcgcccgccatgcgcgctgcccgcgccgcgccgctgctccagctgctgctcctgctggggccgtggctggaggctgcgggcgttgcggagtcgccgctgcccgccgtggtccttgccatcctggcccgcaatgccgaacactcgctgccccactacctgggcgctctggagcggctggactacccccgggccaggatggccctctggtgagagacccgggcattggcaccgagtgggcacctaacccccagcttcgcagatggcccccgcccccggcggccctgtctgctcgctccctgcccagacaccacctagacaggcccctcccctcacagacggccctgccagcccgagccgccagagaggaccccgagccccctgctgggagacgacagacctctgaggccacaggccgacgcgggacacccacccctccttctggtcccctactccttcctcttggggccttccctgggtgtaggttgggcccagccagcccttttcaccccagccttcagggcccagctcaaccccagtgggacctgtggttggctggatttgaagaggagcagacaggaacctctgaagtccactggggcccaacgtggcagggatcgaccacgctggaggcttccgggcacaggttgggggtgccatcagcactgggctccgggctgtgcaggggagtcagaccggcccccccaccgcccccgtgctggggccagctctcttggtagatcttggtagaggggcgggatcctgtcagccaagggcagtcccccttcctggagcctctcccctctggcatctctgtacccccagggcactgggatcgaaggccacaacccctggtctgtagacaccagaacagggaggagtccctggctgaggttgggggtaaactgagaaaaatgacaagccaccctcttcaacacaccacagttgggctgggggggtggagccctggcctggggaggccgcccacaattaccacagtttgggagtttgttagttcccacccctgtaagacttgacacgtagtcttcatttctggggaattggcttaaaggggcagcatcacccaaaacctgggcacttggctaaaccccca

SEQ ID NO: 12172 - DNA, 6000 bp, Homo sapiens
gccaccctttgcttttgaataaatgttgcccatcttcactcaagctgtttcccctgcctggcataccctccaatccaaaatccctagcagggcctagccccacctgtacctcctctctgaagcttctgtgtccacccaggccctttgctgaactcagaaagcacctacctgtgcctgaccctctcccccaaccccatgctaaattctctaatcctcatcacagctgattaggatggtattatttactctattttgctcaaaaggagaacaaggaaaactcactcagcctagagagctccagctgtgattcaaaccctggtttgcctatttccaaagtccaaattctgtcccgtgaaatctcctctcaggcgggtgctagggctgacaggagaccaccagccccttggggacaggagccatgtcttgtccaacttcaccttgcatggctgcttacaagggcaggcgaggtgaccatgccttcccagggtggccccacgtcacatcactcaagtcaattatgacattcggttttggagcttctcaataggggcacacttagaatttgagatgagtcagttcttcactggggagagctatctggagccttgaaggatgtttagcatccctgggcttaaaatgccaggagactcccagttactgagacaacacacatcgtggcacctctagagaaagggtacagaactggggataccatgcccaggaagaccagtctagtgcatgaataaccacagaagaccaaaccttggacttggatcaaatagtcccagctccaccataaactagctatgggaccttggtcatgccaggccgcagcctcttgggggctcagcttcctcatctgtacaatgaaggtgacaagaatccacagagaatatactgtgggtcctggctcacagccacttgtcaatgacaacaagctattaacttttttttttttttgagacagtcttgctctatcgcccaggctggagtgcagtggcacaatctcggctcactgcaacctctgcctcccagtttcaagcgattcttgtacctcagcctccagagtagctgggaccacaggcacgtgccaccacacccagctaatttttgtatttttgatagagatggggttttaccacgttgcccaggttggtctcgaactcctgagctcaagcgatagtcccacctcagccttccaaattactgggattataggcatgaaccaccacacccagtcaacaagctattaacatttaaacctaccaggctttccataaaattagtaaccaagcaaaatgaaaaatctcttattatataatgaatccaaattttttttgatagaaaaaaaacagaattccctgaagacaaatgtttggtgacaatttgttgagccaatgttttcctggagagaacagcctgtctgaggagatctaacaattgcgtcactcagacacagtccccctgggcttaggaattggcagaggagagagaaatgacttctggagtccagacggcaggtttacaggctggaggggttggtggaagacctgagtgacacaaacagtaggtatctcaccacttattcctcctggcacaggacccagattcaaaaaccacaatctcactcccatacattaaaggaacacacaacagataggcagatagcctcgcgggagccttggaggaggtggcatcagctttacaggtggggaaactgaggcttagagaggggaaatgacttactcgaagtcccagaaaagcaccaggaggcccccagctgcaagctggggaatgagggcataggatgagcattttaaaaattatgccgggaggccgggcgcggtggctcacgcctgtaatcccagcactttgggaggccgaggtgggcggatcacaaggtcaggagatagagaccatcctggctaacacggtgaaaccccgtctctactaaaaatacaaaaaattagccaggcgtggtggcgggtgcctgtagtcccagctacttgggaggctgaggcaggagaatggagtgaacccgggaggtggagcttgcagtgagccgagattgcaccactgcactccagcctgggcgacagagtgagactccgtctcaaaaaaaaaaaaaggaattatgcagggaactggcagtgccatccaggagtgggatgtggccccaggtctgttctggcaggagttacagtgactgcctcatggctgtgaaggctcctgcattcctttatcgcccccacctggattataaaatcaggcgccctactctttggagcttggagaggttagtgtggcgttctggtggttggcacctaatggaggcattctccgggaggaaagattcctgctgaagccagactgaatgggtctaacttgtatattctccaatcctgttggtcaccctcagtttcttagtggacaccaaggccaagtccagggtaggagcccatctctccttgagtctccagcctcatcatttctccttctggacatcctagtttccagtcacattgaaagtcccttccttggagaagccccttctgactccacccaggctaagccacatgtcccctcccaggtggtcccaagacctgggcttccgccctcaaagtactcagcacgggggcgctcaactccaaggacaggaactatgtgcttgacctgttctccaccagatcctcagcctctggcagctcacccagcacagagtaggtcccccaggcattagcacagatgatcctgggaagctaagggagaggcctgggagcccagcagccttcctagggagggagggagacctgtaggaacccccttctggcaactttcttaatctctctgtgcctcacttatctgtaaaatgagacttatctgcgtgtaaaatacaaagtataatacgtgggaacattcactgtctacaactgtggttctggttgttcattttacaggcggggacatggaggcccacggagtacctggcaggcccacagtccacaggttggaaagaggtgcccaagccctggactttaagcctgggctctgaccttcaacgtttgcttttcacaccacacatcatgtcaataaatagttactggatgcctgttgtgtgccaggccccaagacgggtgttgcgtgactgacaacagaaaaagcatctcagtggcgagggataagctagatcatgggcattagtgtaaatctcccagggttcaaattccagcttctccacttcctggctatgatttttttttttttttagacggagtcttgctctgttgcccaggctgaagtgcagtggcccaatctcagctcactgcaagctctgcctcccaggttcatgccattctcctgcctcagcctcccgagtagctgggaccacaggcgctcgccaccacacccggctaatttttttgtatttttagtagagacggggtttcaccgtgttagccaggatggtctcgatctactgacctcgtgatccgcccgcctcagcctcccaaagtgctgggattacaggtgtgaaccaccgcgcccggccctggctatgatattgctaagtttcctaacctctctaaggttcttttctcttctattaaaagggaaaaataagacctcccaacagaagtgaaactaggcattggcttaacacgtgatggatgggagccacgactatcttcatcatcttatttttaattatctatctgtgcacatggtagtaaatttctcgccctggcccaggtacccaagaccccaattctgtcggagacaaccgcaattaacaacttcttgtgcatcttatcagacagctggcgcgcacacccgcagatacgcccaccctcaggcgtccttctacgcaaagatggatagcacccatcaacgctgttttttctttttttagacggagtctcgctctgtcgcccaggctggagtgcagcggcgcgatctcggctcactgcaagctccacctcccgagttcatgccattctcctgcctcagcctccagagtagctgggactacaggcgcccaccaccacgcccggctgatttttttgtatttttagtagagatgaggtttcaccaagttagccaggatggtctcgatctcctgacctcgtgatccgcccgcctcggcctcccaaagtgctgggattacagacgtgagccaccgcaaccggcccaacgctgtttttactgttgtttccttttttaacctaaggtatcttagaagtcaccctacattagtgcatattaaacattgttcgtcttaatggctgcacagtattccactgtatggattattttttaatttggttgccggtactgttatcagccagggaatttgcgaggacccagcgggatttatggagctgcagagttggagtctggggacccaattccaaccccagatctgtccagaattctgttgtctcgggtatcatctccaccggcgcggtcgtgggagggggatttgggtgcagacaggaccagccccagtgtccgagcgagaatcagcgagcagcacgcgcagttgattcccgcgggcggctcaatcattctgtgcagccactccgttatacttagtagcatcaaactcattaagcactctagcacaaccaagctcggaaccgttagccgaccctcccagcctcggcacctgaccttggggaagtggcgctccgacacagctactcaccctcacctgggccgcttcacccctcgttcccaagtacaccccgtaggttgcagcagtccctgtccctttaagggggccgagcccggctccgctacttccgccccgaagcagcagggcgctagcgcggaggcgagagcgggagaaagcgccgctagaattctcctcataaagatggcgacgccctggccgccgcgttcgcgcccggcggtgacgtcacttccggggcggaggaggctgagtggtgcagtgagggacaaacaaaaggaggcgccggagcagcgctgcggccggcggcgggacggagcggccggggcctggggctgcctgccgggcggccgggcgcggcgagcccaggtgagtggacggggtggggaaaggggcgcgagctgtcacctctcgaaacccacttacacacgccctcggccagctgcccggcccggggcgcccggggcatctggggctctgtctccgggccggccccctggggacctcccgcggtgttcggcctacctctgggctccccagtgcccggagtctccggggcaccaccttctcgccggctccgcggcgcgcgagccccctcccaggcacccctgtgcctccttgtgcttcagaaaccaggagtttccgcctcggctcccccatgtccccttgtcatcccctgggtccccccagatcctcacccctccacacacactctcccgttcctagaggttccacctctgggctctctccttgccatttctttttcaaagatttccttagctgtcttctcctgagttcctggtccccttctcttcccttgcacccctccttcctatcgttccgatgggggcagtgccctgacttgggggcaggatccccggctaggctcttggggcctttctgggatgggatatttgggaagaccggtccggaatctaagaacccagaccctgtcccagtcctgtgcattcaggtgggcccgagggcgaggcgagatccagtgaggtccaggcctggtgcagccctaggtgagctggatacccagcaaactgagctcccaggctgaaggggcatagctggggtcatggagttcatgatgattctgctgctttcgctgactgcttcttccccttgatctggaccggggtgaaccgaggtctgccggttctcagctgttgcgattgttgccttttttgggaaggagggatgggtcgggggttgtctggtagccgcctcctgatggagacttggctggaagggtgggcggttcctgggtgagccacacttccactgactcctcttcccctgcccta

SEQ ID NO: 12173 - DNA, 6000 bp, Homo sapiens
gtacctctaatctcagggccaccttgtctgtgaactccctgccagaggaaagtccagaggtaaaaggccagaccctgccctgggacagctctggaaaagcctgggtttcagagcttgtctgataacctatggagcagtgggaggaggtggccagcagtttggttcatgagacgcaggaggttctgaacctgggccaggaggccgtggcaaacagtgtgccactctgagcctcgccatcctcagctacaagctgggcgcacttagggctgccttgcagggctgttgtgaaggtaacaagaaggacgcagcacctctcaggatgcagagccggcgtcgagaacatcactggtcaaaccctcagctcagagagaggaggcaggcagctcgggcagcctcccctggggcttctggccatattcatgcctgcaccgcccagcccctgtccaacagctgggtccgactgtgtcacctcgtccatctcatgggaccctgcaagggttcctaggcacgtctccctcagaaatgaatccacagctatgattccacaggtacgagtccatagccgtgcacaggttcacagcagcaatacttctaacaccccaaacttagaaacacccaaatgtccatcaagactagaatgggggccgggcgcagtggctcacatctgtaatcccagcactttgggaggctaaggcgggaggactgtttgaggtcatgagttcgagaccagcctgggcaacacagtgagaccctgtctctacaaaaaataaaaaaagactagaatgggaaataaactgtggaatgttcacaccatggaataccgcacagcaacgagaggaagcaaatttccactggaggccgcagcatggctaacgctcacaaccataatgtgagtgaagaagccacatactcaaaaactgcagactgtaggcttccgttgacagaaattccacaatccaggccaggctccgtggctcaagcctgtaatcccagcactttcagaggctgaggcaggtagatcatgaggtgaagagatcgagaccatcctggccaacacggtgaaaccctgtctctattaaaactacaaaaaattagttgggcatgctggtatgcacctgtagtctcagctactcgtgaggccgaggcatgagaatcgcttgaacccaggaagcggaggttgcagtgagctgagatcacggcactacactctagcctgggcgacagagtgagactccgcctcaaaaaacaaacaaaacaaaacaaaaatgaaattacacaatccagccaaactgaaggtgtggtgtcggaagttggaagtcacctggggtgactggaggggcgccagggttcctaagttcctggttcctgatgtgggggctgcttatacaagtgtgcttagtttatgaaaccacatcaagctgtatacattcgatttctgaaattttctgtatgaaatatttacatatacatatatatgtatatatatatattttagacagtcttgctctgtcacccaggctagagtgcagtggcacgatctcggttcactgcaacctctgtctcccaggttcaagcgattctcctgcttcagcctcctgagtagctgggactacaggtgcatgccaccacacccagctaatttttgtatttttagtagagatggagttttgccatattggccaggctggtcttaaactgctgacctcaagtaatccgcctgccttggcctcccaaagagctgggattacaggagtgagccactgcacccagccatgtatatatatatatatatatatttttttttttttttttgagacagagtttcactcttgttgcccaggctggtgtgatgtccgctcactgcaacctccacctccacattcaagcaattctcctccctcaacctcccaagtagctgtgattataggcatgtgccaccatgcctagctaatttttgtatttttagtagagacggggtttcaccatgttggccaggctgggcttgaactcctgacctcgggtgatccacctgcctcggcctcccaaagtgctgggattacaacccagccatatttttgagacagggtcttgctctgctgcccaggctgaagtgtagcggcaggatcacagctcactgtagcctttacctccccagctcatgtgatcctcccatctcagcctcccgagtaactgggaccataggtgtgcaccaccatgcctggctaatttttaaaaatttgtttgtagagatgaagtcttgctgtattgcccagctagtcctgaactcctgggctcaagcgatcctcccgcctcggcctctcaaagtgctgggactacaggtttagtcacggtgcctgccctgaatgttctattttaaacaagaaaaccaaaccaaacccaacaacaaacccatccttcagagcttccctctgtccccaccattaacagtgccctcaaagtttcgggtggtcaggcccctgtgggcctcctccccaccaccttaccccttctttccctcttgcccacttcatccagccacacgcgggccccaggacactggcttacactgttctctctgccaggaaaaccctccctgggtaactccctctcatttcatagttcctcatcctcatcctccctcgggaggctcccagcactgacaggcctgcatttcatggactttgctcccaaggcctatttgggagcggcaatgtggcccagatcatggatggctgtcctgtcccagggaactattctgagaagctcccggcccgctcctcacacctcctgcttctcagaggctaataatgacagtgcctgaggaaaccgaggccagctgaccccgacgagcccaggctgggagtgcgcacagcagggcagtgggccttctgggctctttggtgggttctgagtcgccatcatctccggccacacaggccagctcacggtccccgctctactggcctggccactcgcagaaagagccactctcagtgggatttcctgggtaattctcaactcacctcaggggcgctcgtgtcacttatcagacacttgctctaggtctggtctggaccaggctcaggatgtaccaggccctgtcctcatgttgcccagggtttctccagtggtggctgtaaccacctgtatcagaaccaccagagcacataagaatgcagacacctgggctccaactcagacctactggatcaacccaggccccattgtgacccaggaatctgtgttttctacaggctgatctcagcactccatgaatctgagagccgctgctgactgggagggatagggagccgattacagtccagtgaggtcagggctgagaaaggacaggaaatgcaaccgtgagagcccagtactggcccctcacttgactgtggaaacctgtaagccgaggagacacctgaaccagattgggccgggcaaagtagggcaggagaggcagtacatcccacgcagcaaaacagcacatggtggccaggggcggtggctcacacctgtaatcccagcactttgggaggccgaggtgggcggatcacgaggtcaggagatcaagaccatcctgaccaacacggtgaaaccccgtctctacgaaaagtacgaaaattagccgggcgtgccactgcactccagcctgggcaacagagcgagactccgtctcaaaaaaaaaaaaaaaaaattagctgggcatggcggctcacgcttgtaatctcagcattttgggagccgaggcaggtggatcacctgaggccaggagttcgagaccagcctgcccaacatggtaagacccggtctctactaaaaatgcaaaaattagccggatgcggtggtgcgcgcctgtagtcacagctactcgggaggctgagacaggagaatcacttggacccaggaggctgagcaagatcgttccactgcactccagcctgggcctcagagcaagaccctgtctcaaaaaacaaacaaacagacaaaaacagcacatgctagcggcaggagacaagaggctgagccctcccagcccaccttacctgcactgtaatccaatccagccagagacagagtcgggtaggagaggtgaaggcgggtgggaaggtgtggctgttcacgcaggaatgtcttgggaaaactgaggggtaggtggaaaaccgacttcttgtttgaaatgctcccaagacgcctcattaagtagcatagacgtgactgaatcaataaatctttattaaatgaatgaaaggaggaaggagtccttaactgtagctaagcttccactcttaagtatcaattaagcttctctgttcagtccagcgtttagggcgcctactgcgcgccccgccccacacacttttgacaaaaaggtcgcctgctctgtgtgacttgccctttcgccggccagtatggggcagagggaaataagccccctctgctctctggtctcagtttactcgtaactgaaagtgggtcggttcaaaccccctggagctgaggttgcctctcctcttcgagcacgcgctatcggacgcgcaggtccccaagaccgcggatcggcagggggtaccagggaagccttcattcagggcgcaggtcccagccgaaccaaagctcccaccaaagttcaacacgcccccaaagccagcgcctgattggcccgccctgcccacaagctgaggcagcctcaccttctgattggctgttatgctccctgttcggtgctggaaccctccccttctctgattggccagatgcctacctgcgctcgccccagattgggcgccagctggggcggctcgttggctcccaggggccccgctctctgattcgccgctcgggccagcccccacggcctgcacgctgaatggctgcgccgctacctatattggcctccgattgggtgcacggcgcctccccggcgtgataggtcaggaccaccgcccccctggctccccattggctgctcgaagaagcccggtctccgggtaagatggcagcggacggacagtgctcgctccccgcttcatggcggccggtgaccctcacccacgtcgaatatcctgcaggtaaaaggcggtcccggctccaaggacgccttcccagggacggcctctcagtcccgggcgctccggcctgctcgagcccgcggagggggcgccgggggaccggggtgggaactgtcaaatagtgaaccacggaggggctcggccggcgcgcgcgccgcgcaggcgcagtggtgcgaggatgagctgggcgaaattgtgaggcgctcgctcgcgcactctgcggctgcgcggccagggcgctcccccgggtcccggggcgccggtgggctgaaatgggttgaggatctgtgtgaggcgagaaaagatccctggcctggaccttggcccttcttccccgccctcccctgtcccagagaggccgcactcctgttccagcgtgcagggagtgtcttgtttccttcgaacagtgctttgggctgcttgtaagagaaagagctccccgttgctgggagtgtgcaagccgaagccaggcttttgagtacttgtggtgccacgccctgagcagggcacgattccacaacagagaggacccgatgagggggcgggcagcctccgggaacttgacttctgttgcttcccatcagacacacctctcgaagtgcagggctttccagttgagaggtccattagcggcgttctggaggctgtctagtaagagtggcgcagagcctgggcgtgggggtcagacccatctgggctccagttgaggctgaggccttgtgcaggtgcctgcctctgcttaagttaattcatctctaaagtgggactgattacagtgcttaccttctggtgatggtatgagcatcaaatagcaggaggcacaagaagggctgagtacagtgcccggcatgcagtaagcgttcagtaaatacctgcagttaatgttatcccaccttgcaagaccctccctgggtaagatggttgagtg

SEQ ID NO: 12174 - DNA, 6000 bp, Homo sapiens
ggatgctgttaagatgtacccttcaggtgaacctggtatcagacccacagtacttgctgtttgagaaaaaataaaaacaaaaaggtcacctgttctccagcccttttctcttacctggtatttccttcctttctcctcccccaccccaaataaaaaaacaaaaaacactagaatttatttatatgtattgatgttgtaggtctaggtgaaaaaaaaagaagtaaatgtttcactgctctatttatatataatgtctgaattaattctgtgcaggaaaggccaggaaattgcatgtgaagttcggtgcagtcaccacctgtgtgtgacctgagctgcagtctcttcgctgagatgcaggttttaaatgagacttggggggctgagggcaggcctcaggcctcccagcgccccaacccctccttggtctaatgaaatgcagttcttagtgcagagatgttttaaggtgcaatatatctcttcctttcccgtggttttagagccaagctcaaggtagtaggacgtagggtcttattttgttttcaaacccccatcctcagagcgcagatacatgcagaggcttctgccaggataccacggggccttagtgggaacaggtggagaccagcacttccctttcctgctgctgaggtagggattggggggtcagaacccactcacttttgcctgttaaagttgccctcctgacgctggcagctctgccttggtcactggggatgcggctcgttgctcagccaccagtggccttgcggtattgtccaccatccactagagtgggatgaagtccagagtgtgggtatacatctcagatgcccatctacccactggggacttcaatgccagctgcatttggtttggttttcttaactgttggcttctccccacagcgttttttgtttttttttaaacattcatattgttttcaaacttggaattcatagacactctggctctaggttccttaagggggaaaacaaaagatgactttatttcacattcaagaaaatcagttcagttccaaagctgtggtccttccagccacttctagggacactggggaaccttgttaaacgttgacatcagtgctctccagccgtgctgtcaccctcctatcttctggatctgccttcgcgatggtcagtgacagcttctggaagctgagcacacacaggtgcacagccatgctgtggtctggcctgctacggcagcatggcagctctggtggagccttctcccttgccatttggttcccctgtgccaagtagctgcaggctgcccctcaaatcttcatttgtcccttttcacttcctgcagaacaagcctgggttagagggtctgctggaaatggcctttgaagaccaaggataccaggatgtgtgcactctgtcgtgttctgtgatgaatgggaaacgtaggcttccagaaagccagctctcttctgaaatgtgacggacctaagcaggaagtcatccaggacaggagtggctcagtgttggggatggacgctgtcgcccagccatgctccaccagggccaccaatgtgtagttggctggtggtcttcgggcatgtgagacctgctcttcactgtttccaccccacttggtggcctccaggatggtagtggcaccctcagagccccatcttcagcatgttctgaagcctcagagtggaaattcctgctaaggctctgtgtggacgcctttctcccgtgatctaaaggggacactgtactcaagcttttgacctcatgccttgtgtagtaaaaaaggatttgggggttttgtttggttcctgagagggttgtgttttgtttttgtttccttttgtttatgttttggcctttcctctttgtctttccatgtagaccagatatttgaaagggcagacgatggctagaggtgtaatgtgcagcttgtttatacggtattttgggaaacttaccttggatgggaaatcgaatcgtggattcaccaggccggtgctggcacactcaccctcgccctttccctccggttcagtacctattgtttctcctttcaaatatgtgattgtactagctctttccatatgaaagaattctccttatttaaataaaaaaagtttaaaaagataaagctgaacgtgctttctcaggttgtacatccctcgtttcttggtcatttgaccagagagacctacagatcaaagaattctaattttacagagttcacacggaaattaggagtggcacggctgaaatgccttaacagaagctgtgtgggtagagaagggattgaaacccgtggctaagaagcatcttccaaatgcggcagcatcaagcactccaccctcttcccacggatggcatctggttgtgcacagtgcctgcctgtggccccgtcacttgccgtgagaaacgagctggtcagaggaggtaagcatttgatgtggcgtgttgtgttgtcacttctagcggtgcttttgcaggaagtggaggaggattatgctgtgctttggggtggggagggagcaagccaggcctggggtagcgaagggtaaaaggtaagaatgggctgaggcagcagttctcggttttgccattgcctcactgacctggggaaagacgtttcaccacctgagtcagtctccttaatcataaaacacagattgtaatggtatcgacctcatggcgtagtgtggattcaaagtcaccagtagcttttagcttagtgcctagaaccagctaagaaaacttataaattacccccaagaaataaaacgctgtttccatgaggaaccccagtccctcaacttccttctaagccttttgactatggaagagagttggggacctggccatgggcatctcagctttaactagccacactcactgccctgatttactgctccctagggacaggtggctcacaaaatctcaaacggagaccagccctgaaagaggctagtcctaaggttgggggcttgcaagatggaggctgtaagtcctgaggcaccaccactgttagcatggcatgaaccaaagcttaacagcccagccccactccctcctggggcccagggaaccctccctgcccactgtaaatacagttgcctgcaggctctggccacaaacccaggtgagccccagctccttgcctctctgtgggatcttgggtgagtcacataacccctcaagggtaagccataaagaagtaaccacgaaattctaactggtgtcatctaatgctatgttgcccaacatggaaaaaaagtcttgcaggcagccaagaaccataatgaaggttattaaacctgcagtgtgcccttttggtctgtatagattaacatacaaatagaccaggagatcaagaaggagcgaggctgagaagagtgatccatcagcctggttgcgttgctgtcagttaccctgctctgggtgccgactgttcagggaaaacatgggaaggggtgcattgacccaaccaaaagtaccatgtctgctccaaagcaggcctttgggaaggctcttgaccctcagcagagggggctggagaggctgatggatgaggaggagccctgggaatggaggaagaagcctccagtcttctgccacggagtttaggggagatgcccccactggagcctctgatggtcatgcagcccccactgatgtccaggtttttttggttttgttttttgttttgagacggtctcactttgtagtccaggctggagtgcagtggtgagaccaaggctcactgcagcctcgacctctctgccccaagtgatctcctgcctcagcctcccttgtagctgggactgcaggcagacgccaaggggccccgctaatttttgtatttttttgtagagacggggtctcgctgtgttgcccaggctctcctggactcaagcgggctcacggatcctcccacctcggccacccaaagtgctggggttacaggcgtgagccaccgcccccggccctaggtccgttttaaatgcccttaccctcagccacttcaccgctagatgtatgtgcaagcaggatcgtggcatcgatgtttttcggcaaggaaactaggagcgcccgcgggcgtgggggcacgtgcctgtggtctcagctgctctggaggccgaggagggaggatcgcttcgggcagagaggtcgaggctgcagcaagccgtggtcctgccactgtactccagcctgggcgacagagcgagaccccgtgtcttaaaaaaaaaattaaggtcggacgcagtggctcacgcctgtaatcccagcactttgggaggccgaggtgggcggatcacttcaggtcaggagttcgagaccagcctggccaacatggtgaaaccctgtctctactacaaatacaaaaattaaccgggcgtggtggcgtgcgccttcaatctcagctactcgggaggctgaggcaggagaatcgcttgaacccgggaagcggaggttgcggtgagccgagatcgcgccattgcactccagcctgggcaacaagagcgaaactccgtctcaaaaaaaaagaaaagaaaagaaaagaaaaaaactaggagcaaactggcgcgcccggcagaacgccgttgtgcagacgcagaattaagatcttcacgccagatggagtgaaaaagcaaggagcagaagatgggtgggagcccactgcgctttttaaaatctgcacgtctgcttagagtacacagaaatcctggcacacaaaacagtagcacccgagagaggggaggtcgccgcgtttcacacctgcctctcctccgggaccggcgccctcgcccgctgcgcacgcgcgtcaccctctcccagtgcgcacgcgcgctgctgcccgtctggccccgcaggctcggtgaatcgaacgttgagcagggcggtgggtggtgcggagtgccgagcggcctcacccccaaccgtcggcccagtcggacggttccgaggcgttgccgggagccgggcgcggctctgtgtggactcggagaaacgcgggtacatttggggacaccggggacgagagcccagcccggacttgggggagtccgtcagtgccggacgcgggtccctggcttgcggacgggctggggccgggggcgtccccgtctttccggagctgggggcggggttcgggcccgggcagatgcggcgttcgggcggccgagccccgaagtaagaactccgtggcgcgtgcagccctagggaggaagggcgtgctgcgggtgcagtctcagggtgaggacggagctggggccgacgcagcctcgggagttggtggacgggacaggtgcggcctgtggggaagaagggccggccagggagatgcggtctgcaaggggagaggaggcactcccaggacagatgggaccttttgggacgaaggcgctcaaggcagatgcagctcagggagggaagggcgcgtccagggtagatggggcctgaggagaccagcggggcgccaacggccagatgcggctttggtgtgagacagggtgtcccaggcctgatgcagcctcaagagaagcggagctcaagggaagatgaagcctggaggagaacgtgggggcgcagggtgcaaatgcaccctccaggcgagaaagggagcacccggggatgatgtgccgctgggatagaaggcagggaggcactgggggcagatgcatccttgaggagagatgaggaggccccgaggctcggccaggttggggtccctgggctgtaagcagctgagatggcacccaggagctgcccagggtcaggtagctgtggccgcactgtgggcttctggtcgtcggggagggaggggagaaaccctggcgttccttagcagtgttctcgcgcccaagacgtgctcggcaggttttgtggaatgagttgttgaaaggagtgaatgtccagtcctgagatcccctgaattcccacccgagttcactgctagtgcccctcaccccacatgtctacctgaaccaaggctccaggaacttcg

SEQ ID NO: 12175 - DNA, 6000 bp, Homo sapiens
ggacccagacttgaattatggctcctcccacctatatgacccatgcaaggtgccctctctgagcctcagttttctcatctgtggaatggagacacttaactgcctcccagcttgtacaaggattatattggatcactcctggcctgtggttaccactgtccttgtcaccttctggcagggtcagctgtgactcctcctcccctctcttggcagtgctctgtttcctgtggggatggcatccagcgccggcgtgacacctgcctcggaccccaggcccaggcgcctgtgccagctgatttctgccagcacttgcccaagccggtgactgtgcgtggctgctgggctgggccctgtgtgggacagggtacgcccagcctggtgccccacgaagaagccgctgctccaggacggaccacagccacccctgctggtgcctccctggagtggtcccaggcccggggcctgctcttctccccggctccccagcctcggcggctcctgcccgggccccaggaaaactcagtgcagtccagttatgtcctgtcctccttcctgtcaggcagctgctgcaggaggggtgggcaaaggcatcttcctctgggaaggactggcacaagcacttggtccctgggttgtgtgcctgggaggccgggatcagggctggccctctttctccctggcaaagcaaaacctcccttttactactatcaaggggaagtaacttgaaggtaggaacccagcttgtgagccccctagcctctgggctgctctgcatgtgccccctcttgctggatcatctggtagcagccctgtgccctgagggtgatgctctgacctatgcagcccccctccctgtcctgagaaggcttccagctgggccttggaggacagggtccacccctacctcctggtctccttcctcagcttggaagccccggagcctgccctgctgggaatcggggaagcactgcttacctgtctcctgctcccttttcaggtgcctgtggcaggcagcaccttgagccaacaggaaccattgacatgcgaggcccagggcaggcagactgtgcagtggccattgggcggcccctcggggaggtggtgaccctccgcgtccttgagagttctctcaactgcagtgcgggtatgtctagggccatgcaagcgatgctgccagttatgggccctgccaggagccagcacgacgctgcatgccccattcctggcaggagcccatgtgcattcccacctgtagtttgcatcccatctcatgactggggagtgatgatctgcattttacagatgaggaaactgaggctaggagagattaagtgatgtgcccagttacttagagtcacatagccagcagtgggagaggtgggacttgaactcggctcagtctaccctggagccactcctctgctgaccaggcgtgggagtgctggaccctcactgccctgccgcttcctaggggacatgttgctgctttggggccggctcacctggaggaagatgtgcaggaagctgttggacatgactttcagctccaagaccaacacgctggtggtgaggcagcgctgcgggcggccaggaggtggggtgctgctgcggtatgggagccagcttgctcctgaaaccttctacagaggtatggccaggccttctccacctcccttgggtgctccagtcctggcagggaggctgggtgggtgctgctggggatggggccagtcccagtggggcagtgggaagatacggagggaactgactgagatggaaggaactggggttggccagtgtcagtctgcacgtgccagggaggggtcacaggatgaatgctatatccctcctttttgggaccgtgcagcaagatggacggatgtgggacatggtccacatcctcagtcagtccctcaggcctctgccccacacccacctgccccgcccccacccctccagcctttcaagggcttttagggttttgtggaagccactgtccctcagccctgtttcagtgcactggtgtaagcagacatgcttgtacatgcatgtgcacccacaagcacacctcaggcagaggatgccacctcagggactccagccttgcccgtggccccctcgatatcctctgatagccctctcggttgtcctggggggcttgccctctcccaacagcccgagctggccgaagttggcttccctagctggttccagaggttcctcggctcccccaggtgtctggggcttagtggcaacaggggcttagcctctgcagagacctagtgcgccgcctccttgccccagacctgcccgggcagagagccgtgtatgtgtcccagtgcacaggcgctgctgggccctgccaaaaggccacaagcccactgtcaccgttcacattgcttctcgcttcccggcccagccccgcccacacaggcatctgccttgaaagaggtgcaggaggtacaggcaggtgggggctccagtgagctctgaggaacagcagtggccgccatgggtggagcctatctttgttgccagtttcagtgttaaacactcttgcacgtgtgacatcattgagtcctaaagaccactctgctcagtgcatgccattgtttccttcagttacagaggagggaaccagagcccagaacatttagcctttgcctaaagtcactgggccaggaagtggtagaggtggggttcagcaggatttgcctgggaaccccaatattgaccacagtgccatgctgccctgcacggctccctggctgtgagttgtcctggcctctggcaccaccggtctgtctgggttcctatgtccctatgtcccacctgcagaatgtgacatgcagctctttgggccctggggtgaaatcgtgagcccctcgctgagtccagccacgagtaatgcagggggctgccggctcttcattaatgtggctccgcacgcacggattgccatccatgccctggccaccaacatgggcgctgggaccgagggagccaatgccagctacatcttggtgaggcccagcatggggacttgtgctgtgattctggacagctttccctagggcgtgcagggctaggggacccccttcagtttatttcagactaaaaccctcaaaatcattagtgaaagaatgggagaagatagcttcctccacatattcaccaagaaatgttttttgagctacctacaagagtgaaatagtggctcacaactgtaatcccagcactttgggaggcccaggagggcagatcactcaaggtcaggagttcgagaccagcctggccaacatgatgaaaccttgtctctactaaaaatagaaaaagtagccaggcatggtggcgtgtgcctgtaatcccagctacttgggaggctgaggcacaagaatcacttgaacccgggaggtggaggttgcactaagcccagatcgcaccactgcactccagcctgggcaacagagtgagactctgtctcaaaaaaaaaaaaaaaaaaaaagcgaaatggtaaagaatggtaaagacctttctgatgtagactgacagctaacccaagactgaagcataattttacagtctgatataacttggacagaatagcaccctgcaccctccccgaggtttcaagtgtcctgggagaactgtgttctgcagggtatcagcttccccagaggaggcagcctggccccgctctggcaccctgactgtgtgtccttggggaagtgatgtaacgtccctggacctcggttttctgggtagagtaatggcgtattcctagtagggctttgtaagcattaaatgtgatccggaatctgtgagcccttgcacacgaaggcttccgtgagtgctaattattacttgtggccggtccttctgggctgccccttttctctcagatccgggacacccacagcttgaggaccacagcgttccatgggcagcaggtgctctactgggagtcagagagcagccaggctgagatggagttcagcgagggcttcctgaaggctcaggccagcctgcggggccagtactggaccctccaatcatgggtaccggagatgcaggaccctcagtcctggaagggaaaggaaggaacctgagggtcattgaacatttgttccgtgtctggccagccctggagggttgacccctggtctcagtgctttccaattcgaactttttccaatcttaggtatctactttagagtcttctccaatgtccaaaaggctagggggttggaggtggggactctggaaaagcagcccccatttcctcgggtaccaataaataaaacatgcaggctgaccggcgtttttttcttataagctgtccagacctggcttgaaaacccatcccatggcaaggcagggattcgctggccgcggttggctctatcttgatctgagcaagccgctggacgtccctagttatcttcttcctatccaggaagaaaatccaatcaggattccactccgaggatggcgcattagccagctccctgcgaagccccacccgtgtgtcctggtgtgaggctctgaccgctaaggtgtctgcgcgcctccaggccccgccccctatgctaataagcgcccgcctcctttgggagcaagtcgccgcaaactgcgagcccccgccccctacgctaatgacgcccgcccccctcgggcacacctctccgatgcctgcgagccccgccccgtatgctaacgagctccccacccccagctcctcgccgcagcctgcgggtcccgccccctacaataatgagcacctacctcccctcaaacgcccctagtcgcggcatgagggtcccgctcactatgttaatgagcacccgcctcccttcgggcgcgcctcgccgcagcctgaaagccccgccccctatgctaatatgctccctctcccacaaggcagcgcgccggctcggacgcggccggctaccgagccctttgtgagggctgtgagctgcgcctgacggtggcaccatgagcagctcaggtggggcgcccggggcgtccgccagctctgcgccgcccgcgcaggaagagggcatgacgtggtggtaccgctggctgtgtcgcctgtctggggtgctgggggcagtctgtgagtatccagtcggggagaggggccggccccgccgcgcatgcgctcctcgccctgccctgccccgccccgccccggcggccccaggggaaaggacccgctgggggtcgggggtctgccgggcgcctcccggggcggaggaatggcggggccgccgggagccggcgtcctggggttgccatggttacccgctcgggcctgggcgccttggtaccccgggctgggctgggctggcgcttctgggaacattcccggagggaccagaaaccccagggcgggggggcggcgggggcgggggtggggcaccggcctggggcacgtgactgagccctccccccgctccccaggggcttttgtgagactttctcggtgatgctcacggggcgcatgcccacctggcccgtactaaagcgtcaactgttgacttgggcgtaggtgacggcagccacattgctaacctttgggcaaggattgtttgtaagggaggcgggtgcacggctggctagatttctggcaggaagccactgggcggaagtttgctgagggtcaggtggtgtcagggcacaggtggcccctggggccgcggggcagtgagctgagggcccggcctctccctgggtcctctgtccgctctcatatctcccccgttgctgctgccttagccgcctgtcaccggccttcctccccttctccgcacgcatcccagtcacagaccctgaccttaggctgccagggaagctaggctcttaagcacagccagaaaaggacaaagagggaggcaggtcagctccaggagtgaatggaagccgtacagctggccttccagggaaagacaagtctgtctgagtgataccctttcctttcctgtctgccctcaatcttgt

SEQ ID NO: 12176 - DNA, 6000 bp, Homo sapiens
ctcaggatctcagagctggggtggaggaggtgggcagctgccccagaccgactggagctttgggacccaggccccacacccacctctacatggagcctctgctctagggagcttcctgattttgcagacaggaacgccatgggatgaggaaaagacaagcatctaaatctgtcagcagtgaggtgtgttggtgtcacgggctgtggcctccctctacctgaacctcagccaaccccaaaggggtggacacaatgaagaactcggagcaacctcctcgaggggcccgagtggatgccagattccccaaaatccagaactagagccaaagagctaggagcttgggttgcagaagcaaatataaatattaaaagtacggacaagatacaaataatacaagcagtacagattgagaggagggacagggtggccagagaaagaggagctgaatattacccaggctttcaaaagaggaagtgggcgttattgtcaaaaacgggaccacgggatagagaatgtctaattccaaacagttaacggtcttcatagacttttccttctcaatcttagaaggttcttctaggaaacaatgcctcgcatggtgaagataaacgcgcttgaagtcagcagcatcttcggcttgactttgttccccttccttctttacgttgcagttcaatctaatatttctgggctgcaaagcctgggaaggatgatgtcatcttttacaccagcatttgcccatccttcctatttctttctagccattgccacgtgccaggcacagttctaaatatttggcacggctgtggctccctgacgccactcagctgggcactgaggtggggctgccatcatcaatccacccccagggagataaatggggcccggagagggtgactggcccagggcctcaacagctcccaagaggggggctctggcttggcacccaggccatttggtcttagaggccaccctcttacgtttgcacattttgcatttcctgatcacgtgcacagaggaatgcctgcagagcagccccatggtcaacactggctattctgggtagggggctttcgttacttttacattcttctttgtattttatctttttaaagaaatacaataataagtctgtatttttttttaaaaaaaaaacagctttattaagatatagtttacaggtggtggctcatgcctgtaatcccagcactttgggaggccgaggcgggcggatcacgaggtcaggagatcgagaccatcctggctaacatggcgaaaccccgtctctactaaaaatacaaaaaattagctgggcgtggtggcgggcgcctgtagtcccaactactcggggggctgaggctggagaatggcatgaacctgggaggcggagcttgcagtgagctgagatcgatccactgcactccagcctgggcgacagagcgagactccgtctcaaaaaaaaaaaaaaaaaaaaaaatatatatatatatatgttttacataccatacaattcactcacttaaggtgtacaattcaatggttttggtatattatattactatatttttaaaactgtggttacatatgcataacataaaatttaccattttacccatgaagtgcacaagtttgtggcactgatgacattcaccatattgtgccaccgtcaccactgtcgacttccaaaactttgtcattattccaggcttaaacttgtacccactcaccaatcatgtcccaacctccttccccttagcccctggtaaccactaatctacttcccagctctgtgaatgtgactactctagggaccccataaaagcagaatcctgcagtacttgtccgtcagtgaccggcttattttgctgaggataatgtcttcaagcttcatctgtgttgtagcatgtgttggaatttcccttctcttcatcgctggtaacagttcattggatggagcacatctgtctgttgatgcatctgttgatggacacaggggttgttcccacttttttgtttgtttgcttatttgttttattaagatggtgtctcgttctgtcccccaggctggagtgcaatggcgtgatctcggctcactgcaacctccgcctccctggttcaagcgattctcctgcctcagcctcctgactaggcgggactacaggtgcccatcaccacacctggctaattttcgtatttttagtagatactgggtttcaccatgttggcctggctggtctcaaagtactgacctcaggtgatccacccgcctcggcctcccaaagtgctgggattacaagcgtgagacaccacgccctgtctgttcccactttttggctgttatgaataatgctgccatgaacgtaggcgtgtacatatccgctccagtccctgctttctcttcccttgggtgtgtactcagaagtggaattgctgggtcacctggtgtgtaactttaaaaataaaaaccatccttgctaaaattggatctgaggcctcagtccactcaaggaaatcaatgcagccttcctccccagcccacaggaacaaaaccccaaagacgggggtcgcactccagctctatggccatgtcacaggtctcccagagcccagacatttattagcggccacttggagcatcaatgtgaaggctgaaggagaaacttgggtcgaggcctggggtgctgcgcgtgccccatgcacgtagagttcttaagcatatagagtgtgtttattcctgcactggatctcctcagtagccccgagacctgcagtatatggaccattcattcccattcgacagatgtggggactgaggctcagacagccactacccggagatcccttcagctccaaacacagggtccactccggcccctggctgcctctctcaacgatccccaaggggcttacaaacagctttcctccattctaggacaacaaagacactgggggtagtaacatgaggggggcagagagaaaagaagcctccacagctgcaccccccccccaatttcttcccagcaccatctcctcacagagtcttgggggccaccctgcctcaggggccgtggcatatcaccaggaatgccactgcttaaactcgtctgaggctgggaagcccacccagaccaacaggcgggccctctggcttccctggagggagctctgtccccagcactcagagaacagagtccccacagcaaaggccctcagggtgcaacggccgtgtcggagggccccttcccatcttctcttcttcagcacatgtgcccagctcctgcacccaatgcccaggggatgcctcccagatgccagcagcatggtgacaggggcaggaggtggcattgtccttgttctggatatccctgggtgaccccggtacgtgactcccctgaactccagcggcctcatctgtgacacagggggccgggccacatcatcctgggcagtgctgctctctgcaattattgagtctggagtctcttcttgtcagagattctctttagggagtttattttccatagactaaagactaaacaatagagaacagagagaggcttctagatacctactgcaaccttagcttctcagaaaatacaggtgcttgggactcttccacaaaatcaggaatttaaatggaaaacgtgggccccaagacagctcctttagtcaacgggtctgagtacacattaaaggagggtggagggagaggggacatagagagggaggaaaggggaggagggcaccaggaagggcggagccaagggagtcctgggggtggatacgcacctgcctgtaaggggccctgtggtcctggcacgtgcctataagaggccctgtcatcgtgtgttaggttgtgacacagctctgccctccccaggtgccttttctgaaccaggaacctaagaggagctctcccaccagggccagggaaggagggcaccaggacgggcagagccaagggggttctggaagtccccggccctggtgggagagctcctctcttaggttcctggttcagaaaaggcacctggggagggcagagctgtgtcacaacctaacacacgatgacagggccccttacaggcacgtcgtatccacccccaggagcacacagacagactctcgtccacatgccctgtctggggacaggagcccagcacccaatgcttgttcctgcttccacccctttgctgacctccccactcatcagggctgcgtgccaggtgaccagggttctaaccctggcttcctccctgacccctcctcctggaaacatccttcctgacccagcctcagtttacctcattgaagggtgaattttaaggacccattcagcttttatctcctgtcactccatagacatcaagacttaacatcccatccctcccactcccagctgtcattccccccccccaatcttcggcccactccctgtccaggggcccaggtccccagcgcgggcaacccctctgtccccattcccgggacctggagcccgcgagggctcaggccggccaggatggagttctctatcccagttcaatttcccccgcctttttgatgtcacatcctgtcccagcctgcttccccgccggccgccgccctcctccccgggagagagcgaggcgcgcgggtccctctgcgccacccccgcccccgccccttccgagcaaacttttggcacccaccgcagcccagcgcgcgttcgtgctccgcagggcgcgcctctctccgccaatgccaggcgcgcgggggagccattaggaggcgaggagagaggagggcgcagctcccgcccagcccagccctgcccagccctgcccggaggcagacgcgccggaaccgggacgcgataaatatgcagagcggaggcttcgcgcagcagagcccgcgcgccgcccgctccgggtgctgaatccaggcgtggggacacgagccaggcgccgccgccggagccagcggagccggggccagagccggagcgcgtccgcgtccacgcagccgccggccggccagcacccagggccctgcatgccaggtcgttggaggtggcagcgagacatgcacccggcccggaagctcctcagcctcctcttcctcatcctgatgggcactgaactcactcaagtacgtgcatccaacgccattttcctccctgccaggcgcccggcccggcccctcgggagccccacaaagtccgggaacggctctggctccgcgccgccccgcgcccccggcctgggcgcccgaagtgccggggttggggagggggccagggcgctaggctggacctgggtgggagggaggggtgcaggctgaccggagacggcgctcctccagccccggctcagcagagctgacagctgccccctttttcctaggactccgctgcccccgactccctgctgagaagttcaaagggcagcacgagggggtctttggctgctattgtcatctggagggggaagagtgagagccggatagccaagaccccaggcattttcagaggtggcgggaccttagtcctacccccaacacacacccctgagtggctcatcctccctttgggcataacgctgcccttgggggctccagaaacaggcggtggggattgtgccgctgagacctggaagggcagccagcgtgccggccagctgtgtgcattgctggcttaatatgcagggcttggggggctgtggccacatgcccggcaggaggtgagtgaggagccctgtggcgtgctggtgtggggatcgtgggcatttcaaacgggcttgtcgtaccctgaacaatgtatcaatagagaaaggtctctgcttggtattctccattttaaagatgcatattggagctggcaggtcttgggggaggagaagggctgtctgtgagcgccgaactgggagggttgctttggcactatggtgctcggaagagcctgccagccgagggagccgggctgcttgggagtgacattaaaatgccctttcaatgatgcca

SEQ ID NO: 12177 - DNA, 6000 bp, Homo sapiens; identical to SEQ ID NO: 1448

SEQ ID NO: 12178 - DNA, 6000 bp, Homo sapiens
ggtggagacggcacagctctacctcggttaaccaatggggtcggtggtttaaatttgcagaagactttccaagatatgggttggggtggggtgaggcatccagaggcctttgcaggtcctgggagggcatggggatgagacagcccaggtctgagcccagtgtggggccagtcaggccttggtgggggccttgcggagggaggacaccggcctctgctacctccctgacctcggctgcccttgcccctttctctggtcaggtcagacctgtgcgtgacaggagggtcccctgctggcctagggtcttgagtgtggtcttgggtggccttgcagtgtgtgtctgctcctggccctggaagcctttctgtccccacccctccctgactccaggcagacctgggatcgcacctggggactgtggctcttggtgtggccagaggggctgtgacccgccaaaaggtgggtacttggccattgtcccctgctcgtctccagggtttagaagtgtacctgcaaggccgggagttccagtccccgctcatcctggatgaagaccaggccagggagccgcagctgcaggagtcctgacccgcccagactgtccccagactcccccgagacctgccagccccggcatcctggaagtcccgactccccccagacctgccagccccggcgtcctggagctgggggctacagcccagcctgagctctgggtgggaaagcagcctgccccatgcttccagcctgcagaacacagaatgaaacatgctggtagactccacgagggcagggcctctcctgtcgcctctggacacaagtggcgacagcctgctgggggctctgtggctccattcctggctgtggggtctagtcaagaggcagagggacttgggacctgggagaatggggctgagaggaggcttcgggttggggcccaagggaggtgtggtgtcatctggggagaacaggagggcatgtccctttgggagcccgccttgtggatccaccacaccccaccgagcactagaagctgcataagctacacaggatgtgcttctgcagcctacagatgcagaaccagaatgagggggacaattccacccactcgagggctgccccctcttccttagcagacgaaccagtaatgggggcaaggctggggcatcccagcccacacaccctggatgcccagcaaggccacagaaagagcctgatgtccatgatccaggtggctctgagaagcttggcctggacacctgagcctgcggccggtactcctgccttctccccatctatccccaaggcctctgcctctcagcctcttccatggtcggtttaggctgctgagttttctgtgcttccccaagaaccagtgggatcaatgccggcggcctctgtgatggttgctgactaatccgggatttcatgagtcagaggcaccacccctcaccccagctgcctgctgcttctgacggatcttggtgctcaggctgcctggctctccgagtgaggacgcagcctccatatttggtgcactcaggcatggctgggacaagccagctgccccagggttcttcccctggtgattctcgcctgctttctcatctcaggggaggcagtggcacctccctctccctgctgacatgaagagagctatgatatgccactgctgccaactcatcctctgcccccacctcgaaacccacagtccccagtggagggccactactcatccccattggtttcccaggggaggggtgttgtctggaagggcaggttcagatgcagccttccagatttagaggcactgggaggacagtggctgagtggaggcgcccagacctgggcaggcagcaggctcaggcccacaccttgtgatttttgaaaccaaagcccagaagatgatgtttacttctctctccctggctctgcccttcttactgcaaaccatgctgtgccttagggcccttctcatagctgttcctcatggccatgactggaacagggatgcaacctctttctacacaagcacagttagttgggtgaagtctttttttttgtttgttttagacggagtttcactcttgttgcccaggctggagtgaagtggcgtgaccttggctcactgcaacctccaggccagcctcagcctccctagtagctgggactacaggcacccactaccacgcctggctaattctttgtatttttagtagagatggggtttgaccgtgttagccaggatggtctcgatctcctgacctcgtgatccacccacctcggcctcccaaagtgctgggattataggtgtgagccaccgcgccgggccggttgctggcatcttaatgttctgtaggtggaatatttccaataaacacaaggtgccgtaattgactgctactctggcaagtgcagtttttgggcagtgcacgggtgttgggaacaaggatcaggtgttcacagctgtgtcccagggctggagctcactgggggcccccttagggacaggagttcacacatgaaggccaagactacttggggtgccaaggaatccccccgcggtcccatcccactcttcaccagggtctcaggagggcctgagacaacctgcggtcaggaacctcggggcgctctccagggcaggcttctgcatgctcagctctgacagcctggagactcgctctcctgcacctgcatccttgagatgccaaggtttccctgctaaccacgtgaggatgcttggggtactccagggactgacaagagtgagtggtgtcaacctaaagagaaactcaggctctccagaataaatgaatttaatcaagaataacacataattgcaatgcagagtatgcaagcctcagtgggtcacaggcatgtggtgggggggtggggtggggattgaggaaagggggaattttttttttttgagactggatctcactctgttgcccaggctggagtgcagtggtgcaatcatggctcactgcagcctcgacctcctggggcttaggtggtcttcccacctcagcctccagagtagctgggaccacaggtgcacaccaccacactggactcatttttttattttttgtagagacaggggtttcaccatgttgcccaggttggactcctgagctcaggggatctgcccaccttggcctccaaaagtgctgggattactacaggcatgagtcactgtgccccgcccacgggaaatttcttttttttttttttttttttttttgagacagagtcttgctctgttgcccaggctggagtgcagtggtgccatctcggctcactgcaacctccacctcctgggttcaaggaattctcctgcctaagcctcccgtgtagctgggactacaggtgcctgccaccaaccatgccctgctaatttttttgtgttttttgtagagacgggtgtctcaccatgttggccaggctagtcttgaactcctgacctcaagtgatccacctgcctcggcctcccaaagtcctgggattacagaagccaccgcgcctggccccaaggggaatcttttaaaaaagagaagttcccataaactgctttgaaaccataaagaccaaaggttagaagggtttgccgcaggcgctccgttgctaatgtttttgtgagggcttcttcagggcctcttgttagagtgtgacataaacgacttcatttgggtaccagcaagtgtcacagggggcagagaccagcagaaacctaaagatgacccctagaagagcaggaggccaggggaacagagttagacgagccacgtgctaagcaggacgtcgctgccgggggagctctccagacacgcagaaatgccacagtcaggaccgtgggacgcagcggattcgcccaagggcaggagcagcctggccaggagagaatgaaggaggggccgggcgtgaggttcggctggggagaacccaggcagggagggcctcgggcggccacggacgccgctttgccattttgggcgtttctggggaggacaacgcgtgcaggaagcgcagtcatctcaagctgacctccaaggttaccgagttcgagggctgggagccgggtctgaaagccccgacccgcctatggcgcggggactgtgggtccagccggccgattggccgcctcgctcggcgccggtccaggcgcagcgctcgggccccggggaccgtgagatgcggcgcagccagcttagctcggggtagcagccaccccagcccgggtgccgcccggcctggtccgcgacttcgggagggtccggtccttcccccggcccccacgcctgggtgaggccctgggcttcttgccggtgaccacgcggccagggtgggcaccagcccaggacggcgcccaagggcagcccagctccatccccgcgccgcgggttccggaaccgaggcgcgggacgctgggactctctgccaacatggcggccccgcccgggcgcctccccgggtccctagtgtctgcgtctcccgtgagggcgtgggcaaagtcggtgcagccagacgacaggaggcgagagaagcccagctccaggcccatgaggcgaaccacgtgggagccccagacagcgaccacgccccaggcgaaccaaggcccgccccgttgctacagctacgctcgtagcacacctgggcaggcgctgccggacgcatgcgcaatgaacctgagggcagggcggagtcgcagcagttgtctgacgcagtcgccgtaggacgcagccccgtacgctggagcgcagcggagacaggcgcgggcgcactggccgcatagagacgcagcgcacgcgcagtcgcgtatccgtgtgatgggcgggctgttgacggcgctgcgatggctgcctgcgagggcaggagaagcggagctctcggttcctctcagtcggacttcctgacgccgccagtgggcggggccccttgggccgtcgccaccactgtagtcatgtacccaccgccgccgccgccgcctcatcgggacttcatctcggtgacgctgagctttggcgagaactatgacaacagcaagagttggcggcggcgctcgtgctggagggtgagggtcgcgccgggctgactggggcccggggctgccgtgcccgccgccctcccagactgcggctccgagcgggacctgggcgggcggactcgactccccaggcgccgccctctccaccccttccccgcaaaaaggggcaaatgtgcgttcctggttggggcagccgtgggcggctcgcctgcagcggtctcagcggcccaaattctgcggggcggtggtgggaagagggctcagagccccagcaggttttctgggcttcgttcgcttttctgcaaggtcctggcccaggcgcctgcccctcttggagcggaaaccggaggttccccgtggtgtatgctcccctcggtacagtgagaaatgagcccctcttgattggctcctggtctgttcgtggtggtctcaggccgaagggcattgataaccacatgcggactgtgcatcgcctgggcggtgcctgggctacatctgtgggagtcgcaggagtctttctccactgttgatgaaatgtgacagaaatgtttctgcttttttcttatcctcgtctcatctgcaccactgtattaacgacatctgtagtattgtcccagcaatgttcctactccctgctgagagggaacttctccccattcaaaataaatagagctggccgggcacggtggctcatcccgcgttccacccactacactccagcctaggtgtaacagaatgagaccctgtttccaaaaaaaaaaagaaatagagctgaacactggatcttccagaagaattccttattgtcctcacagtttgtgacagttgagacgttccgtgtgatatattcagtaagaaatgtcattctctgtacctcccttagaaatggaagcaactgtcgagattgcagcggaatatgattctcttcctccttgcctttctgcttttct

SEQ ID NO: 12179 - DNA, 6000 bp, Homo sapiens
cctccgcccgcggggcgcggggatgacatcgcccaccactgctgctgctgcccctgctgccactgctgccactgcccccccttctgccgctgccacagctgctgctgctgtgtcatctcctagcccagcccaccctgccagggccaggacccagacttcagcaaatgtggctcacacagtgccgggacatgccgggacatgcggggtggctgttgtcatgggcgtctgccccttcacaccaggcactggggctcagacccaccaggaaggtggccgttcagcccgagctcctgaaacggaatcccaggtcctggctggagagggacacccctgattaccttaaggcccaggcaataaagcagggtgatcttcctcccagcaattcttctttgctgcaggctcctttgggagggggttgtagctggacacagggcatctgcccctttatgtggacccgagaacacacacacacagtcactgtggacactgcaaggacagggatgccactgcctcatgacgtccacactttcccctggcctgcaagtcccgggtctgcccagagactgcacgagggcttgcagcgtgtccacagccctagctgagccaggtctggatttgagctgacctgcgctccctggggccgagactgagactgtgagctggggtcagtccatgggtcggacagcaggaggatacagcgcatggaactggggggaccccaggaaaggcctccaagagaaggagcgtgtcgacaagagggtggtgggtgcagcaggtgctgcaggtttcagggagtggaaggttgggacaggagagcccagacagccaggaccacgccctgcccactggtgattcacctcccaacctcagctgggatgtttttctagtttcccaggaaatatctaattcctgcacacctcctgtcctgcctcggggcctgggcttccgggaggaggtggcctggaccaggccttgaggatgaggcaggaggaggctggggccgtgggtgctgggccgtctcctggtctgctgagcagggtgggggcctctctggggctgagcaccaggcgctaggctgctctgcgcaggtactgcctcaccactgtaagccaggatgccaggcagggagtgagcattgaggccagcttggggcgccctggtgttccgggcagggcagagacaaggcgaggaggtggcagccgagctggccacgcaggacagacgggtcctcacgccatgccagcccttccctgacgcatggtgaccagctccacagcagggcagggcaggcgcgtggcatgcagaggtctccaggcgtgggacagatgggtcactgccctgaccctgtgccaggacttagcgtgccaggctccccgccttgccccgttgctggcccccaccagagggtgaccacacccaggccagccacgagaacttgtctgaccagtcctgggggcagactgccaagaaggtgggcaggggtgaggaggggccatttgcttccacccagcggggctgtgagtggttctggggtcctgcccacctgtcccaacccttcttggtccctcaactctgctctgcctgcagtctggtgtggacacactgatcatacctcccggaacctgggcctcccagggtggcctggaggctgcagacgggcagagcagccaggagctgcccaccaaggaggcgtctggcactgtctggggtcccgagctgggagcggggatccccagacacggagctggtgcgccacctggagtccatgtggactggtgcagccctctgccgtccagccggcatcaaggtgaggctgagaagccacacagatccacagacaagcacagtggcaaagtctgcagaaggctctgagccaggagggaaccctggcaggcttcctagaggaggagatgtgagcagaggccaaggcaggaaaacattccagtatggaggggaggttaagggaaggagagggtaagagtgagggagcggagggaaggggaggggagggggagggggagggtgggggaggggagaggtgagggaggttttgagtgtggcgaagggtgtgagcgtgctgagaagccctaagagtggggaaatggaccccaaggccagcctggataaggtgttagcagaagctggctgggtctggacaggagggggtgggcagggggcggggggcaccttatctcttgcaagtgggtggtgccgttagatctagtttcaaggctttgtggctgaaacgggagcccacgcccgccacagctggccacctgcctctctcctgactcccgtgcaaggccagtaatgcaacccaggagggagccgcagggcgccctgggtcccccactcccttctccggccaccccgtggctgtgcatagctgcccagcagagcccatgcaggtaagaggcctgggctcaggtcggccaggagggtgggggcctggagctgggccagggtggtgctgcgggaacaggaggctgcccggctggtgcccacatgaaccagaagtgtgcagaccctggttctgcctgtgcccggtgccacgctccctcccaggtctgcacgcaccacccccacagacccagcgcctgacctctggggtgggctcctggggccagcaccccatccaggcggaaggtcctcgaggcaggctgtccaccgctggcttccctctggcaggatgctgcagccggagggcccccaggcctcggaggaggggggcccccggaggagaggacagactgcatcatctgctgctcggcctatgacctctccgggcacctgccccgccgcctctactgtggacacaccttctgccaggcgtgtgtgcggcggctggacacaccggcgcccgagcagcgctggatcccctgtccgcagtgccgtcagagcacgcccacgcctcgcggaggggtggccatgctagacctggacctggctgctttcctggcggtcaaggctgagcgggagccggcaagactagaacccctgcccctcacctccctcaaaggcagcgccatcactcggcagccagctgggctgtgccctgccctgggaccccagccccacttcccccagcccagatactgctgctggggctgtggcagcctctgctgcccacccctaggcagccccgaggtctgaactctggccattcccacccctgcaggggaaatgcctgccttggaacccctgaccacacaccatcatgggttcagcccactcagaacaacctggcagtagcatcctatacgcagcttcgtgtggcccagcagggtggtgtcatcccagccgtgaacatcccaggccacagcctaaggttgggggctgggaggctccgcaggaggctggtgacctcccacctgtcctggccacaattaccagaccccagactagcccgaccggatgtgcctggtgaggacactgctgtctgagtgggcggcaagcctggcttgggcctagacgcagcgcaaaggatggctcccaagaggatgcgaaggcgtcccgggggcctgggctgcaggctggaggggcagggccggtctggctatgcctggcgggctgcccagagcaggtctcccctctcccacagacgtccccggggtgtaccgggagggtggcaagactacctccttcctccctgccctgcatggcagccctgtgaattcacccactcaacaaagctcatggagttcccactgtgtgtcgggtgcggttctgggagggtctcgtgtaggcacgaagccatacaggcattgaaggggatgcctcggcggggcctgcctgaggccaacagagggctggggcctgcttgaggtctcacagcccagttggtctcatccttcgctgaacctttcctggctccgagcagccaccacacagacccttttgaggggccggggctggggctggggccagactgtggacagcagttaccaccaagtcagtgctgcaacacccccacccccactggaacgagctgtcactcaggagccccagggaaggactgctgccccccacccccagagcaagggcgcaggagggagacggaagagaatttgctgagcggacactcagaagcttctaccttctccagggcaaagtccccatgcacacagcgggggctgggcagcaagcaaagcagggcaccagcagcccctgggcagggtgagcctctgggggagctgccccgcaccccagggcaggaagaggcccagtcctcctaggggacaccccacaggcggtggggccagctgggactccgctggggagaactgtgcgctgggccaggcagcgggtggggaaggtggcctggggagctctgtcctcccctctgcagatggaggctgccggccgccgtcgctggctataccagggccgagcccgctagcagcctgctgggcccaaccctgccctgaacccggatctgaaccctctgacctcgggctgggtgccctccccggctacgtgaaaaagcccgtcctcccccaccacctggtgcaaagggcttccctcccctgctctgccgagggcagggatgaccctgagaaggtctggggagccctgaggtgcatggaagtgggggactggcgtctctcgactcccgggcagccccagccatactctagcatcctgcctggctgggtggagtgtgtctcttgggtcacacggatgcctgctgaggatgcccagtaccgagggccggtgccccgccccgcagtgccctcggcctgattcagagcccacccctgggaggagccccactccaggagggttgggctggggcttggaggtcctagccacagagtgacaggatggagacaaggcctaggggccttggggccaggagggtacccccgtgagggcctgggctcctgggtaaacattaatgggctcagtacccagcaggtcatgtgcgcgatcaggggatctttgacctgcaactgctcccgccccgtgtctcctccctgcaggtgccccctcaccacccacacaggtaggagctcctaggaccaggctgaggcccagggacagtgaggccgaggctgggtggcctccaggccaagggcttgggccccatcctgagtctccaggacccaagggcaagagacgccaggcttgggcagcaggagggagggtgaggcacaggacgcctggacctgagcccagggcactaggtggaggggtccaggtggggggccccaggggtggggtgaccaggcccaggaggctaaggcagcagcttcggggccaggagccttgaagtggtgtgaggaccccacctgctccccatcaccagggcgtggggcccttatcaagccgagacgtcactgtttagtatcaaatgccaaagtctaagtcgggaccatccacagtgtccccgatgacaccagataggggaggtccccaggttccccagctcatggcctgcaccctcggcactagccttccagtcaggaccagcaagggagccggggagctggagccccttcgagtctacccctgaaactggactgggctcgcctgacaactgcctgaggtcattgtagccatccccctgtggatggagaaagggggatggtcactgaggcctgcagggcgtagagagggagggtggcggccaagggctcaattcaggggacccaggggtgtgaatccagcttgtgaggacagggccggggcaggaggaaatgtctctgacacgcgcgtcccccccagcagatctagacctgggcctgggtctgtccctgcccgaaatccatgccgagttcccttcccggcagccaggtcccccaccccactctggacgcggttgacctagtggaaaagactctgaggaatgaaggtaccagtggcccctgtgccccaggccttcaccagtctgaccacccaccccccaggcactgggcagagacaggccaggtttcctgcgggcctcccggggaacccacagggctcatgacgcctccactcaggtccagcccagctgga

SEQ ID NO: 12180 - DNA, 6000 bp, Homo sapiens
gcgcacgggtcggggggcagttgcaggtggtggaggtgggcgcactcctgcctgggcgtccctgccgcagcctccccctccaccgcccctgcagcacctggagcgcagcctggatgcactgcacctcagcagcttcgggctgatggacacgaccctggaggaagtgttcctcaaggtgtcggaggaggatcagtcgctggagaacagtgaggccggtgaggggcctggaccacttgctcagcccaccccacccacaaggccccagctcgggcctgcgctgtcactcctgcctggtgtctgggggcgccaccctggtcctgggtggaagccaggggacgccccggggttagcctgcggtcctaggtgggtggtcctggtggccagaggtcccggacaggtgtatgagcctgggaactggggtcaagaccggggatgggggtcctgggcaggcctaggggccagtagccctgagtgtcccctcggcccttccactgcggcagatgtgaaggagtccaggaaggatgtgctccctggggcggagggcccggcgtctggggagggtcacgctggcaatctggcccggtgctcggagctgacccagtcgcaggcatcgctgcagtcggcgtcatctgtgggctctgcccgtggcgacgagggagctggctacaccgacgtctatggcgactaccgccccctctttgataacccacaggacccagacaatgtcagcctgcaaggtgggggtggcagggtgaggctgggacagcaagggagggggagcagggttgcgggggagcggcatgagggcagccagtagggagagggtagcgtgcaaccacctgctcagcctctacctctctgcacagaggtggaggcagaggccctgtcgagggtcggccagggcagccgcaagctggacggcgggtggctgaaggtgcgccagttccacgggctgctggtcaaacgcttccactgcgcccgccgcaactccaaggcactcttctcccagatcttgctgccagccttcttcgtctgcgtggccatgaccgtggccctgtccgtcccggagattggtaggccaccggctggacaggggtgctgggcttgcctccccccaccgcccgctgggagccctgatgatgcccactcctgagcttcctgactctgggcctcaccccacacctgaggctgggcacgcaccggggttcatccgggagtcctgtctcctcgggtcccagaccccaggcgtggatcccttggggttgggggaaggggaccgaggcttgggggccgctggccagagggcagaacctgctcaggcctccctgctcgccctgccaggtgatctgcccccgctggtcctgtcaccttcccagtaccacaactacacccagccccgtggcaatttcatcccctacgccaacgaggagcgccgcgagtaccggtgaggcctccagcgggggcagccttggtgggtggggcgagtgaaggggcggggacagccttggtgggccaggcgggcgagggggcggggctggcgaggggcggagactggcagccccacctcacactgtcggtgcccgcaggctgcggctatcgcccgacgccagcccccagcagctcgtgagcacgttccggctgccgtcgggggtgggtgccacctgcgtgctcaagtctcccgccaacggctcgctggggcccacgttgaacctgagcagcggggagtcgcgcctgctggcggctcggttcttcgacagcatgtgtctggagtccttcacacaggggctgccactgtccaatttcgtgccacccccaccctcgcccgccccatctgactcgccagcgtccccggatgaggacctgcaggcctggaacgtctccctgccgcccaccgctgggccaggtagtggttcagggggcctgctgggggggcaggggcagtgaggggtccttctcaccgcaccatgctgtgcccacagaaatgtggacgtcggcaccctccctgccgcgcctggtacgggagcccgtccgctgcacctgctctgcgcagggcaccggcttctcctgccccagcagtgtgggcgggcacccgccccagatgcgggtggtcacaggcgacatcctgaccgacatcaccggccacaatgtctctgagtacctgctcttcacctccgaccgcttccgactgcaccggtgagctgggtggggaggctgtgggtgagggtggccggccaccagccacctagtctcaactcctgcccctctagcctcactgcctgcctagcctcaccgcccctcccacctgcctgcccaggtatggggccatcacctttggaaacgtcctgaagtccatcccagcctcatttggcaccagggccccacccatggtgcggaagatcgcggtgcgcagggctgcccaggtgagcgaggctgcgggcctgggccccgctgtgtgtagcgccgcccgaggtctgcagggacccaggtctgaggtcctggggcctttctgtgtcctcttccttctgcaggttttctacaacaacaagggctatcacagcatgcccacctacctcaacagcctcaacaacgccatcctgcgtgccaacctgcccaagagcaagggcaacccggcggcttacggtgagctgacataggcagggcggggcggggcggggaggagctggggccggggcggggaggagctggggcctgaagctgccgcccccgccccgccgtgtgcaggcatcaccgtcaccaaccaccccatgaataagaccagcgccagcctctccctggattacctgtaagtgtggccagtgggggatgaggtggggcaggtgggcactgcagccccggccgtgaggactgagggcttccttgccccaggctgcagggcacggatgtcgtcatcgccatcttcatcatcgtggccatgtccttcgtgccggccagcttcgttgtcttcctcgtggccgagaagtccaccaaggccaagcacctgcagtttgtcagcggctgcaaccccatcatctactggctggcgaactacgtgtgggacatggtgcgcccggcgtggccatggggtgccccggcccttctcatcccccatccccgccctgccccgggtctctcaccagccgcccccacccctgcagctcaactacctggtccccgctacctgctgtgtcatcatcctgtttgtgttcgacctgccggcctacacgtcgcccaccaacttccctgccgtcctctccctcttcctgctctatgggtaagcggaagcggaggggggagcggcctcaggtgggaccggggctgcctggtgaccactgcccgccacctgcccgcaggtggtccatcacgcccatcatgtacccggcctccttctggttcgaggtccccagctccgcctacgtgttcctcattgtcatcaatctcttcatcggcatcaccgccaccgtggccaccttcctgctacagctcttcgagcacgacaaggtggggcggtgacgacatggtgggggtggcggaccctgcggaggctgtgcccctcaccccggccacccctgtgcccctgaccccggccaccccgcaggacctgaaggttgtcaacagttacctgaaaagctgcttcctcattttccccaactacaacctgggccacgggctcatggagatggcctacaacgagtacatcaacgagtactacgccaagattggtgagggggcccgtggggcggggaaggcggtgggggccccgcaaggcccagagcacaggccctgagctgtctccccgcaggccagtttgacaagatgaagtccccgttcgagtgggacattgtcacccgcggactggtggccatggcggttgagggcgtcgtgggcttcctcctgaccatcatgtgccagtacaacttcctgcggcggccacagtgagtggggggcggggtggggcgggggcggggcgggagcagggatgggttcgggggtggggcagggtaggggcgggggtgggggcagggatggggcaggagggggtgaggcaggggacagcagaggggcctgcccacccttcttacatgccacagccagaggatgcgaggctggtggcagggaggggcagtgggggtggcgagctgctggacactgtccaccctgtcccccaaggcgcatgcctgtgtctaccaagcctgtggaggatgatgtggacgtggccagtgagcggcagcgagtgctccggggagacgccgacaatgacatggtcaagattgagaacctgaccaaggtgggctctgggcatgtagggtggggcctgggtggggtaggccagggccaggggggtggggccccagcagtggaggtggagcctgggtgggcagggccctgagctctgggggtggggcctgcatggggtggggctgtggggcacgtggccccctgggctctggaggtggggcagggtctgggtggggtggggccagaggggcagggtgggggcaggatgccccgctgagtgggcaggctcctggccaggtctacaagtcccggaagattggccgtatcctggccgttgaccgcctgtgcctgggtgtgcgtcctggcgagtgcttcgggctcctgggcgtcaacggtgcgggcaagaccagcaccttcaagatgctgaccggcgacgagagcacgacggggggcgaggccttcgtcaatggacacaggtggggcgggagccctgggtgggcggggccgccgcgtcctcacgcgctgacagctgccgtgtccccagcgtgctgaaggagctgctccaggtgcagcagagcctcggctactgcccgcagtgtgacgcgctgttcgacgagctcacggcccgggagcacctgcagctgtacacgcggctgcgtgggatctcctggaaggacgaggcccgggtgaggatctgtggggcggggcagggagtcagcacgctgggtggccctgcctccactgacacctgcgttccctggccaggtggtgaagtgggctctggagaagctggagctgaccaagtacgcagacaagccggctggcacctacagcggcggcaacaagcggaagctctccacggccatcgccctcattgggtacccagccttcatcttcctggtaagtcctgggtgggtggggggtggctgcctggcctttgacttcctggtgagcacgggcaggggcagcgttcaggctggggtgtgtgggcctggcagcagctgagcctgccacccatccccaggacgagcccaccacaggcatggaccccaaggcccggcgcttcctctggaacctcatccttgacctcatcaagacagggcgttcagtggtgctgacatcacacaggtgagggcgcccccaccccctctttgtgcccccaccccacagcaccccttccggtgccagcctgtgcatgtcccacagcatggaggagtgcgaggcgctgtgcacgcggctggccatcatggtgaacggtcgcctgcggtgcctgggcagcatccagcacctgaagaaccggtgagccggggcagggccaggggtgggctggggcgggcccggggggggcggccaggcagcggggccaggagtgggggtggctgcagggctgtgagggctgtggggccaggggggctgggggcactggggctggggggactggggcagtggggccaggggaggagcctggagggctgtgggggctgtggggttggggggctgtgggaggctatggggcttcctggggtgcctgtgggggctgtagggctgggaggctggggggctggggctctggctgggcggcgcagggctccgggccaccggcctgtcccaccaggtttggagatggctacatgatcacggtgcggaccaagagcagccagagtgtgaaggacgtggtgcggttcttcaaccgcaacttcccggaagccatgctcaaggtgcgccgtcccgggcagggttgtggagggggcgctacggggtggg

SEQ ID NO: 12181 - DNA, 6000 bp, Homo sapiens
aggctgcagtaagccatgatcatgactctgtactccagagtgacagagtgagaccctgtctcaaaataataatggtgatgatgatgaataaaatctagtatttgatagtacaacagggtgactatagtcctgtatcaaaatatcccatataccccacaaatacacagatctactatgtacccacaaaaattaaaataagaagaaggatcaaagacttaaatgtaaaacctgaaaccatgcaaatcctagaagaaaacaggggaaaaacaccctgacatctgttttcacgatggtattttggatgacatggaaagcacaggtgacaaaagcaaaaataaacaagtaggattacatgaaattaagttattgtacagtaaagaaaacaatcaacaagataaaaaagcaacctatggaataggagaaaatatctgcaaaccatacatctaaaagggggctaatattcaagatatgtaaggaactcatacaactcagtaccgagaaaaaaacaaaacagataacctaatttaaaaatggacaagagatctgaacagatgttttaccaaaaaacagccaatggccaataggtgctcaatacactaatcatcagggagatgcaaatcaaaaccataagatacctcacacctgttaggatatctattatcaagaagttaaatcataacaaggtcggcaaagacgtggagaaaagggatcccctccctgtacactattgacgggactgcaaaatggtacagtcatgatggaaaacagaagttcctcaaactaaaaacaggactaccacatgatccaacaatcctacttctaggtatatatccaaaggaattgaaatcagtatctcaaagagatatctgcactttcatattcattgcagcattattcaaagtagccaagatacagaaacaacctaagtgtctgtcaatagatgaatggataaagaaaatgtaacacacacacatacacacataaaatattattcagcctttaaaaaacaaggaaatcctgccatctgcaacaacatggacaaaacttaaggacagtatactaagtaagcaagacaaaaaacaacttcatgatctcatatatggaatataaagacgtcaaattcataggaacagagaatagaacgatgattaccaggggctgggaggtgggtgaaatgggagtatttcagtcaaaggtacaaattttcaggtataagatgaatacgttctggggacctaatgcatggcccagtaactatcgttaataatgacatttatttccataattaacatatattgtatacttgaaatttgctaagagagtaggtcttaagtgttctcatcccacatacaaaaaaagagggagctgtgtgagatggtggatctgttaattagactgattgtgattatcaactcacagggtagatctaagtatcgcacagcacaccttaaatatatacaatttttatttgtcaattatacctcaacaaagctggcagtagtggggaagcagtagttcatcagaaaaatgaacacttatggttacggtaggtaaagaatgactcataaagaaaggatttcaacagcagttaaaggatagataatactctgacaggcagaaatgaggcaagagagcattccaagaagggagtgtctgtgatatcaaactaaggagtttgaactccattctttcatcaacagtgaaccctagaagacttcagagcagtgaatttataaagaaggctctctggagaaagtaatagagttaaaagggtgagaaatgggaatgctgggaaaatacaaataaaatggtcttcctgaggtcaacacagttaatcacatacctgatccaaagcttggttcttttgacatatcattgtttttttccatgattagcacataccaatgggaactaagtttttgctcaggattactaaacgacatataatttattttataagcctagtaattatttgcccatttcagctttttattagctacctacaacagtgatatctcacaagatttatattaacacactaacatctaacacactaacatataacatgtctcttcatcccttttatacacatctgtcttttacagttgatgttcaaaaatacttctgaagctaatttaaatgtttaaagtcggtgacctgaaaaacgagaatgtctatacatctaatttagaatggctaaattcaaagataccattctgatgttcacatatatagactttcatagtcacagttagtatattaaaggaataattctgggccctcagtacagtacaaaatgtaattcatctcacactacacctacgtcaatcataaatcataacctaccttatgcaacagtttcatcctcaaagctgaaactagtccttttacaataaccttagcagaaatgtaccaactgcccccagtcaagttctacctctaccaccccaatctagcctacacatactgagcctttttttaacaccatttggggggctccaaaatataatattggggctccaatataaaaaagctaagtaactatctagaggctcttttgttcataaacaacactatactgtatttctcaaatttggggtaggaaataattctgaagagatatgagtctaaacagtggaattccgaatacctacttagaatagaggacagtaggtataagtagtacataaaagttcattagaagacccatataatgtacagttagagattttaatagagattcagtcttatgaattatcactgtacacatacaatttccacaattcttttgaacattgaaacaaccagcttagactactaaacgactgtcccttccacaaggctagttgtctctttttaaaatatatcactcctaagagagcctgatttactaagtgagccctaacaaaatttcaggtaagcaaatcttgttttatcatctctacgagcatgtctccctgccttcaaatgccctcaagcagctgtaagacttcaactctgtaaaatcctgtagatcttcacatattattataaaactacttgtatctacagcctctcaaaaatcaaagcttttagcagctccatgagaactttttaaaccaattcactctaaattatggaagtataactgatagccctttaatttacctaaaggcattttcacttttaaatgaagtttgttaacctaattaacttacatactttcaggaagtttacaaattagaaaatcaaaatgaaaactttcatacagagtaagaaagggcatatcccaggaagagaagattggaagctggagtctagcatatgtatcccactcacctaggcatgtaatcatacaccttataatcacttggttcaatatttgatttttttttttttttttttttgagacagagtcttgctctgtcgccaggctggagtgcagtggtgggatcttggctcactgcaacctctgcctcttgggttcaagcgattctcctgcctcagcctcccgagtagctggggctataggcgtgcaccaccacgcccagctatttttttgtatttttagtagagacgggatttcaccatgttggccaggatggtctcgatctcttgacctcgtgaatatctgatttttttcagtgacaacaaagctggtgcccagagaccaaggttaaccactcatactacagtactatacagcctcctctaaggtattcctgcatttcatttcactccagacctctaaacccatgggttccctacagcctaacttttgcacaacagaacttaatagtaggggtccctggacttctgtggaaaaaggaagttgcatgtgaggtgggaatttgaaagaagagtatgaatagtttaaattccagaactgccttggatttctagatgtcgtatgtaactccaaaaccaaacaatagacatgcttaagaatattcacaatgtccctaaattaaagcatatgtttatgcttctcttatgggggaataaagtggtttacaggcttctggtcaattcataggtcatattgtttacttttatttaaaattaagttaggtctgcctttttaaaggtaagaaaagttaaattttagacgaaagtctaaatttgttacattcaaaaggaattatgtattaaattcaaaagacaatttaaattcaagttctatttttttctgcatgtgctttaaagttgagttatatacacctaaacaaattaaaaattattcaactggcatatacattgtaaacgaatatctcatttaggaaccagatgatactttatatatatttacacatatgtttatatatatacacacacacatacatacatatatattcaaaatacaatcaggcactagacaaaatagtcatattgttggtattacgattttataagtttgttttgttctgatttgcatttgaaaattagatcagccaaaacttgatggcaaatagtctgatttacagcccaactatgacagtcaaaggagacaccagaattacccgtcactaaatcccatcaccagtattaccagggaagtgggtgaggactgtcaagggcattacaggtaatggaacagcaacacacaaagatttggggattttaacaaactaaaaccagtatttcacgaacacctaataaggacaagatcacaacctatccccacatggtcaaattaacttggaaaggagaaaaacttcactctgacatcgattggtactgccttctttggggaggaaaaaaagcatttttatactctgaactctgtcgttctcatagacaaagttatagcagtgtttgcagagagtagggagtatcccatccaccacttatttctttctcatatctactcagtaattcaatacaagaaagaaaaagataaccaggacttaaagcaaaaacagaattcagttccatgctcctcccaagccttattatttccaggtgttataactgggagttccgcggacagatttgagttctacttccgctcctttaaccccctattccgaagagtccaagagcagcagcaaagaaaaagaccaactcgaaagtggggaagggatgttggggttaaagaggggagttaaataaccagacctttagtgaagaataaagaattcaggctgtagtttgtagaaataagttattacaggcctgtaaagtctggcgctgggtaaagcccaagaggctttccctaactccaaaacggcgacctttaaagtaagggagggttggggcaccacagcggccggatttctaattgtggaaagtttaaacaaatttgtccctcggggaatgggggaagggagagaagaacaagtctgggctcggccggggagcgtgcggagtctgcacgccgcggccgtcggtccaacgcggggaggctcagggattttcggcagcagcgacttcatccaccccggaccgccggctggaggacgtgcctgcagccggcgggtacctgcggccaattcggtggaacgaggacgcggactgcgaaggcaggtgggtctggcacgaaggggcaggagtcctaggctctgggtggaagttgggggtgggacggcgccgggaggccggggaggcagcggcgaaaggcggcgggcggctctacttactcggctgtaccagatgctgaggcgggccgcggccagcacggcgaagaaagccctctgcgggtcggactgaacgtggaaaggcgcctcggccgggctccccagagggcacagcagcctcttgggccagccgctcagaaaatacatggtccgtgcggagcccccggcgcccccagttgcgtccgtcacactcagcggccccgggctggtcgcccacctcccacaccgccaccggccgagtcggcggcggcggcggcggcagctcggggcatctgcccgctggcctggccgggccgggccgacgcaaggctgcgcgacgaaggcacccccaagctgacggggccgagtgtgggggagggaaggggagggagagtagggacacaga

SEQ ID NO: 12182 - DNA, 6000 bp, Homo sapiens
gacagtgctgcctaacagcaagaagagatgctgccttgaagaaaaggaaagtgtatttttttcacgtggaaaaagaaagcataaatgattgcacaacatgtctcaaaatctccagctgcctccttttctactggaagcccacttgtttgtaaagaatctttgggtagtggaatcagaacaggtgatttcaatcatcagctagttctgagtttgagctttcaaatctgcagaatgggagtaatgacacctaagcatgcaatgttactggtagaatccatagaactacatgggtcaaaaaatttagcatggcaccttaattaatatcttcttttcttctttacaattgaatttgaatgatagggttgtctggctgctttttaatttattcttgagacagagtctggctctgttgcccagtctggagtgcaatggcgtgatctcggctcacttcaacctccacctcctgggttcaagcaattctcctgtctcagcctcccgagtagctgggattacagacacgtgccaccacgcccagataatttttgtatttttagtagagacgggtttcaccatgttggccaggctgatttcaaactcctgacctcaagtgatctgcctgccttggcctccaaaagtgctgggattacaggtgtgagccacagtgcctggccttttagctttcttatgtgctagttctgtgtttggccaaagcaagctactgagaaatgctgtataacttaaatttgaaaaatactctctgaaataaaaatagaaacacacgtagaagtgaatattgttatttgaggactgaaactattattgtttcatttatgtatttagcagtaagtcaataaagtgtattagacataagctaacacctacaggaaaaggtcttagatattagatttagtgttttatgaaattcctcactctcttccgaacatgtcacttgaatctatgctgtgtttctccatttagctggatttaataaaaaccccagtagtcctcacaaagaaaacatgattagcaacaatttattccataccttggtcaataatttatcatcactatagaagtgaaaatattggatttgaagtcaaacagatctaggttcaaaattctagcttggccactcactgtgtcagcttggccaaattacttatcctctctcgtcctgtttcctcacttatataatggggctaataatacttaactagcaaggcagttaagattggaaacgaggcagtgcttccaaacttttaatcactagccacatgatcaaaaaggaagttttgcaaaaaaaataaaaaaataaaaaataaaacaacttagtatgtataatgcactctgtgttttttcctacttttctttcatttcagaaattgtttatgacccactagattcgcaacccacataaggtcatgaagtgccttttcaaaaacaggtgaactttaacatgcttagcacgatgcttagtacataatacaagtgtaacaactgattactattattgtcatcgtgattatttttagtctcctgttaggatgcctcatgataaatgagaataaatcttccaagtacttctaggaactaactcctttggatggggtccaaaacagactcatactcatcgtatgctgaattatgcactagagggggtagtgctatagcaaagctcctgtgtgctatttatcacagaatgttagagctggaaggaaacgaagaaaatgtcttgtcctattgcttcatttttccttcataaaagtatttggagttttaaaaatattctatatgtattgctcattgataagttggaaaactggcttctttgatccagaatgtggaggtgatgatgaatagctggtgggatggagggcactggatcatgatgtctgagttcttgtcctgcttctggcaccaaatagttggatgattttaaattctcagggtcttcgtttctttacctgtaaaaacgaggtaatttcaacaaaagattagcctgcttctgatgttctttgacttaaaatttccaaatggtaaaccagtccagaagtttactagatgctgcagcattaggacactcttttgttgccaatctgctctgaatatattaacatgagtgtagcaggctgcagtctcacttccattactactcagatgtgcagagaaactttggcttctctatttgctgtatctcccgtttttcagcagcatcaccctgaataattctcagtctcattggtataataataactcagactctccagtcaccttgacccatccctacttctttctctaagatgtttgatgtttggttgtagtagagacaagaacatctaggacttcacagtgtcagaaaagttgggcttatgccatttacttgtactgtcctctgtatcccctgatttctgggtcccttttctacttgctagtttaaatcactaccagtggtgtaagatgatatatcctcaactatgttcccagatagcagtcagatttaccagctgggttcttcttaaatgaggtcagatctgcaggcagagtgatacatttcccacaaaagtaacagcaaaggaatattaggggttttaaaactttctgtttctctaacatgcaactttggatgaggaaagtgggattgccagtttatgggggcacatgtggcaatgacaaagccaagtaggagtttacatcttgggtggaatcacctatggggaggctgagatttctggatccatccttaggtcacagggggcaagggtccatcatccctgcacagcttttcagctcctgtgaaatcagaatgattggagggtaaacctcgtttgaaggcttgcacaagaattgatttcttcctgattttcactatgaccctaaccataaaaaagcaaaaccaaaaagccaagagacaatcatgcagggatgctcctcccccacccccaaattgctggaaaactaaacttcgtttagagagattcctttaaaaaatatgtgacttatttttggagtacatagggggcagaggattactgaccaatccttcggtggctttcaggagcacagcatgcagatggtggaaacaaatgggcagcttgagacagcagtcagcatgctggatcattaagtcaaatctaagggtgtctgtttacctttgctctttcaaagacagcccggagtctgcagggataagtattgtgtgtatgtgctggcctgaacacagaatgagcaatggaggtggctggtgagctctagctttactttatttaacctttctgaccaagtttctaataaattttgatgggccaactgccaatggtggcttccagctgccgactttttccacatgctggagaccctatgagtagtgaagaaggttaaaatccatctcttagctaacaatacacacagtgcaccttagtcaccttgggttgtgtggatgaagagtgcatagcccaacaactggatgcttgtctagggaagaggtgttatagtgtccttcagagaagctgaggagcactgcatttccaacaacataaaagcaagtggcatgaaagcaaaacaagttatcacactaagattttggttcagtacttcccagtcttcctcgttgccttcaaagcggatcctacaagcatccccgaaggaggctgccaaggtgaactggggcggacacaaactgtgtctcatcaaagcacgctccctatagtattatcactgctgtcaatagggcgcgaccagcattttttcctcctttgcgctgggacgcagagcaggaagcgcccgggtgtgcatctcttaggagatgagtgaatctgttggagagggtcttttctggcctggtggatggatgctggggagtgacgtcaccccgccccctcctctggtgtgtgtgtgtctgtgtgtctgtgtgtgtgtatgtgtgtgtgtgtgtgtgtgtgtgtgtgtgtgttgcctccttcacccacctctcctgcctgcccctcctttatccggctctctggccctttcagtgggtcagtggtccagattcagggattcgccagcgggcgcagcgggcccagctctccccgcgtccgggcgcacccacactcacactcacgcgcaggcaacgcgcacacacaatcccccagcgctggagcacagcaattccgtgggatccccagcacgttacgaggattttagaaatcacccacacaaggaaacaaagagagaagcctttccaatgactttcctgggctttttcgtttaattttcccccctccccaaaccacctcttctgcagccgtaactaccaggttcaagccaggtccaaagactgggctgcaccggccaccccacctcccggccctcgactctgctcgggccctttcccaggcgtcgcctcgcacccctctccccccacgagcctcagtttctggttacctcgcgtgcgcttcacttttggggggaagaagagaaggggagggaggcaccgaggggggcagccgagttgctatttgtggccaaagaatccgctttaaaagaagaggcagcaggaaggaggaaagaggagaggcggagggaggagaggagacgcggccccggaccccccagccgcgagcggcggagcatcgaggagcgggaggaggaggaagaggaggaggaggaggagggggaggagacaaacagcggcggcggcggcagcgagagaagcgggcgcagggcgagcaggaggagcgggaggaggagaaaccgccgcggaagccgcgggctcagaagggccaagaggacggcccgggaagaggaggaggaggcggaggaggaggaaaagggggtaggggtggagggagggcggggggacgcgctgccttggatgctggatttcgggtttttggactcactcgctgactctcttccacttcctcgctctggactgggctggccgcacgagggctgggcggcggcggcgaccaggggggcttcggcggcggcggccgctgctccgcgggattaaattggccgcccggaggcggcggcgcggccgtggcggggcgcgaaggcgctggaggaaagtgttggcggcggcgcgggaggcggtggcggcggctgcccggggccaacatgaccaggtgagtccctggaactgaccccgtccgccccgcggtgtcttcccctcttgctgctccggaatcgccctgcgcccggctccggctgccggcgcctcccgagccagagcgacacgctcgcgtttccgcgagcccggcgcccgggcaccggagcgcacagtttgctcctctggacctcctcgggcagaggtcctctcctgctgggttcacttctcgcctgaaacctcagacccgggagagaggcgactctagagaatgggggtgtccgggtatgtgtatttgtgcgacccccgctctctcctcctagggtgggcgtagtattgggggcaaatggtggagcggtggggcaatccacccttacccagggatcctgccaccgccttttttaaaggcagggattactgttttaaggagggctgactacggtgagggggcgatttctttttctttctttcctctgaactagtggggagaaggagaaatagcaggaatcaaagtctacgcagctgccatagaggagggggattgtttgggagaccttcccgtggcagaatcaaagctcgtagttcagctgcgggaatctggtgtacttaacacacacattcattccgtagggaagggaacgcatcttttataatgaagagtcaaagttgtaagaaacaatttaaaaagaaagccacgaacaaaccaaagattatttgctttcccatagatttattgtagcttttatgtgggtgtgtagaaaacttgcattgcttctctggacgttgattttcatttaaaagcactagcaagtgaagtcagtttttaagtcttatgcttaaaaaaatcttgaacaccaagtgtgagcttggctttcattaatttggtgttccaggattccagatagtagttc

SEQ ID NO: 12183 - DNA, 6000 bp, Homo sapiens
gatttatcctttttgttactttagatacagtttattttcattgttgtgaatcctcataatatttcatttaatataaagccatttattcgttctgttgatggacatttactttgtttctagtttttggaggttataaataatgctattgtgagcagccttgtttattcctcctgctgtccatgtgcatgtgtttcacttagatgtatagcgagaagtgctggtgttcgaaggttaagtggtatgttcctttagatagtgttaaacagttttccaaaatagttgcacccatttaaactcctaccagtagagtatatgaattctgatggcctcatatccttactaatacttaaatcttcttaacattagccatttggtatgtatgagcagtacttcattgtgttttaatttacatttctctgatgactaatgatactgaacctcttttcatatatttactgattatatgactggcctatttggcaaagtgtgcctatttaagtatttttcccatttgactttttcttggtaattgtagggcgttttagattagtcctttttttggaatgtgttgtaaacatcttccactctttggtttatcttttcactctcttaatggcattttttggtaaacagaggttttaaattttaatgtactccaccttatcaaccgtttcatttttgagtagtgttttttgggttcagtttataaaatattttttatcctttctaaaaccaatgtaattctcctttattatcatctaggtactatatttttctgtctttcccatttctacctggaattgaattttgtgattctcatgagatagaagtcagggtttcagttttttcatagatgaatagtcaattgatttagcaccatttattgaaaagataattctttcccctccactctgtagtgccatctttctcctaatcatgattcatatgtgtgtgtgtctgtttctgtttcttttctagtctgttgatctatttgtctctccttgtggagagacaataccacactgtcattacaactgtggttttataagaaatgttatctagtagaacagtagtttttaacctttttttaaattcccattttcctcctatggaaattttctcctctcaccacccctgtgaagttaaatactaagaaaaaagattttgtcagataagattgtgtagagccacaaaccatagtgatagctaagactttttttctccctctaagaaccagttttctcccacttgggagcaaaacttgccctgtcgagaatacatgcagtagaaccgactttcctaccttgctctgtttatatgagcctcatggtattctttgtgtttgttttttcctatgaaataaagaaacagcttagcaatttctacagactaaagcaaagtaaatatatatatatatgtgtgtgtgtgtgtgtgtatacatatgtatgtgtgtatatatataaactcccaccagttgtatatagtatgtaatgtggttatatataagcaacctgatcaaattgagtttatcctaggaatgaaaggtggtttttgcactagaaaataagtcagtatattttatcacattaacagattagaaaaaaaattcaaatagagcatctcagtgtatgaagacaaagataaaattcaggattcattcaggttacacactcttagtaaactagaacttaggagaactttcataatcagataaatggtctttcttcccgacccccttaaaaaaaaaacacacaaaatcaaccaactatagcatgctaagatgaaatgttgacttcttccctccaggttggagacaaggcattgatgcccccactatcaccattattattcttaaatatactactagaaattctagccagtgcagtaagacaagagaaagaaagaaaaggtacaactgctgaaggaaataaaactgtcattacacatagatgatgtaactgtataaatgatttatctatagattcttttgggtttttaagaaagtataaaaaatgtgactatgaaacaatatttttaaaaatctatttttatatgctcacaaacaaacctttagacaatgaaattaatagcaaatgccatttataatagaatcaaaaaacaggaaattgctgaattaaatctgacaaagtgcaagtcctttagaagaaacttaacgaaaggtaatggagagaatatattatacgtgaatgtatgcatgagtatgtgttgtaacttgaaaatgtaactttaaaatttttatgcaaatacaaattatctggaataatcaagacgttcttgcaaaagagtaagatgggatgacatggcctaccaggtattgagacttattacaaagccgtaataactaagacatttgtcaccgttgcagggataaacaaaccaagggaacaagagtagagagcccatgcatgtatggatacttgatctcaggtcactgaagaaatgacagctttttagataagtcattccggaacagttgaatattcatatacaaaaagtaaattcagattcctatctttcactgtgcacaaaaaaattaaataataattctatgtgaattagtgacctaaatgtgaaaggcaaaacttaacaaagcttttaaaaggctttacaagataatataggagaatgccattattacttcagcatcaggaaagatttcttaaataggatataaaaagcactaaaggaaaagattgatacattggactacgtaaaattaagactttagtttataaaaaggtgccatcaagagagtgaatagggtagtttcagagcaggagaagatatttgcaatatgcagctgaaacatagcaatatccaaaatgtatgaagaaggagttagtaacctttacctttagggtaggggtgagggagagccagcaatggggaaggaatacacaggaggctctacttggtttcagatgttctaattcttgagaggatactgttacttttcttcttcttctttatatatatatatttttttgagacagagtctcactctgttgcccaggctggagtgcagtggcacgatctcggctcactgcaacctccacctgccaggttcacgtgatcctcctgcctcagccccgcctagtagctgtgattataggcatgcaccaccgtaccctgctattttatttttatttttattttttagtagagacggggtttcgcctgttggccaggctagtctcgaactcctgacctcaggtgatccacccaccttggcctcccaaagtgctgggattacaggcgtgagccaccgtacccagcccagtgttacttttctttaaactgaacacatgtgttttatgaatttatctgtatatgagcacattttttaacaaaaatggaagaaatgtaaacaataaagaaatacatttattgattatattagtttgctaggcctgtcttaagaaaatacaacaaagtgggtggcttaaacaacagaaattcattttctcacattctgtaggctacaactccaagatcagggtgtcagcaggttagttttctcctgatgcctctgtctttggcttgcagataaccaccttctctctgtccccacatggtctttcctccgggaacatccatggtgtctctcagtgtgtccaaatttcctcttcttataagggaaccagttggattggattagtgcccaccctaagggcctcattttattttagtcactgctttaaaggctttgtctccaactacagtcatattctaaggtacaggggttagggcttcaacataggaattttgggggacctaattgagcccataacactgattatgtagtaaagatctcggatagcaaatgggttcctgtgatttggataaaaatttttaagccaatttttggattcaaaaagtgttaaatctaaaaaaatctaagacagaagtaaagatgtactctagagaacagtgttaagtgactcaaaatatggatttagtgctgatgatgttaattatgcatgtgtgaacttggaatacagttgtttttttgaaaatgtaaaagtgataaaaagcaatttctagattaaagtttttttactactgtattttacataaatactttaaatataaatgtataaccaaatgaataaatgtaatattataagtagatcttttagtctcatctccatccttgacatttataaattgtagttggccaaaaattattttaaaatcttttcactgggagtagagtggatggattttatttggtcatagatggtaattttagtacagtaagctctgctataatgcaatatgtgcattcctaaaaatcacctcactgtgtaaaaccgtgcattaaaaccacagggcttaccactccgaaactttgtctgtgacacttaaaaggataggaatataataaaaacaacagcactcttttatataaatattacgtgattaagaaatacataaatactatgataaacatggcactttaccttgagaaagacctgaagttttcttatggaagtgagcatcaggagggttgcagaatgtgaattattgtgaagtgatggaagggagggtctgtgaaattggagggaaagttgtaatactagttgtgggtgggtgtggctcatagcatggaagagaaactgaggtggctggtagatgtttgacgggtgagtgtgttttgtgtattcctacatattttggttcatctgggtacaattttttgtgttcatctaggattttttcacagataaaagtatgcataagaatgattgccatggtcaaacttgtttaatgtatcaattatgttagaacaaatttgtgtttttaaatagtgttaatgcagaatttacttaattttttatgtcatccacaggcccatcattttggttttatatgttttatagggattctatattgggttctttttactgaagttttgaaatgattgcctaatatttacctgctacataacgttttaagtgtcttgctgaattctaagtttttccaggctaatgaataagtaatgtggatgtggaatcagatttttgcttgagtctggtggtgactcaatataatacacacagaaaagtatcagttcttctgtttcaagcaagcatactatctctggtggccttcctatttttgaagttgctgttaggatactttaatccttaacatgaatcagtataaaagaaagcatgtgggtggttgtgtttgggtgtcctttccatccacttggtgcttttattttctgtggttgttttattccacagcttagcaacagcagatttccaggagaagtcttagttcttcatctctctctccttcctctggtctggttggttggtaacagtgagagtaaatgaaatgctttttgtttttctgtcttcccaccacagtgtctttggtttacttttaggaccctcattttcaatctctgagccagaagacctgcctttaaatcacagcatttcaattcctccctcctatctaggcattcctttatgtttctacagtactctgcatgcatccctgttataaaatgtatcacattgttttggaattttccaaagttgagctctctttctaaataaactgtacttcttgaggccatggaccatatttttatcatttatacatttctgttacgtaacacaatgcttggcaatggtggttgggtgactggatggaagaatgaatgaagtaggcttgaagagagctgtacttatgatcctattatatatgatttctcttcattttgtccacgttaatgatttctagatatcttggtcacttgaactttagtaatatgaatcatgctgtgtattcaaactttttagcagagaaataataaaattccttttgtaaaccaaagattgtacaaccatctgtgttttgttttgttttgggtttttcttttctttctttctttttttttttttttttccccaaaataggttcaaaaaacaaacaaggctaacttgcacctaagattgagga

SEQ ID NO: 12184 - DNA, 6000 bp, Homo sapiens
tacagctaatagaagggtaaatatgaggccaactaatgtttatacttacacaagtatctacaaatataaagaagtagctccttaataatttctaaaaagagacccattgattaatctacttgagtctcttagcaaatgctactgtttaataactcatttgatggtagtaaattttctcctgaagctaccctttctttatgactaggcaataaggtctgtggatctgggagacctacagttgttattcaattcctctgcttccacgtagtgtgatttggacaaatgacaggccctgcttttctccattactaccaggatggaagttgtagccttctcaactgttgtggcaattaattgccaagttcttggtcaactgtcaaatcttgagtcgaatatggatctcattgagatgctttggaactgtgtaggagtagtcactcccacaacatttatctcccccttctcccttactaagagagccctgattttctaaaagatgactatgtgctcagttgaaatactgtttacactcccttgcagctatgtcttgtgaccaagtcgtgatcagtgaaatgtaagtgaagcattgacagaatcccttcctaaataaaaagacaaagcctagcaaggaggccttctgcctttcacccttcactctttcccttcttcctgcctggaacacagatgtaatgcaaaagaataaaccattttgtagccatgaggataaagccatacattaagaaagacagatcaaaagatctgggttcccagatagcatcttgaagctattttataaaccctgggcagtctgctttcagacttctttttaccatgagaaaaataaattcttgtttggtttaatcaccaagaatgaatttttattatgtgcaaccaagtgcaaatcccagccaatacaatctatggactcatgaggtcttcatctggatctcattcctcttctcaccgaatcaagactcagggtcatctctgagctgtaggggaaaaacctgaaaccataaaaattctagaagataacataagaaaaactcttctagacattgtgatattcccctccgcaccccatgtagccagaggcacctattgcctcagggaagaataggattgttaaactaggaaagtagacaaaggcagggtaaaaataaagcctaattggttacccagaggtccaatttgtatagaaaaggcaaaataaatgcacaattgttttccttttcctaaaacagttttgaaaattatgagctggttccctctgaaccatcaagcaatcaatctgttcagttgtttttaaaatattatcaattaatagatataatcatgtttgatgtgttttaaacaattgcgattatcttttttttttttttttttgatgctcaaattagcccgtctttggtcagtgacagcctatttgaattgtccccttcttgacacaaccctagtggtagttgatagttttcttgctttctgaaaatatttacagataaaatgatatgatgctctgggatttgcttcaaaatgatgacataggaaaaaggggtatagatgaaatatgactgtccatgagttcataattgttcaagctggttatggccccatggagattcattatactactttcttacatttgtatatgtttgaaattttctaaattaaaagttaaagataaaaaaattcagtcaggcacctatagtctgcaagcacttgggagtctgaggctggaggatggctagagcccaggaattcaagacaagcttgggcaacatagcaagattcagtctcgaaaggagaaagaaaaagaaaagttgagtcttgaatgcctggctttgattggggggtggggggaagaaaaatatttctaagttccctaggcttccctttacttattgatgagtaggcccagaggtctgactacagagctgtactctaagtcagaggtcatgagctctcaggatatacccattacccccattgtaaggagggcatgaagaaaccctcttggatgggggagagaacagaaggatggagggtaaggagaggggaaaatgtgcgaaaagctttcagagcttcacgagttgggtacctcttggcagctttgctggtggtcacagggttgggtaaaaggggttccctcactaccaatttgtcttaccaccgtcttccattctttggcccagattctagtctctcatccccaacaagcctgattctatttcttgtggtcaaggggatcttgctttccagataggacaggaaggagcactgggctggacatcccgaggccaaaagccgaagcctgtcagtgattcaaaatgacacggggttttgggtctcactttcatcacccatgaaatgaaaggtcaccctgcaagactgaagcccctgcagtgtcccaagcatccaaatccaacactcaagaaaccctggaccccaacagcctgtcctgcaggcctccgtgccttttcattgaacgtcttttccaccattacacatcacatcgcctcctaaagaaaagcgcgactgctatcactttttgcagataattggagaggcggtgcccagcataagatgaccccaaagttgacagcactttcaggctttgtgaattaggcgcgtcaccgacctgtacgatttctcctctctgcccttgctcgcctgcaaatcctgacccccgtccacactgcggagaaatctcctaagagacggctgccagcgtcgcctctgcgcccaggaggcgtggagcaaaggactcgggagctgagcgcgctgcggccccgctcccagcgcacagcgcacagcccagagggaggggccggcgggggccgggcagcgccagactcggagcgccgggctcacagcggctcagtctcctcccgaacccagcccggctggcgagagcggcagccagtgcgagccagagcccgggcctcagagcgggtaggcggagggccggcggactggagcggcgggccgcgctcgggggccccgccgtgtgcgcgtcctcccatcttatcctggtaagtgcgggcggctgcgccccgcctgccgctgtagccgctgtggcggtcgtccccgcatcccggttgcgcgcatcccgttgctgctctgcaggctcacaggtggctctgccgtggatgtgggcgccccaggccccgctaggagttagccaactctctgtgctccggggcgtggatttggagcccccgcctctcctacccttgcttttggcttgggatggggggcgtggggcagggcctgccgtcgggggagacgcgcagaggggcgcttccattccccagccacctacaaacgactcagggggatgcgggccaagcgcctcaccaaatgcaacccagctccaagctcacaggtggggcgtctgtcctttagatttattttcctattaatccaccagggaaagtttgggaccacgcaaggcaaagttggggcgcggctgggggcgaacattctcctacggaggcagctcccggggagacgagcggtgggttttcagggggagcgaggatcgggctggagatgactttgcgcccggggagttgaatctgtccctgctggtcgcccgggccgggcatttacacaatcccctgagtgctgtgaatcgcttaatcgttcctgctaagcgttgacgttcgcagccacctgggaatctccgtgatggggtcgggttatctcaggagtagcagcaactcagcggggttgatttgtgctcttgctttgctctgaaaacctgagctccagctaatctcagtatttaagtggcgtgtgtttaattagcttattttacacctgagattatctcagcgactgcctccaaaatgaaatcgttgatatggaaaagaatagtctttttaaagaaaaactaaaaagagaactcttcagaatatcagctgtcaagtctggctattttacccatctcctccgtgggatagagaaagaaaactctgctttggatatctaacctattaaagtcagtggtggggctattttgggcagattttgtggacagaggtattgctacaacttgcgtattgtttatgaaatacacatgtggtctctcgaaatagcctacttgttatttcactgcattgggagttctttgacttactaagctgcctattttaaatatgactaaaggttgtttttttaaaaaaaatatttagctgaaaacaatgtctagatgtttagggaaggcagcttgtgcatgtcaccagaatttttttttgtaaacttaaatttgtaaaggactactttcccgcatctgataaaggagagactttttatgaaaaataagatctgatatcattatgtgtgcagaaaaaagatcactaaattaaagaatcactcactttccaaatgataggttaaatcagaaaaagttgcctacaactgagaattatgtaattggaccaaaagtaaacaatgaataattgttagttgccaagtacctagacagttctgaaagaagtctaggtacctttatagcactggaaggttattacatgatttaaggtgagataatctgatagattttcacctgtaaaatttttattcttacatctgccttctctgcacctaacattggatttaccaaaatatttatttgggtttatacatacatcttcataagtgccacatcccatactaagtgctacatatgtttttactcatcttgaaaacaatcctgggtggtaggtaccgtaattgtccccattttaaatgaggaaactgaggcacagagaagttaagtaacttacccaagatcgcacagctgcaggacaggactttatcatatctgcaaagatctttattaaaaagacgtgattttatgatttacttattctcgtttttatttttatttaagcataaatgatgaaagtttcctgtgaagcataacaatccctgattgtgaaagtaccccacaagcatcgttaactataaagtaaggaaaagtatgaaagaaccatctggttgagtctaaagttggaagatcaccatatccaccagaagacccaggatggatctgcaacaaagcaccaccatcacttccctagagaaatggtgtttggatgagtcactgtctggctgcagaagacattatagtgtcaagaaaaaactgaagttaattcgagtcttaggccttttcatgggtctggtagccattagcactgtctcattttcaatcagtgccttttctgagacagatacacagagcacaggagaggccagtgttgtaagtggccctagggtagcacagggttaccatcagagaactctcttagatttaaatgacaagattctggattatactccacagccacctctttctaaggaaggcgagtctgagaatagtacagatcacgcccaaggagactacccgaaagacatcttttcccttgaggagagaagaaaaggtgcgatcattctgcatgtcattggaatgatctacatgttcatagccttagccattgtctgtgatgagttctttgttccttctttgactgtcatcactgaaaaactgggcatctctgatgatgtggctggagccaccttcatggctgcaggagggtcagccccagaacttttcacatctctcataggggtatttatcgctcacagcaacgttggcataggcacaattgtaggttcagcagtattcaacatcctctttgttattggcatgtgtgctctgttttctagagaaatcttaaacctgacatggtggccgctctttcgagatgtgtctttctacattgttgacttgatcatgctgatcatatttttcctggataatgtcatcatgtggtgggaaagcttgcttctcttaacagcttatttttgctatgtggttttcatgaaattcaacgtccaagtagaaaaatgggtgaagcaaatgataaaccgcaataaggtcgtcaaggtgacagcaccagaagcccaagcaaaggttggtggtggtggattttt

SEQ ID NO: 12185 - DNA, 6000 bp, Homo sapiens
tgagtctcactgttctagtagtttactaggtaatagagagagagagagagagagagagagagatggggggtagagagagagagagagagagatggggagagcgttttgccaaaaaaaaaaaaaaaaaaaaatatcaggcaggctatgccccagagtctgaaaacattgtttgactctgttgttacacactgggtgcctgggactctagaaaagtcatatttatccccaatgctttttacattcattatctgaaaactcttccctaagatctgggattgcattaggggtttttggttgtttttttttttctttttttttttaagatagagtctcgctctgtcatccaagctgaagtgcagtggcttgatcttggctcactgcaacctctgccttctgggttcaagagattctccagcctcagcctcccgagtaactgggattacaggtgctaggcaccatgcccagctaatttttttatttttagtagagatggggtttcaccatgttggccagggggctggtcttgaactcctgacctcaggtgatccaccctcctcagcctcccagagtgttgggattacaggcatgagccactgcacccagctgctttggggctttttttttaagacagtgtcttgctatgttgcccaggttgaccttgaactcctagactcaggtgacccttctacctcagcctcccaagtagctgagatcacaagcatgggccacagtaccttgctttgctttagttttcatggaaagtattgtgggttttttaagcaacaggctttggggatacttttcatgggggcagtctgaatatgttgaggactgttgggtattttttttcttaagtgtacctcaattttaagtagtgagatttaaaaacataaggaaatcatatctagtctttccacatataaaatttacttcaaatgcttccagaactattttcactggattggtgcaattagctaaagggcttttttatttatttattttttttttcctgagacagagtctcactctgtcacccaggctggaatgcagtggcaccatctccgctcactgcagcctccacctcctgggttcaaatgattctcctgcctcactcccaagtagctgggatcacaggcatgcaccaccacgcccggtgtatctctaagtagagatggagtttcaccttgttggtcaggatgaactcctaacctcaggtgattcacccacctcaacctcccaaagtgctgggattggattacaggcgtaagccaccacacctggccttaaagtgccattttgaataccagtgagatcaaaagtgattagaagtaaaatttaaatattataatttccccaggcatggacaggtgtagtggtaagaacatttctcctttgttagcctttagcatactttataattttacaccttataaacaggaacagtgcctatgggtttaattagtgcttagttgttttgttttgctccttcatttttggctgagaaattaatgatatttggaaatatctggagttcctttttcttgaaaaggtcacaaaccactgatttaaagaggatgactttgaaaatttagctcacaatagttgtgaaataaatgtagtagtactttgtagcttaaattccggtaaaattatcactttgtcattttgatctcagaggagagctattatttgtagcaaactacaaatataaactaacgtggaattcctgtggatcaaggcatgatacatatttatatgtgtgtgtgtgtattcttttctgaaccaatatgacaataagccatctactctgaagtacagaggcagccatctatcattgacttataaagctttgaccccagtgagagtgtgtgtaagaaggaataccttgaacacttcagagtgaagtcacccagcttagctgagtgggggccaccatgccttgctcaaagcaggttctccagtcagcaaacatcagtcaaggcagaatctataggcagtgcctaggaacacagacgcaatttcagatggtgaggaaaaagcaagtgaagcacacaatttgaatcttggaaatatactttgaatcatgggtttagaagacacagggaaagggccggaaaaatgagtcatcctgcagatgttctcaaaatgatgatgacagcagaagatgtttttgcattctcaggtcaatggcactgactttaccttccgaagtgcaggcgtcctcctccttgttgtggatccgtgcagcgttccattccgcttgacggaaaaaacggtttttcctcttgctgatgtcagtcgcattgaagagtatttaaaaacaggcatccctccaaggtaggtcaagcttgtgctgtaacagggaaaagccaccttaaagatgtggagtgctccaaactgataatgcctggtcaagtccgattttttactctctggacattcagggcactatgcaaggtgttcattcctctcctacctcagattgacgcccatgtcgtctaagctgcttatcattgacaagccattgcttacctgtggcagaacttggatgttgcaacattttgcaaaatggtgggaaggctcttcagaggaaaagagctcattatttggaacattactatcccactttttattttatttattttttgagtttcgtaaaacaaatatcagagcattatactttttagtattaagttgatatactttgtccacaactccctcagaaggcttattactattttgaagtgattttccaggcagtttacctttgcaaccctctgtcgcactgacggtcttggacagcattgcactatgattgtgatacaggaagtcatcacctgggtcacttggaaatgactggaaaagagtaaattgatttttgaagtggctgagtgtgcaatcgctcttacagagcactagtctgattggttttctttgatgtctctgaagaaagctgcacaggagagaaacctttctttttctgggttggtgagaccctgcctggaggcaaggagatgaactcagggtgttttctgcctttgccgcagatgttgatttatacacccgctttcatttaatggaaccattaaggaaggaacttaagctttccccaaattaaaggcctatctagctttagaatcattttccaatagcttatgctttatagaaccggatgccaataaattctatgaagtcactggattatttggatgtaacattaaatgtatatatgtcgttctgtcttctggcttaagacacttgtacagcctcaattttcttgcaggatttaaagatttttcctaatgttgaaaatacatgcactcacttcccctaaaacaatccaggacataaatctcaccacaagtatttaggacaacatggtagtcctgcaaggtaccccatagatttaagaggtaaaaccaactcattaacagaaaggcttttaagatactggtaatgctgtttcttgatctgcctctggttatgcagataggtttcgtttgcaaaaattcagtgtgtgtgtaacattttaacaaagtgttaagaaggtatggagcaactggcagtgacttctagggagactgagcacgtgtctatgtgtatagggttgcggggtgacctgtaaatgatcttatgggtaattctgacctattgaagaaggtcaggtctgcagggtagccgtgcttagactgctgcactaattttagattgtgtcaccactgctttagaaagactacagtaggccaggcacggtggctcacacctgtaatcctagcactttgggagtctgaggcaggaggatcacctgaggtcaggagttcgagaccagcctggccaacatggtgaaacctcatctctactaaaaatacaaaaaactagccggcatgttggtggcacctataatcccagctactcgggaggctgaggcaggagaactgcttgaacctaggaggcagtttgcagtgagccaagattgtaccactgaactccagcctgagcaacagagcgcgactctgtctctaaaaaaaaaagaaagaaagaaagactaccataaagaacccataccagcatgaaacttaaggtacttaatcttaagaaccatcgagacccacattaagacataccacacaaatttcaacttcctgtaggtatccttgatgactctgaaaataaatcaatctaatgttaccttttaattaataagagctactcagagccccctaaacactgatttgttcttgaaaatttttgtttcagtaataccggccaagagttcaggcacagtggctcatgcctataatcccagcactttgggaggccatggcgggacgattgcttgaggccgggagttcaagactagcctgggcaatgtaatgagaccctgtctctatgaaaaatttaaaaattatctgggtatgtgggcacatacctgtagtctcacctactgaggaggctaggacaggaagatcccttgagcccaagagtttgaggctgcagtaaactatacttgcatcactgcattccagctggggtgacagagcaaggaccctatctctaaaaaaacaaaagaaaacaaaaatagttgcccaggctggagtgcagtgatgtgtccacagctcaatgtagtcttgacctctcaggctcaagtgaccctcctacttcagccttccaagtagctgggactacacgtgcacaccaccagcctggctggttattttttgtttttgtttttgtttttaattttattatttttctaattttttgtggagatggagttttgctgtgtttcccaggctggtcttgaactcctgggctcaaatgatcctctcatctcagccttccaaagtgctgaaattaaaggcatgagccactgcacccggctggccaagaacatttctgattaaagtttttgaaagagtgagtttgtatgtgtacacacacacacacacacacacacacacacacagaaaataaatacattattaaatatattgctaaaggatatgcaacagaagttgaataaaaggagagactctgtttctgaatggaaaattaataaatgttaatttcatggaccagtttcatggaagataatttttccatggactggaggtggagggggatggtttcaggatgattcaagtgcattacatttacttagttaaaatataaatttgacacatttccattagtgtcccaaaaggtacttttctactgtacttgacagttgatactgtagttcatctggaagaataaatgagaaagtagtaaaatataaacaaattacagtaatacaagggcttgtttttatcaaatattaaaatggaccgtgaagccataggccagcatagttttggcagagaagagcaagatcagagaagaacggagaatccacagataggtccaagtatgtatgttggcttactatgtgacaaaaatggtaattcaaaccatggaaaacacatttagtcgtttatttatttttagaattgtgtttatccatttatttaataaatagataatagaacttaaataaatagagtatttgaaacaaaacaaaaccattctcccatgttacagtagacttactccctgatagacaatggagaaggaagggtgaggggtggatgacaggaaattactgaataggcacagtgtacattatttgggtgatggataccctaagtgccctgacttcaccactatgcaatcctatgtatgtaatgaaattgcacttgtgcctcacaaatttatacaaattataaacaacaacaacaacaatagactattccctaaaagagctgtgccccagaccatccactaggtcagcagtccccagcctttttgacatcagggactggtttcatggaagataatttttccatggactggaggtgaagggggatggtttcaggatgattgaagcacattacatttactgtgcactttttttctattattattacattgcaatatataatgaaataattacacagctca

SEQ ID NO: 12186 - DNA, 6000 bp, Homo sapiens
taagcgatgggaagcttttacaaactaatatgtccttctcaattccaaatcacatccaggttcatgacaccatggaggtacaatcacactgttttacaaccccaatcaatacagaagactgaaggcagttacttgaatgcttaaaattacaagagccatctactctagaatgaggatggatcaacgtccaggaatttctactttcctttgtactacaacaacctgacctttcaaaggtttggaataatcagtaaaaaaccttcttccaacacaggatttccagagagcaaaaacaaaacaatggcaaaaaccaaacaggatacccggttaaatctgaatttcagaaaaacaacacataatttttttagtatctgtcccatggtacatttgggaaatacttgtactaaaacaattatttgttgttaatctgaagttcatatttaactggcaaacctaccaggtaacaaaaggattctaagactctattagtcaggattattttgcctgcttgtgacagaaacccatttcattactggcttaagtaaaatgagaagttaattggctgataaaactgctaagtccagggatagacctagcttcagatatggcttgatccagaagttcaaatgacataatcaacactaggtatttgtctctatctttctccacatataaggcccaggtctctccgtgatggccataaacagcttgaggcctatattctcccaatatgggctgccttcataggaaaagataacttttctgtctcagtagttccagggattgtcctataatggagtcttactggactaattgggtcatgtgcctctccctgaaccaattactatagcctatagaattggacattgtaacaatttcttatggctgttataacgaattacccaacctggatggcgtaaaacaattgaaattttattccctcatagttctggaggtgttcttccaaaggctatagcagggaaaccgttccagcttcccgtggccgaagacatccttggcttgtggccccatactccagtctctgccctccgtagtcacatttgccttctattttctgtctcaaaactcccatttcctttccattataaggacacttacggtttattcatagcctacccagataatccaggataagagccccctctcatgatccttaccctaattacatactttgccatataagataatatttaaaggttctggggattagagcatggatatatctttggcagggggcaactgttcagcttatgacagatatttaggattgaaaagtcagggagaaatagttctccaaaaaatgatgatgttggtacctgagaaaggaaataatggatactgaaagcaaacacagcaagatatttacagcaaatactttttagtctgttcaattcaatttatttcatgcagtttacccttgaacaatctacgggttagggacacccccatctctgcacagttggaaatctgcatttaactttgattcccccaaaacttaactactgatagcctactgttgactggtagccttactgataacataaacagttaacacatattttgcatgttatatgtattataaactgtattcttacaataaggtaagctagagaaaagaaggcagcatttaagagcaatgaactaggatatctagcagaagaaatgtctaagcagtaaagcattcaaggtgttgcatggattgttttggctgcttacagtaaaattagagaagaaataaatgattaaaagatgaaatttataactaaaaaggaagcagaaaaaaattttgaaaattttcagcctggccaagagtgcaaaggcatgtttgggagagcctcataaagatgtaagtccttgtagggatatagtccagtggaccccttgctaaagagattaccatggctagaaaggagtcaggtgctattcatcaagacaagaaagaccccaatggcatttcagagattttttaggttgccccttccatcacaggcccagagcaggaccttgaaggcaaggtttccagagacgtggccacaggacctcagcatttgctaccaggcactgcctcaagtatctgctccccgctttccagcacagcactccacagctgttgcagctgtgtggctcaagtgggcccagctgtggcttaggctactgttctagagggtgtaagtggtgggccttggcggcatccatgtggtgctaattctgaaggtacacagagttcatgagctatggggctatggcagcctccacctagattccaaagaatgtactggacagcctggggatacaggcagaaacttgccgtaggggcagaactgccacagagattccctaccagggaaatgcctagtggagccatggaagcaaagccatagcagggaaccaccactaggacaatgaccaatggaactgtggggttggggctgtcccagagcccccagaactgtagagctaccagtgtgcaacacagcttggaagagctttagacatgagactacaaaccatgaggttctgtgacatgactacacccagccaagttatacagatggggcagcccaagaccttgggggtccaactcccaccctagtatgcttagaaggtgagatatagtcaagaaaggctattctgaggctttgggatttaatgttattttttccctgttgggttttggacttacttgggaccagttacccctttatcttacatatttctccctttgggaatgtgaatacctatactgtgcctgtgccaccattgtattttggaagtaaataatttgttttaatttcacaggctcattgctggaggaatttgtcttaggatgaattgtgccttgaatcttgctcatatctgatttagatgagactctggactttctagttggtgctagagtgaagaccttagggctgccaggtgcagtggctcatgactgtagtcccaccactctcgaaggctgaggcaggtggattgcttgagcccaggagtttgagaccagcctgggccacatgtcaaaacctcatctctacaaaaaataccaaaaaaattagctgagcatgatggcatacacctgtagtcccagttactcaggaggctgaggtgggagaatcacctgagcccaggaggttgaggctgtagtgagccatgatcacaccactgcacttctgccggggggacagagtgaaaccctgtctcaaaataaataaataaataaataaatattaaagcctttagggctgttgggatggaataaatgtattttgtatgtgagaaggatatgaactgggggtggtggggggcatagaagcagaatgctatggtttgaatgtgtgctccataaagcacgtgttgaaaactgaatctccagtgcaacagtgttgggaggtggggcccaaagggaggtgtttaggtcataaaggctccactcttataaataaattaatgccaattatagagggtttgaggctgcaagttcaatttcacatacaccctcttgcccttctgccttccaccacaggctgatgcagcaagaaggcccttgcaagatgccagcaccttgatattagacttcctagccttcagaactatgagaaatacatttcttttctttataaattactgagtctgtggaattgtgttatagcaacacaaaatggactaagacattaaggaaaggatgcttaacaggcaaaacatggatgcttccttcaaccaaccactgtagccccttgcacattgtttaatcaaaacccatccaattgaattttcagggccagcaactgattagcttttttataaggaatgtaaattatgtatatagatatatataaaactgcatcttaaaattttcaacttttgtcataaagaatctaacgaaaaggactaattcatcttcaattaaaatatagctcattcagccagctgccttagcacctagacatatggacctgttccataaagtgtttaagaatcactgagtgagtcgctaattagttgctgataaatgagagactaatggagaccctccttagagccaaatgatatagaagttacagtccaccagtctaagaatgtaaactatactaagagagctaaaatgggcaagaaagggaatttcctgtacctgtccccgattatggttatttaagctcactagaagatcaaagtgacacaacttaagtctgcaaaaccagggctgacatctgatacagcctcagcttctgaatgctttggtctgaccctacaacagtttaacagttgcagataacaaaaatatcattttggaatatagtagaacattcctctaaaggggtcatgtatggtcagcttctaattcagctaagaggttttagctggtaaagatacgtttcctgcagttaagaagctccatgctcaggtagcaatagggtatcttgatcaccttttttaaggtgactctttgttctggttaaaatcaatttcagctgtgagcattcctttaggtgttcatgtatttacttgtttttttattgtgatttgagagaggcgcagaggaaggagtttcctttcccagacaccagagctaggaagacatgaagacatgattctaggaaaactgttctcaatcttggccgtatactgtattaggattatctgggaagctcaaaacaaacaaaaaatatcaagttcactttgaactctggaagtgggaccctggttcctaaatgctctaaaagctccccaaataattctaatggatggcaggtgctgccagagttaagaaccattgctttagaattttctagcatggtttccctgtaggtcactagttttgtggcattctctccgggaggtacggcctcatagggcttctcaaacatcagtgcgcctgagcgtcatctgaggcgctgtttcaaatgcagctgcccgggctataagatcacacccgaaggcgtccgggaatcttcactttttccgttgctagcagtggaagggtcacagaccaaacactaaggcctgagcggtgacaaccgaggcgagatgatggtcaacagggaatgcctcgtgggagaaaaaagacaattttgtgagtataagccccctaaaaacctgtttttcgttcgcttccttctctgggcagttttgacccgacgacttttataaagaaggtaacgtgagtgtggcgctgggtgcggttggctgttcgggaacattccctcggggcggaacgtgggatgggggctccccccaggtaccctttccccacagccgcttccccgctccgcgtcgctgctcaggcgccagctcccgcgtcggaaggggcgatggggtggcccgggggaaggggcaacgcccagcggcgagaactgggcgcacgctggcgttcctgctcccgccgaggggcggccaccggccggggcgcgcgcaccgtggggccgggagtccgcgcggccccggcagcccctgcctcgcttctccgcgctcgcggcgccgcctcctcccttcgcgccgccggcgctgctcgggggcggggccttgccgctgcggaggccggagacgcggcggcgctggacgcggaggcgctgggcgcacggcgcggagccggccggagctcgaggccggcggcggcgggagagcgacccgggcggcctcgtagcggggccccggatccccgagtggcggccggagcctcgaaaagaggtgagtgggcggcgcgcggccccaggctgcccgaaccgcggtccatcgcttcctccctcctttgcccagggcccgtaccccgcgcgccgagacctcgcgtcggtccccggagcctccccgcggcttgcgccggggctgcaaccttcgctggctgcgctcggggctggctccgcaccttcctgcaccgagtagcccgcggctgcctgggcccctcggctcgctccccaagaccgggcgcgcggcccccttgccctgcgatgaggggcctcgcgaggattccctgccctgcagtctcag

SEQ ID NO: 12187 - DNA, 6000 bp, Homo sapiens; identical to SEQ ID NO: 1344

SEQ ID NO: 12188 - DNA, 6000 bp, Homo sapiens
aagtgaaaaactctaccacactggtctgcatgtattcctcacaaaagcgcggtgggcccaaggccttggactgtagtcacctactttccacgtccacgcagtgaagtttggtatgcccagatactccatatcgtttttttttttttttttgtagcgggggaggggtctgatttggtatttattgaaactcaaaaagcactacctacaaatgaaagaatggataaactggacttcagcagaatgaaaaaccgcaacttatgaaaagacatcattaaaaaaatgaaaactagccagaaactggaagaaaatatatctgtctctttgagttttcactcagaacatacaaaaaagagctctaaaaacttttttttgttttgttttggagacaggatctcactctgcagcccaggctggagtgcagttgtgcaatcatagctcactgcagcctcgtactccttgggcccaggtgatcctcccatctcagcctcccgagtagctgggactacagacgctcaccaccattcctggctaattttaaattattgtttgtagagacaagctctcactatgttgcccaggctggtctcgaacccttaggctcaagtgatcctcccacctcggcctcccaaagtatagggattagaggcaaaagccaccatgcctgggcaacacttgaaaagaagaaggcatccaaccttatgaaaaaatcagagaagaaaagaaattccatgatttgagggagacaaagaataaaaataaaaataaatcagcaaaaatttgactagacatctgacaaaagaaggtaggctaacggccaataagcataagaaaaaatatagaatatgactcctcatcaggaaaatgtgaattaaaccacataatttaaccacccaggtctcagatatcccaggatacccctggccttgaaatcttcacactggctcttcactccagctcaaatactcttcccagatatgtgcatggctccctcctttcttaaggcctgcaagggcttgttcccgccggtcttgctagtatagaccctgctcattttctctccctcttgcttgctgttcatcacaaggatgaaaatggctgtccccatacagctggtgtggtgtcagcctccagtgattcctatctcttggtatatataaacctgtttagtttccttctatgacaaagggcccacccatggagccaatagatactgcagaaattatggcatgtgacttccaaggctaggctataaaagacactgtggcttctatctggctctcttttggattgctcactttgggagaagctagaagccatcttgtgaggatgcccaagaagcccacgtggctacaaactgagtcttcccatccacacctagcactaacttgctgagcatgtgagtaatccaccttgtgagactcctctagccccagcgagccttcagataatggcagcactggctgacatctgactgcaacctcctgagagaccctgagccagcaccatctagctaagtctctcctgccttctcgacccagagaaatggtgtgaaataacgaatgtttactgtttttagctgttaaatcgtggggcaatttgttatgtggcaattgatgactaatacagatggaaaggaatatgttgctccaatttggccttggacgtaagccatattctcttaaccactgagaaagcttgtattttcatccttccaactttgctttttttgtttatccttcagttcagaacctacagaaagggaaggagagagtgagagagaaatgccaaaaaagaaagctttaaaaggcttttaagaaatcatatgcaatataacccacatttctgactccacccaagaaactgtcagcaaaatatatgttgctgtttaaacctttgagttgggtttgtggggcctcagtcatgtgaaaataacacacagatgggggcatgatgaggtcattttcctgaaggtcacacaaaaataaatggcagggctgctgatgaaatggttctggagccacatgctcacgctgtgtgaagtggaaagcaaaggtgctgggaccaccttctccgagctgcacagcaccacggaaaggacacagcattgctgagggaggggttttccagggcaggttcaagacccttctctgcagcccctgttgggttttccctagatccagaagagaggggtgtggaactaagtgcttcagcacctactcttaaaacattactctaaaagcatccttaaggattctaagggaagctaaagggaggaaaaccccaaagataaacccctggcagtcctctaaccactggggagagcagcccccccgttcagacccgcaccagcctgggcagaggaacagcctgagcccgtctaagaagtttggtaataattttgccatccagttgaggaggggctaggatcttctcccattctcctactggatttacagcagctcctgggaatgagaactgcgtgagatatttccctacacaaattgggtagagatagccggacgcctaaatacttttaacagaggtaacaagctagagctggcttagtcattttgtccgcagaccatagcaagagagtttttatttctggccacgtctgaggcctcacgtctggcacccaaggccagggctctccctaatgccctccaattaacagagcttggtactccagcaaaaacaccaaacaaactgctggataatcagttaaaagatcaatctcatggaacaagcaactgagatgctggagaatccaattccttcctctaagaggaaaaacaaagacatttgcatgtgctgagcaaaaccaagaataagcaagaaaacatgctatttgaattccgttcaaaatgtctctaataagtgaagcaaattctgcacattctgggcctctgcagagaacaaatagtgttctgcctttaatgggtaaaattatacaatttgcttttaacagtaaaccaaaagccgcggtggcttcggatagcatcgcgctcccgagggctccctccacgcagctcgacccctggcagttttgagcatttcgggggacgcgcttgtccccaccgacctgggagggcgccggtgccaaggcggcctgtttgttttcctgaacatttccttttgcaactttcgcttctcctcttcctgcctcaccgctggtgtctggggctgggtggctctcagatttgtcccggtgcgcagtgcagcctggagttactgatttgtgacctagatccccgggtgtgtcgcccccgaaagtcgggggcacccgctctgggcgcctctcctgcgtgggcagacccgccgaactccggctgacgcccccaaggcgccacctttgtgttcaagcgttccgaggcgcaggcccgagggcgggcgcaggaggcaggtccggggccccagctgcagccccagctccttgggtcccgcccgccgcccgcgcgttcccccggcagggggcgccggcgcaagcctcgctctgcccatcggggcgggcgagcggggaccctgcctcctgcgcgctcgcccgcggtccgccccccgcgctcgtcctggcggccggcgggacgccccagcccgcgccaaggaacctccccagccagcccttgccgtggccggagccgagcggcgcatccgggccggagaagaggacgacgacgaggtcctcgaagtggacccgtttgcgaagcgccagggagaaggaggagcggacgcatcgtagaaaggggtggtggcgcccgaccccgcgccccggcccgaagctctgagggcttcccggcccccactgcctgcggcatggcccggggctcggcgctcccgcggcggccgctgctgtgcatcccggccgtctgggcggccgccgcgcttctgctctcagtgtcccggacttcaggtaggatctggcgttccggcttgtgcgcagacggtagctcacggctcgcttggccagcccttccgccgccactatgctcccggccgctgcgccggcgcccatgctcctgaacgaggggcgccaggcagggccattcgcatctcgcccgacgccgctcccggcccgcaccccggaccccctcgggctggttacaataagccgcgctctggggacgcctaagtgtttccagagtctgggggcgggcggcggcggctgggagcctctcggtggcgcttcccgagggtcgcgagtgggagtgcgagtgtgaatgtgagtacccgccctgggcccgggacccgagtccgcagatgtgccccgagggtcccaggacccgggcttcctccccgaggtcttcctccttcaagggcacacggccccgagtgtcccccgtctgtctcggagcgtccccccacccccagggcggcctgatgcctggcagaatcctggggtggacgtggccccggagaagcggctcttgcggcgggggtgggggcgccggcggctcccgggtcctgactttcccagcccgcgggccgcttgatggaaacgggctctttggcatcccttttgttggtccctgaaacctcctctcccccaccgctctggggtggccgaagtggtgtgtgatctggattgaaatggtttgtgactgggatcgcgggtccctgagcggctggggcgcggccgccttctggccgcgccggggggacccccgggacctgtaggaggctggcggcgggaggggcggggcccggctcctaggtgggtttcctcccggggccccacttcccccgagtccctgcgcggtttcggctgcttggatccggggcgcagaggaacggcggggaggttcggaagtgcagcttgggacctgcctaggttgcctggaggaggcggcgttagctctggcggtgcagactccgggagcacctcccgcccgcgcgcctcgggccggattctcggcaccctgcgggggtggaggagggcgggcggggccttcaggcccaggagcgccagagacctatggggttcgcctgaagcccccggaatgtgtgagacacttcttactagtaaatgggcttcagtatcccccatccctgcactcctgcaggaaggtgagaatcgggacagtcgcaggctgggagacgctctgcttttcctgcgtcctgctgggagctgcgcgctccaggtatcctggcctgccgccctagccggcccaaggtacgcgagtcagaaaggctgcacagtctttcctgggggggggttttagtttaagcagatgttgattacgtcagacattcctaattacttgatttgggaagggagcttgcgtttatctcactgtgcattaaagcataaaccgctcagagtgcacaataaaataagtagaccacattctaagttggtatccatcactcaagacctctgtcgatttctgcaacccctcccccaagaatctcccaggagatccctttgctgggggagaggggtggcggggaggcggcttaaacacgttgctggacgtgctgttgggcggcttttgctgttcaccctgcggttaattgtcctacaaaaactctgccttgcagaccatgagggttgagcgcagcctttgaggggcggtgctgtggtgggggtttttagatgggtgatgaggaaagcatgatgggtccattgcttaagccaaggtggttgtaacaggaaagttccttgagttttgggtgaaggaatttaaacactcatagtttccagtgaatgtacaaatgtcttatatgaacaaagcaattggagtcgttttctttaatttttgaaccctgttctttttctagtgaaatactcataatctttataggagagggcataggatataattctcttcgttctgtatggctaggttaacaaaatccaaagagtatgataatttttattcaaaataataataaaattatatgattacaggagatttgagtgtttgggatcttttctgctgtgaaaagaggagtccctgttatttgagtgtgttttatccacgaaataatttattatgtaaaact

SEQ ID NO: 12189 - DNA, 6000 bp, Homo sapiens
acaggggaagcggcgggtggggggtggggagattaagatagcgctcgttagagccgaggctccggagtgcgtcctggaacccacgggtagaatttacaggccgggaccattgtctgagatgctgaaaagttaacccatcaaacagcgggcgagggggctcagggcactgaaagctccggggatcaatgttcaaaacgtttaggaattaagtcaaactaagggatatgggcctgagtggaagaggctttgccactgaaatgacgtgcatgtggcagccgccggaaccagaggacatgcagccgcgtgcggagagtgaggcggatccattacgggcacacagcttaccatttccttccagaattccttcttccaaacaagctatactgaaatccctctagtaaaagattgagacgaaacactaatagttttgggccaaaacgtggtggagaagtttgaaaagacaaacatagcaacgtgtctttggctatatggttccttgccctccagcaagcttgaaatataaaaaggctaacatgcaaaactaggggtactacccccctcccccagtttttaaaaagcaatttccagaagcaaacacacaatggttcgacttgaagtgtcggcataaccattcagtaagaaaagctagaatagtaaacctcttttcctgttttgtgctatttatcaaacctaataaacatcaggatcgtactcaaagatgaaactggcaatgtgtggagccgtctgagctctttatcaactcagtgtcattttcctcgcatgctgcccgcctgctttccgagtttccgcagcccttccctgaggcactcacaaaatcacgtgctccttaagcggtctgagttttgaatttccgcgctggcccggtgctcaggtccccctccggatcccgcgaacgcccccaaacacctccaccccgtctccctctcttcctcgggacatcccgccctgaccccggcaccgcatacggtttgcgggttagggggtcgggggaagggcctccccctgaagccggggaggaggagaggctggagggaaggtggccaggctggtgggggaggggagattgagggagggagcggggcgagggaggaaggagaaggcgcaggccgaaggaaggaagcggggaggggaaaccgccggggaggaaggaagggggcggggagagccggcggacgggccccctgcgggagccgcgtggaccgccccggtggccggcgcgccccgccgcagcccccagcgcgcccgggcagccagcgcggggccgctgaatgggcagggactcgtgagcgcgaccattggccggtcgcggggaggcggcgcgggcattgggcagcgtaagggggccggtccgccttcaggaatgtactacggcgcgtccggcacgtccgtccgcgccggctgggcgcgcgcctcgcctgggctctcgggagaccgcgctggaggcccggagccggcccggcgcatccgcctccctacctactctgccccggccgcgcgggcgcggggagtccgggagccgggcgcgcgcgcgcaccgggcctcctggcgcggggtcacgtggccaccggagctccgccttctccctgctcctccccctttccctccatctgggtttctttctttcctttcctttctttcttctttttttttcaatgaacatacaccgtgcgcatcttaaagccacaccgccccatttcacgacttcactagacttctcgctactgccagtccctctgcagttcaaccccgtttaaaaaaaaaaataaagtgaagcaaatcaagggtttgcgggtcgggttcctaccgcagggaggaacgtaataacttggaaacgtaagaaaaacacattccactttccgaaaacaaaaatttttttaaataaaaagcctagttgtgtagacgtgtctggctccagaatccacctcaaagggtcgcgtgttttccccctccgcgggaagcgaatccccgggatgccttggtgacactggacgcggtgtcgggacgaatcctcgcgatccgcgcacagtttgttttcaatgaatccagcatcggggcatttataatctcctacgtcatactattattaaatataacatgcataccgagttttgtaaaaaaaaatactgactatataaacatctggttaataaaaaggggtgtacaaatgaacccaaaataatcaggaaaactttactctctcaaggaaacaattccgtttctctaagttgtaaaaaaagattctgttgtttctcttttacttatgtcacattcgagattcaaataaaaacgcctctgcctctacaagactgcttcggtgtctggattccacgtttatagaacactgactccttcaaaccaagactgtgttttttttttttttaagttggggggagaaagcggctggggggcagacggattttaagaaagatggcttttcccaacgtccttgctttcctctttaactttccattctgtttatcttaatgcgaggcgttgttccctgcaagagcctaagtcttccctttagttataaaagaaaagagaagaggaaaaaaaaatctggcacacactggcgcactatccagcacgctgtcattattggtgcaggcctgggaatgcgagccggacctcccagtatttgctgcagcttgaggccaaggtgcctctgaaaggcttttctttgaggaatttcagaaattgtttaagcgcttaaaaaaatattacatttccccccgtgtctaccgcgaggcaaatgttcgtgtgtgtgcgtgcgcgcgcgtgtgtgcgcgcaaaggcatcccacaaaaagaagacactgttgaaaagaaaaggaataagagagaaaggagggggagcattccttaatggaagtattgcatgcgagaaggttggcgctctcagaggctgccccgaagccgaggatgcacacactgggttgcctacctgggtggtctctctactttggtgagctgttgctaagcagctaataatagtcatgtttgctgagtaatttctgccctccgcgagccaatcgcgtcgcagaaacccaagccatctgacagccccgggggcgggagctccagcctttttctctttcgctcgctctctccccctccaccccctcccctcccctcctcctcttctttctccaaatggagagagttcttttttttcttcttccatctcatctattgaatcaaggagctgctgcggccgctgcccgctgcacacacacagagcggagtccccaggtcccgggagcgagagaggcgcgctgcacggggacagaatggtccagcgggttgccgaggagcacaagaaagcagagtccgggaccgagcagccaccgcgaacccagcagccagagcccgagcagcccgagcagcagctcctggagccgccaccgccagcagcagccaccgcgggagcagcggcagctgcggctgcccgggcccggcagcgctgagacccgccgggcaccctcggaccccgcggcggcggcggctctgcgcttgccctccgcggccgctcgggcgacccgggaggcgccgagagagccagcgcggccggcgggagcagcggggattcgctggctctttctgcagtgaaggggtcgcggcgcggggcggggggcgggtagggggagttggggaccgcaaggagtgccgcggaagcgcccgaaggacaggctcgctcggcgcgccggctctcgctcttccgcgaactggatgtgggcagcggcggccgcagagacctcgggacccccgcgcaatgtggcaatggaaggcgcagggtctgactccccggcagcggccgcggccgcagcggcagcagcgcccgccgtgtgagcagcagcagcggctggtctgtcaaccggagcccgagcccgagcagcctgcggccagcagcgtcctcgcaagccgagcgcccaggcgcgccaggagcccgcagcagcggcagcagcgcgccgggccgcccgggaagcctccgtccccgcggcggcggcggcggcggcggcaacatggcctcggctggtaacgccgccgagccccaggaccgcggcggcggcggcagcggctgtatcggtgccccgggacggccggctggaggcgggaggcgcagacggacgggggggctgcgccgtgctgccgcgccggaccgggactatctgcaccggcccagctactgcgacgccgccttcgctctggagcagatttccaaggtgcatttcagactctctcctcccactttctcttccctcctctaactctttgggatcgcccccgccacacacaaacacacacactctcttcctctctctctcacacacacacacacactcactcacacctctccaggaaaagcagcagacaaatggggattgaaaaattcaaaccctccctctggtcctgggaggaaagggctgtctgaggtccgcagggggtggaggtgtgtgtgtgtgcgtgtgtgtgtgtgtatacacacgccctccctggtgtgccttttccggagcactggaaagccgtccacggcggaccacctcaagggcggccgcggcactgtcctgccccgtgccccctgccctgaacttcttcctcctgcgcccctgcccctatttgcagcctaaactcctgtacggctgccacatttcttaacatcttggagggggaggcggagtggagagaggcggagagaggaaggggggagggagccgaaataaaggtggtttccttttttggcagccagttttggttttgttgagcatgaaatctctgctcccttaaaaaattattctcggaaaaagatatcccccccgttttccaggttttgagccgcctctccttagggcctggtcgggggaggaaaagttgtaaacaaattgccaccttaaattcgcggtgcgagtctgcggagctgccgggttcattgtgtttacgaggctcgctgaaatgtgtggaatccagggaaggcgagcacccagacgggggcccgccggggccgcggccagcgccggggaaatgccgcgccggggagcagcctgcgccggcctgagcccttccctttgcactcggctgttttttacgtttaaccagaaaggaagggagaggagggaaagatccatgtggctgccctcttccgatcacaaatattgtcgtaagttgcagctggctgccccacttcctaattcagctcacacagcctctccccacgctatggaaatgcgtcgggagtgaactccggcggccgcgctcaccacgtggatccccacttactaccattctcggcgggggtccagttgggggaacccgcaatatgttgttccaaagagcgctcgcccctagcgcccgtccccgagggtgatggacagagcaggactggtttgctggctcctgaaccttgggctccatcgctgggattacgcagcccctcccttctcagctctggggtgaatattgtctgtgtcgagtggtttctctcctctctacctcggcttcctcttctgtattgcagccccagtgccccaagtcgctcagggatcccgcgggtgggggcgccctgatgtccccgaggtgcagctcccacgctgcggcccggctttatgaccgagccccccatgacgctcagatccgccggggctgcagtctcgagggcgagtccgtgtgccgcggccacccgcgcccccacggctgttgggggctcaccgggcgggtgcgcgcaagcgggcgtgggcgcgcgggccgcgactccccggcgctcactcctcccttctgcttcgtccccaggggaaggctactggccggaaagcgccgctgtggctgagagcgaagtttcagagactcttatttaaactgggttgttacattcaaaaaaactgcggcaagttcttggttgtgggcctcctcatatttggggccttcgcggtgggattaaaagcagcgaacctcgagaccaacgtggaggagctgtgggtggaaggta

SEQ ID NO: 12190 - DNA, 6000 bp, Homo sapiens
gccattagcctataccacctgccgccatgctctgttgaattcatctgtaaatgcccacgtcgtttcctcacatttcacaaagacttagcacctaccttattatcactctccaatacttttcctgtcatcattcttaatgatttcaatacccatacagataacctttcctatacttgaatcatcaagtcactgacctcctcttcaccaatgatcttgtcttctacctccttcagccaccaactcccacatttagtcttacttgtacctacatgtcctctataagctcaatttcaaacacctcattcttcacaactaccactatttttccagctcactctctccagtttccttactccaaaaattctttaacctctccaggatctacaatccattggtcctatacctttcacttctctcacctccttctttactgaacttaaattccatgatcagtcattatatagtcatctactttacagcgatactcctttataaagcattgtctctactctctttttcctaattcctctcccctcatattctcttaagctcactgaaaacagggtgccatccccactatttcaccaacaaaggtgttttggtatctccagtgaactattattaaatataacacctcagtcctccctttattccccttgttccaactgaaacctgaatgagaacacatcagcagcacctaatcagctccttcttgaaatactttcttcattgagcttctgggaacccattctctcttcctatcctcttacctcattggtccctctttgtttgtatctttgattagtcctttctcattccttgacatgaaaatattgtagtgccccagcagacctctttatgcttattcattaaaggagtctgtagtctcatagatgtaaacacaacttacaaaatgacgattcccaaatatacagctttagcccagacctctctctagtatccagcttattaactacctatccattcagaggtcaaataagtatctcaaacttatatgtcccaaaccaaaccaaactcaattcatcctccatgactcccaaaaatctgctcctctcatacacttctctagctcagtaagtaaaaattccattactttcaaaatcctgggatgatcctccctcctatctttcatgtgagttatccaatccatcagcagatcttatcaatgctacctccacagtggtccaagccaccatgatttctcattaagattactgcaaaggcctcctatagcaaaaactctgtgctaagtcctgtcagcctgccagatttcagcacagctgtggtggacagctccatttacactgccattgttcccacttcaagcacactttggagactcagtttttctgtcccgcaatcacagctggctcctaacagcaatctcaaaatgcacaggagggactgctttcaatggcaaccttcaaccaattggagcggggatcagtggatacatgcctcagatccccacctttggagagatgcagttatagcgaaagagagtaagaagaagaaaagaaaaaagtctgctagctggactcttgtttataatccttgcttttctatagtctccaaacacaagtcagagcatgttagtctcctacttaagactatccactaactcctcattgcctctggataaagtccacactggggtgtgtgctatgtgcttcccataagtatgtgcttatccctgtcaacagcacataccccactctaaacagtctattcccttgtcagtgctaccctacaaactaaagtctaggggctgtcttcagtgtaaaggatagtgtctggcaaataacaaatactcaacaaatatttatatattgagtgaataaatgcctttggaatgcatgatgcaaggcagtgctaaaacaaaaatcacttcctgccagcaatattaagtaccagaacctcaggcagcctcagaaatgacacttcatcaacaactcactatgaatgttcctattattctgactcaaaaaaaaaaatcagcctctctaaaataaacctcagcctcaaaatcaaataagcaatagatgtggttttgcaagccatacaaatgtaaagcattttacaaaatgtaaaacattttaatatcacatccccatgtctgattttcaaaaaagcaaaatcttgacgtagatcaaaacctgtaaacttctgatgtctaacagatatataacattactatgagattttggtatataatactcattttgtcagctccataagagcaaggataatatctatgttatgcaccattatattatctagcccaatattagctatgaatgcctcccatttattgactatttactatattaaatgcaaagtgttagcccttaacagggactcttattttatatgcataaaaatctaatgtagcaggtactctaattacattttacagacaagaaaacaggcaaaggaaggataacacaaggtcagccagctaggaagtggtacagctcagagtcaactccaggcaatctggtctcagactctcactcttcaccatactctcaatgattgctaaactgtctcttagaatctggtactgactttttcagtgaatgaaaaataaatgtgtatcttcccactgctaaatacctatagttaatgttgtatcaggcaccaccttcccagattctcgaaagaatataagtacaccttgaaaacaaagaacaactatcaatctacctctcctctagaactgactaccacatcattttacctactttcagcctgttttatttccctcttcttttcaaatagcttccccatactccagaaagcttccatgaatttttagtttcaagttgcaactgacagaagacaagcacactttcatggcactgtttcctcataccgttgaagagacacctcctagcttaattgtttccactgtggtccctgaatcttcaacagctgccttcttctcaggaggcatggaggtgccaggttctccagctgctcttttatttccaattcctgacattttggcagaagaagacagtcgttttcctgatagaaaaaaaggcagaaactgacataatatatgtaagcaaagcaacaatagagtaaaacaatagagtaaaaactagcaacttttctggccaaccctttaacctggatccattaattccacaaccatctccatatttctctttgaggaaaaaaaaaaaaaattaaattgtagagtaaaagtcaaggcgggccgggcgcggtggctcatgtctgtaatcccagcactttgggaggccgaggcgggcggatcaagaggtcagaagatcgagaccatcctgcctaacacggtgaaaccccgtctctactaaaaatacaaaaaattagccaggcgtggtggcgggcgccggtagtcccagctactcgggaggctaaggcaggagaatcacttgaacccgggaggcggagcttgcagtgagccgagatcgcaccacagcactccagcctgggcaacagagcgggactccgtctcaaaaaaaaaaaaaaaagaaagtcaaggctaaatttacatgactataaatttctaaataggatggtgataagaatggtgataagaaatgagacaatgggcaaagggtgaagagaccaaaaataaagttctggaatctctcttcctgtaatgccaaaatcagaaaagggcagtttgattatgccagaagttaatactacagtgttgaaagaatcacagagctgaaagagatctgtgaaatgcctactaaagtcattagtactagacaagtcagttatcatctctaagcctcagtttcctaacccaggaataaataaccacagtatatacttcctatgcttattataaaataaaatggatgatataattatagaaagaatttggcacaaagccgaacacaaagtaagcactcagaaaccccagctcttctttaacgtttgcagtgttttccctatttccaaacgctctctccactgttttatgcaaccctacgttagttagacctgggtgcgaatttcagttctgcctgttagaggccgtgttgctttgaaacagtgaattcgccaagagcttcagtttcctcaactgcacaatattaacgaatatatttttcgtctgccctgcctacctcccagggtgctcaaaggaggcggaatggatgctaaagcactttggctacttcaggaaacaacgcagccatcaccgagactaacaagactactctgcttccaattcaagctccaggagaggactatcgctggcaacaacctcagtaggacctcgcctggagagagaagacacagaagcagaacaaggctgcaatccaactcgctaaaagccaaagacctcagcctcagcgtggataattgcaggcccaggagactgacggccccaaaactggagagggtggagactcctgaggcctggcacagtcctgttgggccctaagcgtgatctaacctaagttctttgaactggcgccgcgcgggaacagaactcgcagcagttactcaccaaggcccgtgcagagattccagctctcacccctgacccgcggcggagacaaggcagaacttccgggaggcggggccacggagaggaaaaagggaaagaaaaaaggaagtggcttcaacccagcccataggactatgagaccccgccgggcggaagtgacgtacggagagggcacgagaagcttgagcaagcgccgcctccctagcaacgctgggcaagcgcgggaccctctcctggctacgacctctaagagtactcgggcctcgctgatgcctgacggagagcccttggcttttgttgacttgttgacctttgctactgcgatctggtctttctgcggggataaagttcctcattctgttgcttgtcattggggttgccatcactcgttcagacggccgattggctgacggtcccgtcaatctccggggacatgactagcctcagacacctcagaaaattgttcgttggtacccctacgtgctgaaatgaagagttctggagagaatctgagggatttgaggaatttcagatgttggggattttttcccccgcacagggagcggtattctgccctgtctacacattagaatcacttggcctggacaaaagcttttttaaaaaagcgttcccctcatctcctccccccaaaccccgcatttccatccactagattctaatgcgtaagcaggagtgacaactactgcccttgtgcttttttgggaacaagaaattgtccagggaaaagataaacgccaatcagtctctgatctcagtactagtctattttaagctaattaagcattgatttttttttttaagtttatgacaaactgctattttccattcagttaaactaaatgcgttttaatgataggacggtaattaatctaacctattaatgaaaagctgtatgtctcgcagaactatgataaactacctaatgacgtcagctaagggtctagaaatggaagaatgatcgctatatcttttttaaaaaatagaatttaggcatcttgggaaaaaaagaagctaatctacactggatttctgttagtgtgaagacttttgtccctgtacctgctagggcttacctgtaaatgaagtaagatggtcaacaccagggaaacaagtgttcctggtgcctggcagtggaacaccttgactatcttggaaagaattaactggccccaagtggacttcacatttcattccgtgaagtgggagcctgagaacatgtgagtggggacacacctgccgaaaagcattgtatgagacaatgacactcattctctcatcttctttggttcctctactcttagcaagcctttcattcatagaactactgaatggcaagtaatggtttttctagcccagaaaactagaggttcacagactgcatttagccaacagttatgctttgtttattttagacagtattggctgtcctgcgtggttaaaaacaa

SEQ ID NO: 12191 - DNA, 6000 bp, Homo sapiens
gcctcccaaaagtataaaaattagccggatgtggtgtcatgttccctgtagtcccagctactcaggaggctgaggtgggaggatggcttgagcctgggaggcagaggttgcagtgagctgagatagcaccagtatactccagcctgggcaacagagtgagaccttgtctcaaaaaacaaaacaaaacaaaacaaacaaacaaacaaaaaaccaactgtaaagtcaaatatttttctgtatttctaatatgtggacttattgtaaaggagcaatataacttctatctaaaagaatggtaatagactgtgctttatatctgtatcactgttgcataaacatctggtcccagcctctctccatcctgatgtactgccagccttggtgtgaggcatttttgtctaatatgggtgcttgagctcatgttcattgataaattctgacctggccatttggctgccagcacagatgtaaatttagccaggtgatttatctcagctcagacatgtaaattatgtagcaaaagcaagctagctactacagtactgagatagacacttcatgtatgcagcagtcaggcacggtgctcagccaccttcatccagcccagatattacccgccaataacattgttcgcttagcttgtttaatgtgggtcagaaacagttcaagtacaaggtcacttgatgaaaagacctaacccatttttcctgcactgaaccacatcccttagagcttggactctctgttggattacgatttctattttgtaataaaatgtatccacttagcatttaatctttggtctcttagtggtttttcctctttaacatcaatcatcatatccacttccagccagtaacaaggtggaagagctgaagaagattgctcttctcttttaaggaactgcccagaagttgcacaacacttctacttaaatctcattaaccaaagcgtagtcacgtggtcatgtgtagtttcaggggagtctggggaaacagtcctttggatagatccagcaaaaagatggagttcttgttaatgagaatgagcaacaactagcagactttgaaacaatactcaatgaaaatcttaagaaaaaatagtgactatataatctcattagggctccaaaagattgtaaaaataggatactgttttatggtaatcaactaatcattccgtctttttttcttttaggactttccgtgacatttctgaagatctgaaatcttcagtaggttgatgtggtttcctctgcagtgatttttctaggaagttcaaatttgacagcgagttcagctcagctgtggccctctgcccttccagctgtgcctagcaagcaaaacccaggaaagaagcagaagcctcctggccttacatacagaatgcctggacaagagagaacttgctgcgggctgctttgtattttaaaacacagcttgagagttcagagttggtggtttgctcacttaactgttgttaagatggcttgaaaagtttcattttatacactggtaccctggcttgaaatttttccactttggttatctatgttactatattatatatttataaagttattttaagaactctaaactacctgctgttaaaagaatagatggtgtaattttttcctggtttaagaaatgtattgttaaacttttctaagacagtcacttttcaaggaagagggctttcacttttgagtgtgtagttgagtgagcaggaaaaatgaatcttctacccttctcccacaatgtattatacgctctttaagaaataataaatcataagtataagggtggggtggcttatttgatgttcagttttatattataaccctgggagatacaaagactgaagctcttcctcctcttccttttctcttcacgcttctttacactattgccaaattataaaacttggctgaccacgttgaagtgaaatacttattaagctgctatgaatggtaacagtatgataaaattcatgctgttattaggttttctccttccaggtggttgaagtgaaaaatctcaggtgtagcaatactctgatttgttaaatgtatccgtttcattatttggaactctgccaataagttagttttcagcagaattttgtatttatgtagtattttcccatctcttagcacagtgccttgcacatgactctaaatgaatgcttgttgaattgaattgcaactttaaaaatatctcagatatcacaataaccagcatagtgctttacattttacaaagtccttttgcacatactatttcacaagtacatcacatcagctttcatatagctttatattattttacatcagttttacactgatggagaagctaaggttcagaaaagtgaccaactcaaagtcgtaaagtgtagtaggatttggcctcagatctttgactccgttgtgtgcagattctgctgtattagtgttccttctaaatattgtatgcagttttcccagtgttacgagattggtgttgctatccatttgttgtgaatgaagacttgtcctatagtacatgacagggctgagagtggactgtagttcttagctgaaccctttctactgtttaaaacaatcatcaggcctatcctctgctcccaggggaatgtgggagagaaaagggttcttggccaggctgtaggtggtggctcacatctgtaatcccagcactttggaaggctgaggtgggtggattgcttgagcccagggatttgagatcagcctaggcaacatggcaaaaccccatctctacaaaaaaaaaaaaaaaaaaaaaaaaattagctgggcacggtggtgtggctatagtctgagctactcaggaggctgatgtatgaggatcacctgagtccaggaggtcgaggctgcagtgagccaagatggcgccactgcactccagcctgggtgagagagtgagacactgtcccaaggaaaaaaaaaagtgttggggggtagttcttaagcgttgaagatttcctttttggaaagtatttaaaggtagaaatattaataatttttcctaaaacatctccctaagaagtcactgataattataattagtttaaatttattcttacactacttaagaaaaatttcatttagaaaaggctaccatgagatcttttgactatatggagtagactgcatacagatctctttatttctattatgaatattttagcgattataatcagctattccactgagtattagatttggtcactaagtaactcatgtttttctttagtcaatcattcattcattcactaaaacatttgttgagagttggctaaactctagattctgtgccaggcactgtacagggtgatggagatcactcataagaaggcctcttgctcttagccagatcatatgtaatactaaatttaaattttttgcattaaaaggctaaaaaatcatttgtttttgttaattatatactggttgatttatagatgtaattagcacatattcataagagacaaatatatacaatgagttactatacatatacaaagtgattttagctgtataaagtgatattgcaaaaaactacagctaatgtttcttgctgggtaattattagcataaatatcaggttcttagaggtctttaagagaatactttagagctaccaaaattagcagcagtgatgtaatatcaccctgaaataccaggagcagaggtgccccagagtgcttcacagctatgatcaggaaacttgacctgccccattgctacagcaacggcataaggactaggaaggtccactagctggggaggtcttggaaccctccgagccagaaagaagcattccagcatgattcctcagatgcaatgaggaaggtttacagaattttcacagggcaacagagatcaagtggtatgaaaaggtaggagttttaagctcaagtctcaaagataacctacctttacattctcagtcagaatttgacccagaaagaggaagtttcttcaggaacagaccgtacgttgatgaagtagaagtcatttcagtaaaaacggagtacagaacttggtcataatatcttgcattttatagatttattaaagattagtttcaagttcacattcgctattcagttgtaaaccgaatggatgggaggggagaaaatacaagctctccacacaggtatgctcctctcttttctgagagagaaggcatgggattttcagcataaattccatgttatgtgagtgctgtttgagttctgaagttcctatcaatatctgttcctgcaagtgatctctgtaagaccaccttacatgctggtcttagttattgttaaaattgcaaggtttcttcacaccctctttgataagaagtgtttagctggcagagctttcccttgacttctgagtctagtgtgggttggcccatgacagtgggaagaaatccaacatgttacatggagaccttgtatgtaaacaaactctgtagcctttgaaagtggaactgctttttacagttaaagggctgctaaatggcttgcagatgagatcttctggctcaccttgatcttcacatgaacccattgtgacctatctggatttcctaggacctgtagtttccatttgggttatattagtgcctcaggaatgtgtcactactggtcaagcaatactcagaaattcaggctgtgaggggttagattagaggaaagtaatttaggtgagctatccagagctttcaacctcagggtttataggaaaaaaaaacaaaatacaaaaacccttaggacttctcatactctagccctgaccttgcagtctcctctgaggggcctcctaagacccttaaaataatattacaataggactttgagtgtgcatttcacagtggaaatagcctctggctagcattacttccaaatgctagttccagctaaaaacaagtactttttattagtttcttgtctttcaacattctgccatcaaaatatattcattttattaacttaccgattattgggaacctgcaaaaaaaaaaaaaaaaaaaaacacacatgctgtctgcagccactgtttggttatttttgatagtttaagagaattataaatcaagttgttctgtctactagagtcagaaattctgtgctagaatgggacttctaaaattaggtggtcctgtcactttctagagaaagacccaaattcataggtttaagtggcttgtctgacatacacatacagccagttagtaacagaattcagaatagaatagagttcttttttttctgtcagtccgttgttctacttctctttccttttcttcatggttgagcagcttttggcaaaatgtgttccatatagcagtagttccaagagatgttaatagatgtaagaaaaaaagtgtgtgtgtgttgggggtgggggattgcatggtcaattaaaatgaaggaatgctgagtttgtttccttactgtaggacttctaagagttttgaacatgctattacacattgtgaatttataaaaggggacaaacactgtttgaccttagactgcactccccttctttattcctcagagcatctcaaaggactacagggtcctttgagaaacatggcccttgatcaagtttacaactctttgagaagacatccctaatggaaatactgaatggcagatctattactgtggtaccatgtagtgtgtaataaatcttgaagtccagaaagcaagtatatttgctgtttagagctatacttaaggtatagagattcttttccacctgtggtgtgtaaaatcagtattgtgtttaattttgcaggtttttcaaggatcaactaatgtgcaaatacagtggtgatatattgatattacattttaataatgcttttgtatggcactttatagttttcagacaccttttgtaacagccctgtgagacagacaatattatccttattgtacagatgggggggctctggaggctctgaaaagtttttggtgata

SEQ ID NO: 12192 - DNA, 6000 bp, Homo sapiens
gaccatggggagagggagagggagagggagagcaaaatcagtatttttcttagttacagagtgattatacagaagatgcaacagatactaaacctgatagggatatcgagttagagctttcagcacttgatactgatgaacctgatggacaaagtgaaccaattgaagtaagtgccacaattagataattgagaggctttgtttgattgaaaatttataaaatactttcatactgaaggattaacattttattttcttaggagatcttggacatacagcttggtatcagttctcaaaatgatcagttgctaaatggaatggcagtggaaaatgggcatccagtacagcagcaccaaaaggagccaccaaagcagaagaaacagagtttaggtgaagaccatgtgattctgtgagtgttagacagaaaattcataaacagtgggcataggacataataaagagaaaaaaatgcgaaattaatttttggctttatgctgtgaggggaagaccttatatgggcaatgatttggtcaatctggatttttagggaagaaaaagtaaaattgaactaacaaagcagtccattttggtagcctgaaacttgctttttgttgagataaagttaatctgtgttccagcatcaggttatgcttctttaatctggttgccaaatttctagactacaaaatggagaatgacaacctagattaatggtttctctttttgaaaatcatgttaagattttcttggctaggctgggcgtagtggctcatggctgtaatcccagcactttggaaggctgaggcgggtggatcacaaggagttcaagagcagcctggccaacatagtgaaaccctgtctctacaaaaatacaaaaaaattagctgggcatagtggcgggcacctgtattctcagctgcctgggaggctgaggcaggagaatcgcttgaacccgggaggcggagacagtgagccaagatcgtgacactgcactccagcctgggcgacagactgagactccatctcaaaattatctatctatctatctatctatagatagatagcatataatatagtatattttcttggctataatactgccattttgaataattactgccaaaaatatgggcttaatcttcaacttggtagtttggccttaaactaactagtattttaatttttatcataacttttggaaaacaggacttttcaagccaggagtggtggctcacacctgtaatcccagcactttgggaggccgaggcgggtggatcatttgaggtcaggagttctagaccagcctggccaacatggtgaaaccccatctctactaaaaatacaaaatagctgggcgtggtggcacatgcctgtaatcccagctacttgggaggctgaggcaggagaattgcttgaatccaggaggcagaggttgcattgagccgagatcatgccactgcactccagcctgggcgacggagggagactctgtctcaaaaataggaaaacaggacttttctagttacttctgatacttctagtgataaagacatgtctttgctagagactcctaaagtttgctgtagctttcattaaatatgtatagtcacccttaacagtttgcacttaaagctaatttgtttttaatgtcatttcttttttctcagggaggagcaaaaaacaattctgccggtaacttcttgctttagccagccactcccagtgtctattagcaatgcaagttgcctccccatcaccacatctgtcagtgctggcaacctcattctgaaaactcatgttatgtctgaagataaaaacgactttttaaaacctgttgcaaatgggaagatggttaacagctgaaaggaggttcatctttcaaatttgtgaccacaccatggaagcatttacactagctttttatatatataatatatattatataatgtatattttttttaaaaaaaagatattactgggggcatccatttcctgtggactctttgatacttcaagccctcttgcattagcattatgaaaaaaaaaaagaaaatttactttactagggtaacatgttcactttccagaaatgattggaatttggacaacatttaacttaagcttcaagcagctttttatgagtttgtagcaatccggtgcagtaactgagccatttcctattttaaatggcttctatagaaaattaacaactcagttattaaactagcaggatcctacaatgatacatctagtgaaagtagacttagttaacttatttatttctattttatgtttcactgagagaagtttccatctcattccagctgctttatttatctttttcatggaactttgcatggatttctttttctttttttaattttgaagagtggagttagatgttcttaccatagaattttacagggttatatactagcattctttactgcattatatgtaggagtgtggtgcagtgcttttatctgtagcatataatttttttttaattttccatttttcaagagtagtttctgctttgttaatatttatacacaggctacttgttgaagtaattaattaaaaatataaccaagtgcctaagtctttcagctgatgtactagatattaaattctcctaagttatgcagaatcgtttttacaattttgataaattatgcactaatgtaatggcagttttttaaaatgcagatttaagcctgtacattattgaatctgatgacttggcaaaagaatcaggtgctttcagctttcttgagaaaaccctgtatgtagcgtttgcactgactaacaagatggtattgctgggtttttaatttaaactaattaatttggttgttcattgcattatcttggttaaatattgtttattgttacttcatgttggggtttagtttttcttgttttttgactgttaggttgataagactatgaactgtgtaatagtagaacagtggctaacatttattcatacttaagaacatgaataatttctgccttgctaaaatgtgactgaaatggttttgacttggcatctgaaagtatacaatgtgttcaacaagtcatgcatcagatttgtgggaggtattgtactgaaacctaaatttcagtcaacatttgaaaagaagagctgggcattccttcctggtgatctttacctatagtttatctatctgtttttcttctgtttctttaagattagtttgacttttattattatttttttaattaacttctgtgaagttgtttactctgaaaattgtactggaatattttaagccaagctgatctttcaccaggtgtactgtatgtaagggcttttcctgctagcaagatgcttaaacaggatcatgttattggtcgtctgagctatttagttgttttacaaaaccacagcattgtatcagataagattttgataaaaagttttgtgcacatttccaggggcgggagggttgacatttccctgaaatttcttgattagaatgagtaaatactggtgtttgatacctgtcttaatgaacatgctcataaggtgactgataagttgtaaatatacctgagaaacaaaggggtagttttgatattctggtgtcagtatggaagatcttacacatttatttaatactcaaatgtatgaagatgtttgtttgtagcataacaacagcacagtagccttgacttagtttcctttggttagtactgtaccttttttgccatggccagtgctccccatccctatgaagacattttatttatttcactctgtaacctgaaatgaataggaacaagggttttaaaccatgttacattaacttttctgacattataaattagcctagaatattacaggaacatgattgttatataatttatatcagaacctttctataaatatgtgcttattacatttgaaatgcttccaatgtactttatttgctgtttgtaattccaaaaaggatatgcaaaccagtctgtctatttcatggatatttaatagtgagatcttccatgttgaaggtaatgtatttttttttaagattttaaaattgctattttgttacaaaatagagacctattaacagtttgagagctccttatgtgccctcagggaaagaaccctctgtgcaacagaactacacaaaacatcttcagcacgttctgagggtgaatatatactacataaattgatcttgtgtatttaaccttatctttttaattttaaaattgaaattttgaaacttggttgtgctctgctggagggggttgggataaactgcttagatgtttgcctacttgtccagtgaaattacatttgcatcagtatatgtatatacctgccaaccttattggtatgtctcagaacatttatattaaaataatgcttgtcttgcagcaggtgatcccataaaacaataactccctgttcttaaaaacttactctctttttcactaacaacataggaattgtttctgtgttgagattattctgtgttgcatccattctctatgtagtggtcaccttctgtctgtcatggtgggcttaatgtgaagtaaagccattggttctctgccactttcgaagaaagggcagttcatctgatccttcttcagaatggtacctactgatatcatcgaggaaaatgttacaaatcagacctaggatatgactttttaaaattgaggcatttcccgtcatttggcctttttaccaacaagatgtgatgtacaaatttggaatcaaaggatacaaagcaacaagagaggaaatgtgtaatgtgggtaaccaaactgcatatgttacctattgtctaatcagaaaaaatagtctgaggtctggaaagcaggaaagtggtggttattttctttcattttttgtgtttttgttttttaatttctaagttccattctgaaatccatgtgccgcattcagttactgtggttgtagcatcagtttttttgtggtttcatttcattttatgaattcagaggaagttacatatatattttttctagttggtacctgaacaaagcagattcccttgcctttgctgccacgtcttattttcaatgccatgtgataaaccagtgtcatacatgaaagttgtgcattgtaattttcaaaaaaaagggagttcattaggccagtggcactgatttttccttcccatcatagctatttattctagtaagaggataataaaagaaatttcctatacaagaactgaaattttccatttgtatggatctagtcactttcagatttcaatttgaggttaagtatataaagcacatcccaattttatatgctgccttgagaaaattacaggatgcacggcaatttgtaggaatttcaaatgggatcatttaaacatttgaaaaattattttaaaaaccatctagtttgcttttggattttagacattaaagcctatgttgtcttgttaacaggggtggaatgtataaccatcagattcagcatgtgatttcacctttgaatctgagtatttcttccctatcttctttgagtcatttttggagcagactgtcaccagtattgataactaagcattaaagggaaaagttgcattgcaactatgcattggtttcctggaagaacttttcttttgttttagtgaatgaagaggcttgatgggatcacttactgtaactccttctacataaggaccccttctgcaagcagaacacaaaagaacatgctcaaggagtatcccattttctggataaattgaagaagtttgctagtaatgtctttatactagcgtcttccttgtatccctttgctggcaagggaatacaaggcgtcaagaccacagatcaaaacaccccacatttgagtggagtcttatttttactccaagagcagttattcccttctagtctaaaattggcagttttttcttttttttaataaaatttttaaaatattcccaaaccagtggaacacagacactggctgca

SEQ ID NO: 12193 - DNA, 6000 bp, Homo sapiens; identical to SEQ ID NO: 1352

SEQ ID NO: 12194 - DNA, 6000 bp, Homo sapiens
aaatacaaaacttagccaggcatggtagtgggcgcctatagtcccagctactcgggaggctgaggcaggagaatgaattgaacctggtacgcgaaggttgcagtgagccaagatcgccccattgcactccagcttgggcgacagagcgagactccgcctcaaagaaaaaaaaagaaaaaaaaaaaaagccaacctggccaacatggtgaaactccatctctagtaaaaatacaaaaaattagccatgcgtcgtggtgggcacctgcagttccagctactcgggaggctgaggcaggagaattgcttgaacctgggaggcagaggttgcagtgagccgagatcacatcactgcactccagtctggacaacagagggagactctgtctctaaaaaaaaaaaaaaaaaatggtatttacgtcttaaggttgttgaaaggattaaatgagttaatgtgtaaagcacttagaacactgctgggatttaataggccctatttacgtggtaggtaggtattgctgttgttataaaaacattctaaatgtatacatcattgaacaattaaaaattttaatgcagtgggtacgtctcaagacataaatgatttcaacttcacattcttatatcaaaataatggcattataccaaaacaaccccccaggattttagtactttaaaacggtaagacaagcaggaatattgcaaactgggagagcaattgtgactgtctcatgtgggctggaagcagagctgtcactcagggactgcaggaaaggtggtggggacgatggggcaggggatcgctgcctccatgcacaggacactccctaaggcccagtacacaacaggttctcatttgatccttgatggatgaagttcaggctcatcccttttttttgtttgttttttgtttttttttttgagacggagcgtcattcttgttgcccaggctggagtgcaatagcgcaatctcagctcactgcaacctctacctcctgggttcaagagattctcctgcctcagcctcccaagtagttggaattacaggcatccaccaccaccccacctggctaattttttgtatttttagtaaagacggggtttcaccatgttggacagactagtctcgaactcctgacctcaggtgatccacctgcctcagcctcccagagtgctgggattacaggtgtgaaccaccatgcccggccttttttttttttttttttttagatggagtctcactctgttgcccaggctagaatgcagtggtgccatctcagctcaatgccacctctgcccccagggttcaagcaattcttgtgtctcagcctccccagtggctgagattataggcacccaccaccacgcctggctaatttttgtatttttagtacagatggggtttcaccatgttggtcaggctggtctccaactcctgacctcaggtgatccgcccacctcagcctcccaaagtattgggattacagacgtgagccaccgtgcccagcctaattttttttctctcttcagatttgccgggcttacctccttcatttgtttattgtgaattccctgaggatggccagagggacaggcactaccctgggcactgggaggtgagggtggacagagcaggcagggagagtggagtggaagcatccaaatcatcactgcctgtctgggtggcacaacctatacaaatctgactggactgtgtgtgtctctcctctgtgtcccccagggcccgtcacagctggagctgactctccaggcatccaagcaaaatggcacctggccccgagaggtgcttctggtcctcagtgtaaacagcagtgtcttcctgcatctccaggccctgggaatcccactgcacttggcctacgtgagtgtgttccctccaaccccaggctgaggctctggccatgggaggtccctactgtccatctctgtgggtcagggtctcccaccccagcggcccagccctgcttctccctttcatcttgacattattcaccagggtcctgcctggtgaagccaatggtctctaccagagagaacccagagggcaccaggactacagtaaagagtctagaccaagaggtgggagtcaggttgatgtgcagccctggccaactctgatcctctgcataggctcagtttgcctctctgtccagtgggacaactgaactcaatattttatatgataatcttttcattgtctttgaaaaagttacacgacatatatttgaaaatatttaaagacagaggaaaagggccaggagaaaacctaacgtgttaacagtggttatggctgggaagtgggattaggagagacatttagttggttcttcacactttgttgagtttgcaagagttgctctaaatggatttggcctattttggagaaaaaagtatttttaaaaaactcaagttttcaggtcagctgtggatttgggaaaaacaattaaaaacaaacaaccaaaagcctcaacttttaaaagtgttagctatatccaccagagagaggaggtcagggagctgggacccactgccagaggtcagggctggaggaggcagggtggcttgccagcactgcctcctccatgaggaatgtctgggaggtggcccccagatgtgagcagctgttgtttacaacagagaaagcagagggtaggaaggggagagcccgggggagagcaaagatagcaaaggggagagaggcatagaaagaaacatgcccactgcgggagggaggcaggcttgagcgaagttgggcgtgggggacaggggagaagcttccggactggtgacagggacagcacagagacagtcagacatgaccaagccagcatgccaaagtcctaggagggagggggccaaatccaaccaccagggccaagaggatttgactccttgcagcccatccctcggccgcccagaaggggaatcgaggtcccagagggggcgtggcctttaccatggatcctcccccttcccgatctgagtccgtgcagcccagggtgaggcaggaacatgaaacgcgcccgccagccggaaggtcgcagtagccgccggctctggcctcggccgcgccgccttcctcctggggccgcgctgcttcccgagcgggctccctggggccggtggccagaggggacaaagaggccaaggcgcggcctcggtggccgacccagtgccaggcgaccaacagacgtcgtgccctgctgtatccccattttacaggggctgactcaaggatcagatccctttcccaacccagctgtaaagccagtgtcccagccctttcccattccgcgggctgggttcctcacccaagatgcccatcactttgcccccttgttgaatccctacagagaaggtatctacttccttctagatgggccattctagggtgtcttgtctactgttgccatctggcagtcctcaatatctagcttgggccaggcgacctggcttatgtctgtaatcccaacactttggtaagccgaggcaggagggtctcctttttttttttttttttttttttttgagatggagtttcactcttgttgcccaggctggagtgcaatggccccatctcgcctcactgcaaccttcgccttctgggttcaagtaattctcctgcctcagcctcccgagtagctgggattacaggcacctgccaccacccccacctcattttttgtatttttagtagagacagtgtttcataccgtgttggctaggctggtctcgaactcctgacctcaggggatccacccgcctcggcctcccaaagtgctggtttacaggcgtgagccactgtgcctggccaggagggtctcttgaggccaggagttggagaccagcctgggcaacatagtgagaccctcgtctctaaaaaattataataaaaaatatttttaaatccaacccgaagcccttttgcccttctgctgctgctgtttcattcagctcaatgcccttggctttggagactgtacactaagagctcagtcagtggccccaacagcttcctctgaatccttcagctttccagagtcactcttccaggaagtcttccctgtctgctttcctcctcacccccaacccccatttcttctgaggcaatggcagggtaggcagtgagatgctgaagccacccagactccccatccctgtccaaccaggagatctgtctggctcctttgtttcttattaaataaaattctgtcttctattgtttcaaatgacttgatgcatgtctagtttctgaatggtaatatcccctagggcagggaccactgatatctgtctttaattcattaattcattcatccatccctttcttctttcttccctttctccctgtcttcccataggcggggagcacccatcacatgctgggtgtcagggtgacgctggcatgtcaggatcctgtgatgggcccagggcccagcacaaagtcagacaaatctctctcagtgcgtactacgtgtcaagcactgtgcaaggatgggcaaggtagacgttgccccctgtagaccctcacagtgtagggagatccagagcctcagggtatagggagagacagccgcaggatggcgtagatgtgggttgaatgagaacagctctggaggggtgggtgatgtttggacaggtggatgaacaaggtggtgtgttcatctggccccccaggtatgcaagggagaaggggctgatctgactgctagggggctccgggctgactgcagatccaccagccagcattctcagctccggcctctttctctcagccaatgggctgactccacaaattacttcctgacctcctacatgggatagagagggcacagggccaggaacagcgtgctgagcctccacatgtctccccagaattccagcctggtcaccttccaagagcccccgggggtcaacaccacagagctgccatccttccccaagacccagatccttgagtgggcagctgagaggggccccatcacctctgctgctgagctgaatgacccccagagcatcctcctccgactgggccaaggtcagtttccccagcaacctctctgggctcatgatactgctcaggaggaatctgagctcctctggcccacacctcaaacttgggcaccaagagtgcaggaggggacacgctgtgccacagttcacatgccacaagccagtgctgccttgggacagtgatggctcctccaccaaatatcagattgaagcatgtggaatatgccaggttctgacctaaaaccccagcattttcatacgatctattgtgcatctactatgtgccaaagccctatcatgctaggcacttggggacacactcaggccctgccttcctggagctgatactgtgatgagggaggtgacaataaacatgtacatgtacacagataaatctataatttcgggtcttgctgggtggtttcggggctgcagcctaacatgtgtcatgggctcatcccttatgttaacacacggaggcccggggacttgcacagggtcacttggcaggtgagtggtggaagggaagttcgaacctaggtcctctgacgcctctccccctctgcagcaccgtcctgcctgccccaccactatctttggctgtgggtgagggcggggctctgttaggtgcagggctgctgagggaagggactgaggtgcgcgtgtctctgcagcccaggggtcactgtccttctgcatgctggaagccagccaggacatgggccgcacgctcgagtggcggccgcgtactccagccttggtccggggctgccacttggaaggcgtggccggccacaaggaggcgcacatcctgagggtcctgccgggccactcggccgggtatggctctcgccccgcccctgacactagtccccaccccgagagaccacccccctgaccccccccgccccctctccggtcccttataaagccccaccccagtcccagccccagccccgccgcagccct

SEQ ID NO: 12195 - DNA, 6000 bp, Homo sapiens
gtagctgggcccgagccccgctgggtgctgaggaggtgatcaggcctgggtttgtgtgccgctctgcctgtcacccactgctggccttgggctggctctgtcccctccccagcctcccccagagccccccgcaagaggttgaggtgcatagccccgggctggcaaagtaccaagtgctgctggggcctggagctaccacatggcctcttgttgacagcgtccccctgtccccccgccacccccaggaggcagtcgggctccttcctcagcaccggctggttcaccatgatcctcgcgctggagctgtgtgaggagatcgtggtctatgggatggtcagcgacagctactgcaggtcagaccggccaggccgggcacgcggggacgcggggaggactgtgagccctcctaggccttaaaccagaggatttgggagctgtgggggcagagggagtgtgggcttcatggtgggtgaccatagcacagataccccttgcgctctgggccttgggaaagagctcagtgtcaaacaggctgccttaccaaccccagtgtggctgttgtggtcacaggctgttcacgggccagtcatgccaccccgcagaccctctgtttccttatgtggaaaatagagaaaagaaccacatcttacttggaaggttgttgaaacatttagggagggaataatctacaaaagtgcttaccacagtcagggcctatatatatagggcctaaatatatatatatatatatatcagtgatatgttttatataagttttaatttttgatattatatgtgatttttgatattatataatatttgatattataataccagcatgatatcaagttcagatatgtttatggtatgattttgtaccattgttatattattatatttctttttttttttttgagatggagttttgctcttgttgcccaggctggagtgcagtggcgcgatcttggctcactgcaacctccacctcccgggttcaagcgattctcctgcctcagcctccctagtcgctgggattacaggcacgtgccaccacgcccagctaattttttgtagttttagtagagacggggtttcatcatgttggccaggctggtctggaactcctgacctcaggtgatcctcccgccttggcctccccagggatcagggattacaggtgtgagcaccgcaccagcctatattattatatttcaatattatggaaactaacgagttcacaacaggtcaccgaggtgacaggtgtccctgtgccccagccatggccctggccatacggctggcccccgtgatgctgatggggaggtgggcgtgcagggctggtggctctgtgacatgggaatgaggggctcctccctcaccaggagcccaggaccactagcagggtgcctgcagtctccatctcttgatctacgcacttgttctggaaggcggatgtgaccatctgcgttttacacacgggctcttgaggctcacagcgtccatctctggcccagagtcatccagcttgcaagaggcagagccaggactcgaaccctggctctcgggatctgctactcccctatgtgtcttggcctccccagggatcaggcgtgggtcttcacgagcccatgggcctggcgaggggtggtcaaggtaggcggcagggtgtggccggaggcgagtgggttctgtcccaccccagccctgttccccaccccgcagggagaagagccacccctcagtgccttaccactactttgagaagggccggctagatgagtgtcagatgtacctggcacacgagcaggcgccccgaagcgcccaccgcttcatcactgagaaggcggtcttctcccgctgggccaagaagaggcccatcgtgttcgcccatccgtcctggaggactgagtagcttccgtcgtcctgccagtcgccatgccgttgcgaggcctccgggatgtcccatcccaagccatcacactccacaaaaacatttaatttatggatcctgcctcctgccacgtgctgggtggacctaaggttccttcccgccccattctggcgacacttggagccatctcaggcctcatgacttgaaggggagtggaggggggagccgtgtctcccccctccactccctgagtaattcacggcatttgggggctcaccccacctccaggtctgtcaagtggcctttgtccctggggctgatggcccccaactcaccagcatcatgaccttgtgccagtcctggtcctccctccccagccgctcctaccaccttttggtgccacacttctcaggctggccgccctggttggggcagccgagagcctggggttcattggtgaaggggccttggagttgtgactgccggggccgtatcaggaacgtacgggtaaacgtgtgttttctggatgctgtctctagcgtggtcatgtgtctgatgtgtttaggggtggagatgagggtttctttccctgtcacagtcccagaagctttttttttttttgagacggagttttgctcttattgtccaggctgggagtgcagtggtgccatctcggctcactgcaacctccgcctcccgggttcaagcaattgtcctgccttggcttcccaagtagctggtattacaggcgcgtgccaccacgcccagctaattttttgtatttttagtagagacggggtttcatcatgttggccaggctgctctcgaactcctgacctcaggcgatccacccgcctcggcctcccaaagtgctgggattacagccgtgatccaccgcgcccggctgtcccagaagctgttgactggaatccctgaggcccctacctgggcccacattggctgggcttcaatttcttccccaacaacctcctgctggtggccccagcccagccccttccccagcaggtcagggctcctctggggggctggtcccttcactgctctggcccaggaaactgaccctaagtcggaggcttctttgggaaccccgttctgtacccagtgagaggagagccagggccaggaggaagcgactctgagtgggagggaaatttctccacccatattgcttccctggtcctgggtcaaatggcaagttaaattagccattaaatctggggttgggcctggcacagtgggggctaaggcgggagtgttgcttgagaccaggaatttgagaccagtctgagcaacgtgacaaaaccagtctctacaaaaaaaaaaaaaaagtgggccaggcgcggtggctcactcctataatcccagcactttgggaggccgaggtgggcagatcacttggggtcagaagtctgacaccagtgtggccaacagggtgaaatcccatctctactaaaaatacaaaaaattagtaggatgtggcggtgggtgcctgtagtcccagctactcagtaggctgaggcaggagaattgcttgaacccgggaggcggaggttgctgtgagctgagatcatgccactgcactccagcctgggcgacagagtgagactccatctcaaaaaaaaaaaaaaagaaagaaagaaagtgggtttggtctccctgcaaaacaggaaggcagagggcagccctgggtggctgctgtgagggagtctagtctggctcaggccttactttcgtcatctgtaaagtgagaaaaaaagtcccaccagcggaaccttgccatcctcagaggaggactggtgctagctggttttacagatgagctgaggccactcagctgaagccggacaactgtggagcggctgggccagtgtgcaataccaggtctgagagctgagcccgaggacctgagccctgcacccctgggctggagagagcccacaagcatcaccccttccaggcatcactacttcatctggggacgggaagactcagaggactgggccagggcctcgggctgtcagctgggatgcagccctggggttctagctgccagctccagggatcagggccctatgctaatgctctgctgttgccaactttaaattcttagggttttttgtttgtttgttttgttttttgttttttttttgcaagaggacttgcattttcattttgcactggatcccagaaattatgtagccagtagtcccgggggctctgggtgacccggcatactctccctcccgcccttggctttcacagagggggctgagacctggcacttggttcacagcaccgcttttgtgcccggcttcctcctgcccagtgccaggtggacccagaagtttctgcaggaatgggaggggggaggagagccctgagctggcgaagcaaggagcaggctggcagcggagccacagcacggagcgaggagctctcaacaggtgtcaggcagaggtaagggcgggatggagtctggtaggcggaggtggagggggtttccgggctcagagggagggccctggagtcaaggcctgacttctttctggccccactttctgctgtagtggtcttggcagattagtacccctctctgggcctgttttgtcatttgtaaaaggttaaaattgtccccacctcacagattcagacagtggactatccccatggcttaggacatagcaggcacttgacatgtggagccagcatttttcgtggggttcatctgccctgggctggccctgcccttccttggtggtgacagatggcaggaagcccctgccccattggttgtctccctactccctgcctcatcctgggtgtccaaggcccagtgtccactggttctgatgggatttgaactccactctctcctgggaggctgcctcctcttccttctctatcccctgggaaaaggctgacccagcccttgggcccaggacacagaggctcctctaacctggccctaccctcgggtggggtatttactgctgggttggcccaaatggtgtgtctttctgggggtggtgacctggcaggagtgatgcgtcagtcacttcctccaggcagatggagatgatccttgacaggtctggtggctggttcggggtctactgaaggctgtcttgatcaggaaactgaagactctctgcttttgccacagcagttcctgcagcttccttgaggtgagcccagggcaggagcctccccacagccccagggatcacctgaatctgcagccactctttgggcctctgttttcctgttcataccctggttcctttgcccctcagcagagtggctgaggacctaccctacttcctccaagcccagaggggaagccggggaagcctcacagcccagaggtgtcctaaggggccttttccttagaagggccatggagcctggcccagagctcacgctcacggttcacacagcttcaccttgtaaggaacaaaatgaaacaaaaaatctcacacacccaggtgagaacaggaacatctggctttgggggactggtgggacccagcgtctaggctcatctaggcccgtctgccctctccagcctctgtgggggaagaggcagtacttcctcgttccagaccctctggccgggagcccaggtcttgggctatggagcagcccctgtgtgcaggcccccacctgcccgccactctcacaggcctctcctctccagaagcccctcccccagacaaaagcctagagggagagaggccggagtccccaggcctggcttgcagcctggctctgcccacgacccgctgcggagtcttgggcaagttctattctccctccgacccttgatcttggtttctttgaattgggagctgcggcaggtgaggggtctcttagagctctttccagaataccatggaagggaaaaatcctaacggctcaaagaagtttgctaagggtcaggaagcaggggatacacgggcctctcctacccgtgtaggaggcaggaagggtcaaagcagaggccagctctcccagactgtgggggaagggctgggggggggaggcccacgaggactggccacagccaccatgcaggaacgtcctggtgt

SEQ ID NO: 12196 - DNA, 6000 bp, Homo sapiens
ctatctgtgtcactgtgggcaagggacttaccatcgctggggcacggttttagcccctttgcaacacagggctggttaacagtacctgcttgtgaaacacctccagaggcctggtccagtggagcgctcaggaaatggggtatcgagggggacatgctgacctgtctctcacctgcagggtctcttctggggtctacgagccagttgtgattgaaagccattgaggagcaggtgtccgggctggagaagagtcctgctttctctggagtccagacctgtatcattccatgaggaactttccccttcagatcacctctgcgccacatctcatccatgcctcctccatgcactccagtccacactccccgtagcatcattccattgcccctcccatccatgctgggaccctcctggcccaccaaggcccaggcaccactgtgaatattctcctctgaaccactagagggcaggccaggcaggccaggcgggcccgtgcagcttgtgggcaagaaggagctggcaaggaccggcgctgctggagactgacccagccctctggctgaggacatgcagcggctcctaaatgtagagatgcctgtggctgagggggcctctctacctgtgtccccactcactccaggagcactggctttggtcacgtcttagcagcagggccttgctccgttgttcccttgccctggtggtgggggggccagaccacctccggaatcctgccacctgtgactgtctgactgcttagtgcttcagctgtcccttccttgtgtcctgggggacctgctggcggcctcttcctgggagccatgacctcagaccccacccacactccagatcgagacccctgcctccccccggcaaatgtcctcccgctgccttgcagcctgcactttgcacatgctcacccccagcacagtcccactggcccctcacctccccttccctgagctccttcccaaggactcctggtcactgcctgctgtgcagtcagaggcccagggtccagcagcccggcgggaacgggtgctgcctcttcctccagttagctccagctcaggtctgagacccgtgctgagaaaggtctgagcaccgaccgtgccctctgcccagggctgggtcctgagcagctggttttcctgcaggaaggttggagcaagcaaagtccttctctgccctcagggtcagctgcccagactggggcggatgccagagaggcaggtgggctgtggctggactggtccggagctggcttccttaccagaaaagcctcagccttcctctggaagcatcccccgttctgggcaagggggaagggctcctttaaggggtgtgctttcccagtggggagcagtctggccctgccccctactaaagcctctgctctcagcactttcccccaagtccttgtaacttgcttgaaggtgggttctggctgccagccagtccctggacaaactctcctgccccttttaaatttcactcattttgtataaacccagcaggctggtgtttacttagccctgtagcttttttcattttttctttccgtctttcttcttgagttcacggttcaatattgcctcctcgccctggtgaggggaggtgctgcttttctgccccacctgccggctggttccagcagcgctggggcccagctggggggccgggatgggggcttctctctctgggaggggtgcaggtgccctccccaggctgggagggttccttccctagctccccatctgcccccgctggtgagagttgggcttcttggtcttggaactccctggcattgggaacagagcatttccagcatttgttgttgttttactcacctaacccttagaaaatgaatgttagaaggtgcctgccgaggcgggacagagtgttcgctcgcgctggagaaggctctgctcagccctgagagtcccttcctgccccaccgatactggcactttaaaaaggaagctgaccgcacagtgtccagacgaattggcccccagaagatggggagttctgtcctgcccttctgtgtctgcgtgacctcacccagcctaggagggaggtgcattcagggtagatttgcctctcattcaaagttctggggctttgggtggaaaacagccagctttggcgctgttggggagactcctccagaccaggaaccccagaaggagacagagcctgccacatcctcccacgccaggccctgggccagggtgattggactgagaatttggccacaaccaaattgatgctggctggaaccagaggccagaaagcctggccttgtccccatgtgggagccctgtcctcagccctcttgtccccttgagctcagtgaattcccaccaggtgcccacagctcctggacttcaaattctatatattgagagagttggagagtatatcagagatatttttggaaaggagttggtctatgcaatgtcagtttggaatcttcttgaaagtttaatgtttttattaggagatttaaagaaaataaaggtctacaatatctttaggttttttttttttcctgtttaccgcacaaactgaccacatggcatgtctatcaggatggagggtgtccatgttctcctctgtctttagggaggtgataaggagatgggcggaggggtgtttttttctttgactcccctcctttctaacagaatgttgccaccactgcttgagtgggctgtgtttgttcctctgtcccagcttctgttgtagaaaataacattgttaggggaactcaggctagtgtcagcgtcttggtttggggagaaaaaattaaatgtttcggtttttgtttcttttgctgttttgtttttaccttgttactttatcatattgactttagggtcaaaggcaacatcagaagaagtcagatatgtatagtgacattccaggggtggggaaggtgtagggatccagggttctcccggtcttggccacaggcacaatcatcaccttcatcgttccagattcctggggagaaaactgagaagatcgttacctgccagcctcatacggagcaaaagctctgtcctcagggccaagttctaaccactgctctgtagaccttctctgcaatcaagtggcctctaaggagcatgcctgaggacaaataactgcgcctcagtttcctcacctgcagatggggttatcaaataacacgagtgtgcagcctgacctgtaggaggtgtgagtgtgttcccaaactaaagccccaggctgccatcatttacaggcttggcttgccccgggcccctcacccccgtttctgaccatcccaagtctctctgggacaggcaagtcactctggttctttaataagcttggaggtgttgggaagcttcagtggtactggccaggccaggaggaatcaggccaccagggctccatctctatcctgggatagcattcaccccactcctcctcagggctgaccccgactcatggcccctttaaaccctgaaggccgattctgccccttcctctgttatatgcacaactgaggaaggaggtaaaagtgggctcctaggtgagcccaaagtctcctgagagataagggaaaagaattggactgtaggtttaaaaaagttgctcttggccgggcacagtggctcacgcctataatcccagcactttgggaggctgaggcaggaggcagatcacctgaagtcaccctgaccaacatggagaaaccctatctctactaaaaatagaaaaattagctgggcgtggtggtgagtgcctgtaatcgcagctactcaggaggctgaggtaggagaatcgcttgaacccaggaggtggaggttgcaatgagccaaaatcgcgccattgcactccagcctgagtgacagagcgagactccgtctcaaaaaaaaaaaaaaaaaaaaaagttgctcttgtcagctttgggagggcagactccatagttggagatgggcttccaaccaaccaaggagataaatgccagagggagcgaaccatgccaggctcaaagcacatctctccccaaactccccaggtggggacagcaggccaaaggcctccacataacccctcagggaggcctggagtccagatgctgtactccagtatctaaacaatcactcaatcttaaagctgacaggttcaaagctcttactttgggccgagcgcagtggcttacgcctgtaatccaggcactttcggaggctgaggtgggtggatcacctgaggtcaggagtttgagaccaacctagccaacatggtgaaaacccatctctactaaaaatacaaaaattagctgggcgtgttgacacgtgcctgtaatcccagctactcggtaggctgaggcagaagaatcgcttgaacccaggaggcagaggttgcagtgagctgagatcatgccactgcactccagcctgggtgacagagtgagactcccgtcttgggaaaaaaaaaaaaaaacaaaaaaacctctttctttgggccaagcctccactgagtgccagggatacagcagcaacctcagaccctaccctcggggctgacagggctggatcaacaattgcatcagtgaattaaaaggcacaggaggctgggcaccgtggctcacgcctgtaaacttttggaggccgagttgggaggatcgcttgagcccaggagttcgacaccagcctggataacatagaactccgtctcaaaaacaaacaaacaaacaaaaaaaacgttcccgactggcttccctgaggaacgtggcgtcccagtgagaccggatgggtgaggagcagccggcctgtgagtggtgggggaccgcgttcctatctcggagctgaagaagcgtggaagatgatctggcccaacatctctttgttctcagaggaagggccttccaagaccggggaggggcctgtgcgtgggtcccggtccgaaacgtgtctgggctgctgcgagagacagtcggtgaaggaagggaggggacatccgaagggtggcccgggaggccgggcgatggtgaggagggcgcctcctctccaccaaatcctccccatccatgcgggctagggacagaccctcccccgcccaccctaggctggaaagtgaacgttctctgcacctctcccacctacagactaagtagggcacccggtttccgtgtcggcttcaccactgactcggaatgggatctacctttctctgagcctcacttttcccatctgaaaaatggaacttccgatcccgcactcccatcccactctggccccgggactctgggatacttagagattggcttttggtggggcggcgacaggactgtggccatgaaggccagggagtctgggtccccaactcggtcccattccctagagagattcgggcagcaaccggccccacaatgctcttgagaactacacttcgccgatatgcaaagaagaggaggcggttcctgctcgtctccgacgaggtgggcccgagcaggcctggggactacgactcccggcgtgctccgcagtccaaagccggaagagcgtggacccggaaccggatgtggcttgcggctcgggtggctgagcgcgcggggaaatggtgagattggcaccgtgtgccggagataggggcgtctgggggtggggtcccgggtctgctcaggagctggggcatgggcacttggaacggggattgctctcccgcccccactattgtacggacgacaacgcggaggcctagcattctctcccagcctagaaactgatccctagtcagccctctaccatctgttgaatgggaagcttagaccgtgatcgggccgcgacgccccgcttccattagtgcgccgaaatagagggtcacttcgtcagctgagacctcccttttctccaggccacggggacagaccaggtggtgggactcggcctcgtcgccgttagcctgatcatcttcacctactacaccgcctgggtgattctcttggtatgtcattctccccgt

SEQ ID NO: 12197 - DNA, 6000 bp, Homo sapiens
tgtaaatgcctttgaccgaaaagagcagctctgtgtcttgtggcagtgccaccttggaagactgtagttgcctgccgaggcactgggggaaatcacggtagcagagtgttagggctgctgccctataggatctgccccagagggcctaacgtcaagtcatgcatctccgggactgatccttggattgttgcatgtgtccagactcacagggtagcgctcaggagcaagcactgagagccccctagtctgccctgggaaggcaccggggctgacaagagctcttgccttccacagcgtctgttcctcacacaccccgcccaaggacgtgcctggcagcggcctggtgctccccgccgcagccacctcacccttgggtttctgtggccctgcagttcctccgtgtcacaaagcagtacctgccccacgtggcgcgcctctgtctgatcagcaccttcctggaggacggcatccgtatgtggttccagtggagcgagcagcgcgactacatcgacaccacctggaactgcggctacctgctggcctcgtccttcgtcttcctcaacttgctgggacagctgagtgagtggctttgcgggtggtcaggattcactgggcgtcttgttccatgatcgttagcagttgggaggctgtgtgtgaactcgggggtctcctggactgctgtcccccctccattcccctcttctccagctcagctgtgccaggccaggagtccggttctgcaagccttggtggggacgcttagtctctagccctgagctcactgctttagagcttgctaaggaaataggacatggtccctgtcagggacccaaagcaggagatgctggagtctggctggcagtccacagtagagcagttaattgcctacctcaggtgggtggctgacttgggagctgattgtgggaaacagcccattctttatgacggcaagggctccactttctggtgtttgtgataagtctagtcagcttaccatgtgtggtccttgcctatcattaattcttccagaagttgtcttttgcttgggtaggtggtttggctgcctctggacctaagggccaggtgaggtagcagtgtatcaagacagtgctccccgccggcacccaccctcaggccccctaacccttgtccttctctccagctggctgcgtcctggtgttgagcaggaacttcgtgcagtacgcctgcttcgggctctttggaatcatagctctgcaggtacacgggccgcgtggtcggggctcccttctctttgctctggtggagcagagcttctgaaaagacatccttgagggttcagtgtcactcccccttcagccccctgcatgtctctgactgcctggagctcctttctcttctggggaagtcgtgagcccaagcagggctgtagaggcaggtcattcggtactgggccatcttttgtcccatttctatgattaccgtgacaagggaagtctcgagcttggctgcagccaggatgctgtcttgttatcacgttgcttcataaagaagaatacttggttattcagaatgaaatgctgggaacagaatatctgaatccacatcagtggtctcagaatcactttgttctctggaacatcatagcacatttcttgagaaatacagaaccacatttttgagcttagatctgtcctcggtctcctacaatggttttgtgtgttttagactccagctgacattggagagacggcctaatgtattatgaagtctgtggaaatgcctttggaaaggctgagactcaagtatctctctcttctttcccctcagacgattgcctacagcattttatgggacttgaagtttttgatgaggtatgtgcattctggttggttttagtatacgctccttctacaggttgagcattgcaaatccaaagtctgaaatgctccaaaatgggaaaaatcttgggcaccaacatgacgctcaaaggaagtgctcattggagcatttcaggttttggattttcagatttgggatgctcagccaataagtatataatgcaaatataccaaaatctgaaacactttgggtcctaagcatttcaggttagggatactcaatctgtatttctaaactcagttaactattggtttgagtagacttctctgggtctaaaccaagcttgtccagcctgtggtccacggggtgaacatggcccaacacaaactcaaaaactttcttaaaacattgagagttttttttgtgatttttaagttttattttttagctcatcacctatcattagcattagtgtattttatgtgtggccaagacagttcttccagggtagcccagggaagccaaaagattggacccccctgtctaaattgtgcctcttagaaacaggttctgaagaggatgttgcagagcccctagaatagtagagactgaagccgtctcttctgacccttatttcacgggtgtggggactccgggtctgagtggaggacagacctgaccacggggacccagctggtcaacactgaagctgtgactaggactcggttgtgtgtgtgttcaggtagcctgtcactgtcgagttgtaaagatacctctgtctcctgagctatgtaaggttttacatgggtgtaactcgagtctgaggtcctgtgcgcatgcctgcctggtcctgcttggcagatcactgggtttggagaaagggaagtaagggccttcttatactggcagcaaggtctccctgcacctggtctcacagacaggccagatcctggtgaggcttagcttccagcccacatatctgttcctcaggaacctggccctgggaggaggcctgttgctgctcctagcagaatcccgttctgaagggaagagcatgtttgcgggcgtccccaccatgcgtgagagctcccccaaacagtacatgcagctcggaggcagggtcttgctggttctgatgttcatgaccctccttcactttgacgccagcttcttttctgtaagtattcctacttgcctgaaccggtctggtttcctgtgaatgctgtccctcccccaccccctccctgctcacccctccctggttgggtattaaccacagcctgggggagctgctgaaatggagcaaacttttttttttttttttttgagacggagtctcgctctgtcccccaggctggagtgcagtgcgtgatctcggctcaccgcaagttccgcctcccgggttcacgccattctcctgcctcagcctcccgagcagctgggactacaggcgcctgccaacacgcctggctaattttttgtatttttagtagagacagggtttcaccgtgttagccaggatggtctcgatctcctgacccctcgtgatctgcctgtctcagcctcccaaattgctgggattacaggcgtgagccaccgtgctcggcggagcaaactttttgatcccattaaaacagaccaaaacatcgtcaatctcttgtgtgtcaagccttctttccagcaaatgaaggccagaacctctgaccttggtggagtgtgcttggcccttggttggccaaggctctccacccgggctccccttactcttctttctttcctcactgttcgtatctttctcaagtaattcctgtgtgtcaggtgtcaggggcaggcctccaggagcttccagagcacacctccggagctgactgagagccctggccgggtagtgtccaggaagagctcctggcgccatggagagaggagagaggatgtttctggcctggatggctgggtgggccaagaagcacttgggaatttagttatggattagagattcatcttggtaaatcacagcctgttactagttgggaacttcagtcttccccaaaccttccacatttcaaagctggtgctttattgcctcctgcctccctttggcttttatctccctacttgcaccagcagccgtctcagcagtagctacatcagcctgatggatagagacttcatgacgtgcagcagctggaacttttgtttataaagcatctcttttcctcacatttattttgaatttcttacgtttcaacctatgcagattgtccagaacatcgtgggcacagctctgatgattttagtggccattggttttaaaaccaagctggctgctttgactcttgttgtgtggctctttgccatcaacgtatatttcaacgccttctggaccattccagtctacaagcccatgcatgacttcctgaaatacgacttcttccagaccatgtcggtgattgggggcttgctcctggtggtggccctgggccctgggggtgtctccatggatgagaagaagaaggagtggtaacagtcacagatccctacctgcctggctaagacccgtggccgtcaaggactggttcggggtggattcaacaaaactgccagcttttatgtatcctcttcccttcccctcccttggtaaaggcacagatgttttgagaactttatttgcagagacacctgagaatcgatggctcagtctgctctggagccacagtctggcgtctgacccttcagtgcaggccagcctggcagctggaagcctcccccacgccgaggctttggagtgaacagcccgcttggctgtggcatctcagtcctatttttgagtttttttgtgggggtacaggagggggccttcaagctgtactgtgagcagacgcattggtattatcattcaaagcagtctccctcttatttgtaagtttacatttttagcggaaactactaaattattttgggtggttcagccaaacctcaaaacagttaatctccctggtttaaaatcacaccagtggctttgatgttgtttctgccccgcattgtattttataggaatagtgaaaacatttagggacacccaaagaatgatgcagtattaaaggggtggtagaagctgctgtttatgataaaagtcatcggtcagaaaatcagcttggattggtgccaagtgttttattgggtaacaccctgggagttttagtagcttgaggcaaggtggaggggcaagaagtccttggggaagctgctggtctgggtgctgctggcctccaagctggcagtgggaagggctagtgagaccacacaggggtagccccagcagcagcaccctgcaagccagcctggccagctgctcagaccagcttgcagagccgcagccgctgtgggcagggggtgtggcaggagctcccagcactggagacccacggactcaacccagttacctcacatggggccttttctgagcaaggtctcgaaagcgcaggccgccctggctgagcagcaccgccctttcccagctgcactcgccctgtggacagccccgacacaccactttcctgaggctgtcgctcactcagattgtccgtttgctatgccgaatgcagccaaaattcctttttacaatttgtgatgccttaccgatttgatcttaatcctgtatttaaagttttctaacactgccttatactgtgtttctctttttgggggagcttaactgcttgttgctccctgtcgtctgcaccatagtaaatgccacaagggtagtcgaacacctctctggcccctagacctatctggggacaggctggctcagcctgtctccagggctgctgcggcccagccccgagcctgcctccctcttggcctctcatccattggctctgcagggcaggggtgaggcaggtttctgctcataagtgcttttggaagtcacctacctttttaacacagccgaactagtcccaacgcgtttgcaaatattcccctggtagcctacttccttacccccgaatattggtaagatcgagcaatggcttcaggacatgggttctcttctcctgtgatcattcaagtgctcactgcatgaagactggcttgtctcagtgtttcaacctcaccagggctgtctcttggtccacacctcgctccctgttagtgccgtatgacagcccccatcaa

SEQ ID NO: 12198 - DNA, 6000 bp, Homo sapiens
ctgcctctgcagatggcttcaccccgctcatgatcgcctcctgcagcgggggcggcctggagacgggcaacagcgaggaagaggaggacgcgccggccgtcatctccgacttcatctaccagggcgccagcctgcacaaccagacagaccgcacgggcgagaccgccttgcacctggccgcccgctactcacgctctgatgccgccaagcgcctgctggaggccagcgcagatgccaacatccaggacaacatgggccgcaccccgctgcatgcggctgtgtctgccgacgcacaaggtgtcttccaggtaggcagtggctgcctgtgtgcccacctgccctcctcagggccgcctggtggtctggggcagtggccaggcttacgtggccctgggagcctgaccccgagcacagctgagtccgggacaactggtgcctccacctgggaccttcgcagtcagcgaggtgcgagggggagggcgtcgggcccatctgtgttctccagggaagtcaggcagaggcgggtctggcaggaggcctgggggatctgctgagtgaggcagcacctccccacccccagcaaaacaggctccatcagggttgtgggccttgctcaaggtccaggttccactgctgcagcccctcgcagccccgcccctccctcaaccttggctgccggcgtagcctgtggcagtgagaagcagggtttagaggctgccgctcggtgcctgcagacctagggctcagcttgccggtgagctcgtggcaagaatggatttagggatttggatgcctgggtctccagggagtgtccctggcaggggctgcctttgcagtcacccctgctgcgagtccccaggctccaggcggccctggagcaagcaggttcagatgggcacagcccggggagttaccacagagcttctcatttcctgatttcttagctcaggtgacacattgtcatctcgcagaaataaatgtaggtgagcagaaagagcgtggaagggagccccgtgcgggtttggtgtgtgcctctctcagctgccttctttgcacagatgtggaagttcccaggtgctttgcaggaatcaggccaagttgccttttgcacccgccagtgagcaggggccattcctcctgccagatgccaagacccggctgcattacaagggctgcccaccccctctctgggcagagccggacactagctcggcggttctgagacggctgtagggccgtgagcccggcttcctgagtgccagctgtaaccgccgttgggggcagggacttgacctctctgttttgtaggtggtcatggcagctaggaccacagtgaggattaaatgaggccacacgtggtcacgatggatcccactgtcaccaaggggcctgtctgtgggcagcacagcccctgcccccatccgggcccctcctcaggggcagccccatggcgtttcgtcttgcccggccgtgccgatctcaggagggtctcgtctgtgtccggaagacagtggggcttcccgtccaggcgttcgttctgggcaggaggcatcggtgtacgtctgcccagcacccgcctgagcctctccctgttgcccagatcctgatccggaaccgagccacagacctggatgcccgcatgcatgatggcacgacgccactgatcctggctgcccgcctggccgtggagggcatgctggaggacctcatcaactcacacgccgacgtcaacgccgtagatgacctgggtgagcccacgggggcacggctgctctgtcgtggggcgggaccgccacagggacgggtgggactgggttgcctccagctggtctccaacctaccccatctgcttctttcacgcaggcaagtccgccctgcactgggccgccgccgtgaacaatgtggatgccgcagttgtgctcctgaagaacggggctaacaaagatatgcagaacaacagggtgagcgcgaggctgggatgccaggggagacgtgagggctgaatccacagagaagtgagggccaaacccacggggcgcagggacacaagggcctgacccacagggtctcgagggtcgctgggcccgcatgtgggccccacccgcatgatgcgggcacctcgttagtgctcctgccttccttcagcccccgtttatggagcccttccaagtgcaggtccagctgtcaggacacggcggctcgcccctcagacccagccctaccctcctgggcggcagtcatggcggggcacacagcctggcgtggggaacgctgctgctgccactgctgtgtcaccgtcacctggacctcaccttctgtccccagctgtcaccaggcgggggtggggatgggaatgtggtgacgcaggtggtgcagattgagccagaacacgcgtggcggcagctccctgcggggcggggcctcttggtgtgttcaccaaggccaaggacctcaaggctcagaggaagaagtctcaggactatatccaaggggagccacccccagccctcatcctggccctgcagctcctggccctgcagctgctgttggtttcccctgggtgctcagggcacaggtgcagacacccccacctccctgccgccagaacccccacccccgcccccaactcctgctgcccccttggcatgtcaggctcaggcgtctctccctcctgggtgagggcacacagcgggcctgggcaccggggcatgttggcccaggcgctccccagtccgtggcagcatggccccacagagactgggccccagagggcatcaaggcctgggaagccccttcccactcccacacagcagcctcacccagacctgtgacgtgtccaccgcacagaggagaccccaggaaggagcttggtggccaccagggtggcttgatggccgtccagatgacgagctccctccctggtgccctcgccggtgcctctgaaccgctccaggaatttccttttgtgccttattgggggcagggaagagggcctgcagttggttagattttcagtggggtctgtgacccccccatagaggtggagccccgctgatctagggtagaggactgcacagatcccctctctgggtgggtttcagaagatgtatcaaagccttaacatttaacaagagtcaggctaggtggttgcaggacgctggggtggggtcctgaggagcagcctgcctgcccccaccccgcggaggaggttgtactgctgcttcctctggtgatggaaccttggggagggtccccacgcctggcctggcccccctcaccggcccccgccctcatcccccaggaggagacacccctgtttctggccgcccgggagggcagctacgagaccgccaaggtgctgctggaccactttgccaaccgggacatcacggatcatatggaccgcctgccgcgcgacatcgcacaggagcgcatgcatcacgacatcgtgaggctgctggacgagtacaacctggtgcgcagcccgcagctgcacggagccccgctggggggcacgcccaccctgtcgcccccgctctgctcgcccaacggctacctgggcagcctcaagcccggcgtgcagggcaagaaggtccgcaagcccagcagcaaaggcctggcctgtggaagcaaggaggccaaggacctcaaggcacggaggaagaagtcccaggacggcaagggctgcctgctggacagctccggcatgctctcgcccgtggactccctggagtcaccccatggctacctgtcagacgtggcctcgccgccactgctgccctccccgttccagcagtctccgtccgtgcccctcaaccacctgcctgggatgcccgacacccacctgggcatcgggcacctgaacgtggcggccaagcccgagatggcggcgctgggtgggggcggccggctggcctttgagactggcccacctcgtctctcccacctgcctgtggcctctggcaccagcaccgtcctgggctccagcagcggaggggccctgaatttcactgtgggcgggtccaccagtttgaatggtcaatgcgagtggctgtcccggctgcagagcggcatggtgccgaaccaatacaaccctctgcgggggagtgtggcaccaggccccctgagcacacaggccccctccctgcagcatggcatggtaggcccgctgcacagtagccttgctgccagcgccctgtcccagatgatgagctaccagggcctgcccagcacccggctggccacccagcctcacctggtgcagacccagcaggtgcagccacaaaacttacagatgcagcagcagaacctgcagccagcaaacatccagcagcagcaaagcctgcagccgccaccaccaccaccacagccgcaccttggcgtgagctcagcagccagcggccacctgggccggagcttcctgagtggagagccgagccaggcagacgtgcagccactgggccccagcagcctggcggtgcacactattctgccccaggagagccccgccctgcccacgtcgctgccatcctcgctggtcccacccgtgaccgcagcccagttcctgacgcccccctcgcagcacagctactcctcgcctgtggacaacacccccagccaccagctacaggtgcctgagcaccccttcctcaccccgtcccctgagtcccctgaccagtggtccagctcgtccccgcattccaacgtctccgactggtccgagggcgtctccagccctcccaccagcatgcagtcccagatcgcccgcattccggaggccttcaagtaaacggcgcgccccacgagaccccggcttcctttcccaagccttcgggcgtctgtgtgcgctctgtggatgccagggccgaccagaggagcctttttaaaacacatgtttttatacaaaataagaacgaggattttaattttttttagtatttatttatgtacttttattttacacagaaacactgcctttttatttatatgtactgttttatctggccccaggtagaaacttttatctattctgagaaaacaagcaagttctgagagccagggttttcctacgtaggatgaaaagattcttctgtgtttataaaatataaacaaagattcatgatttataaatgccatttatttattgattccttttttcaaaatccaaaaagaaatgatgttggagaagggaagttgaacgagcatagtccaaaaagctcctggggcgtccaggccgcgccctttccccgacgcccacccaaccccaagccagcccggccgctccaccagcatcacctgcctgttaggagaagctgcatccagaggcaaacggaggcaaagctggctcaccttccgcacgcggattaatttgcatctgaaataggaaacaagtgaaagcatatgggttagatgttgccatgtgttttagatggtttcttgcaagcatgcttgtgaaaatgtgttctcggagtgtgtatgccaagagtgcacccatggtaccaatcatgaatctttgtttcaggttcagtattatgtagttgttcgttggttatacaagttcttggtccctccagaaccaccccggccccctgcccgttcttgaaatgtaggcatcatgcatgtcaaacatgagatgtgtggactgtggcacttgcctgggtcacacacggaggcatcctacccttttctggggaaagacactgcctgggctgaccccggtggcggccccagcacctcagcctgcacagtgtcccccaggttccgaagaagatgctccagcaacacagcctgggccccagctcgcgggacccgaccccccgtgggctcccgtgttttgtaggagacttgccagagccgggcacattgagctgtgcaacgccgtgggctgcgtcctttggtcctgtccccgcagccctggcagggggcatgcggtcgggcaggggctggagggaggcgggggctgcccttgggccacccctcctagtttgggaggagcagatt

SEQ ID NO: 12199 - DNA, 6000 bp, Homo sapiens
cgacacttttgtggggcacgatgtggtggagccaggcagctacgtgcagatgttcccctacccctgctacacacgcgatgagtgagtgctgggcgcccggggctggggctggggctggggctgagtggcgcctgagcgcggcctccccgcagcttcctgtttgtcattgagcacatgatgccgctgtgcatggtgatctcctgggtctactccgtggccatgaccatccagcacatcgtggcggagaaggagcaccggctcaaggaggtgcgcgggccgggactctccctggaggcgcgggctggcagggaggggcggcgtcctccccggggcctgccccaagcccctggcccacccgcaggtgatgaagaccatgggcctgaacaacgcggtgcactgggtggcctggttcatcaccggctttgtgcagctgtccatctccgtgacagcactcaccgccatcctgaagtacggccaggtgcttatgcacagccacgtggtcatcatctggctcttcctggcagtctacgcggtggccaccatcatgttctggtgagcgcgggccatggtaggagggacctggggcaggcacttgcccagcaagctcaccccacatcctctcagagccccctggaccctggcacgggcctgcccaggaggccgggcgtgcgggtggatgacggtgcgcgtggcccctgcccacccagcttcctggtgtctgtgctgtactccaaggccaagctggcctcggcctgcggtggcatcatctacttcctgagctacgtgccctacatgtacgtggcgatccgagaggaggtggcgcatgataagatcacggccttcgagaagtgcatcgcggtgagggtcgcgggcaggcgggcggctggggtgccgggccaccccacgtgctgacaccactgccttctcagtccctcatgtccacgacggcctttggtctgggctctaagtacttcgcgctgtatgaggtggccggcgtgggcatccagtggcacaccttcagccagtccccggtggagggggacgacttcaacttgctcctggctgtcaccatgctgatggtggacgccgtggtctatggcatcctcacgtggtacattgaggctgtgcacccaggtactggccagcccttggagggcaggggagaggcaggggtccccagccagggttggggaccagcagtctgtgtccactcctggatgcagcacgggtggctccctgggtgggcacgtggcccacgtggtggatggtcaccccaggccctaggtcagcctcccctcccctccccgacccccaggcatgtacgggctgccccggccctggtacttcccactgcagaagtcctactggctgggcagtgggcggacagaagcctgggagtggagctggccgtgggcacgcaccccccgcctcagtgtcatggaggaggaccaggcctgtgccatggagagccggcgctttggtgaggctggcatcagaatggtggctggggtgggcgctgggttcagagtcctgggtggccttggcgccgcccccaccctgctgatccacagccctggtgcagaggagacccgtggcatggaggaggagcccacccacctgcctctggttgtctgcgtggacaaactcaccaaggtctacaaggacgacaagaagctggccctgaacaagctgagcctgaacctctacgagaaccaggtggtctccttcttgggccacaacggggcgggcaagaccaccaccatgtgagtgtcggaggggcagggcggtgggcatctgctgaccagagcaggagtcctagtcagggcagggtggggcccctgcagagggcgtggggtcatgaccccgcccacctacccaggtccatcctgaccggcctgttccctccaacgtcgggttccgccaccatctacgggcacgacatccgcacggagatggatgagatccgcaagaacctgggcatgtgcccgcagcacaatgtgctctttgaccggctcacggtggaggaacacctctggttctactcacggctcaagagcatggctcaggaggagatccgcagagagatggacaagtgggtgggctgggcggggggcggggcaggtgggcggaggccctggggctctgcatagcagcagccccatgccccacctccctgtcccaggatgatcgaggacctggagctctccaacaaacggcactcactggtgcagacattgtcgggtggcatgaagcgcaagctgtccgtggccatcgccttcgtgggcggctctcgcgccatcatcctggacgagcccacggcgggcgtggacccctacgcgcgccgcgccatctgggacctcatcctgaagtacaagccaggtgagtggggtgccgtgtgggcaggggtgcgggcggcgcctcccctgccccctgaccctgggtctggccttgtcctaggccgcaccatccttctgtccacccaccacatggatgaggctgacctgcttggggaccgcattgccatcatctcccatgggaagctcaagtgctgcggctccccgctcttcctcaagggcacctatggcgacgggtaccgcctcacgctggtcaagcggcccgccgagccggggggcccccaaggtctgtgttgaagctgcctgagctggcttcgggccaccttctccccgggacccccacctgagaatccacaatggagaggctgggccctcaccgtcacccgctgggcccaggatgcctgctggggcctggcccgccctctgcaacgcccgtatcttggagaggctgggtcctcagcgtcaccccctgggcccaggatacctgctggggcctggttcttcctctccaatgcccatatcttgacccagttgggttcccattgggggtccctcctcccagcccctgagtgaattccttcctgctcccacgtcccccacagagccagggctggcatccagccccccaggtcgggccccgctgagcagctgctccgagctccaggtgtcccagttcatccgcaagcatgtggcctcctgcctgctggtctcagacacaagcacggagctctcctacatcctgcccagcgaggccgccaagaagggggctttcgagcgcctcttccaggtgtgagggcgcacgggtcggggggcagttgcaggtggtggaggtgggcgcactcctgcctgggcgtccctgccgcagcctccccctccaccgcccctgcagcacctggagcgcagcctggatgcactgcacctcagcagcttcgggctgatggacacgaccctggaggaagtgttcctcaaggtgtcggaggaggatcagtcgctggagaacagtgaggccggtgaggggcctggaccacttgctcagcccaccccacccacaaggccccagctcgggcctgcgctgtcactcctgcctggtgtctgggggcgccaccctggtcctgggtggaagccaggggacgccccggggttagcctgcggtcctaggtgggtggtcctggtggccagaggtcccggacaggtgtatgagcctgggaactggggtcaagaccggggatgggggtcctgggcaggcctaggggccagtagccctgagtgtcccctcggcccttccactgcggcagatgtgaaggagtccaggaaggatgtgctccctggggcggagggcccggcgtctggggagggtcacgctggcaatctggcccggtgctcggagctgacccagtcgcaggcatcgctgcagtcggcgtcatctgtgggctctgcccgtggcgacgagggagctggctacaccgacgtctatggcgactaccgccccctctttgataacccacaggacccagacaatgtcagcctgcaaggtgggggtggcagggtgaggctgggacagcaagggagggggagcagggttgcgggggagcggcatgagggcagccagtagggagagggtagcgtgcaaccacctgctcagcctctacctctctgcacagaggtggaggcagaggccctgtcgagggtcggccagggcagccgcaagctggacggcgggtggctgaaggtgcgccagttccacgggctgctggtcaaacgcttccactgcgcccgccgcaactccaaggcactcttctcccagatcttgctgccagccttcttcgtctgcgtggccatgaccgtggccctgtccgtcccggagattggtaggccaccggctggacaggggtgctgggcttgcctccccccaccgcccgctgggagccctgatgatgcccactcctgagcttcctgactctgggcctcaccccacacctgaggctgggcacgcaccggggttcatccgggagtcctgtctcctcgggtcccagaccccaggcgtggatcccttggggttgggggaaggggaccgaggcttgggggccgctggccagagggcagaacctgctcaggcctccctgctcgccctgccaggtgatctgcccccgctggtcctgtcaccttcccagtaccacaactacacccagccccgtggcaatttcatcccctacgccaacgaggagcgccgcgagtaccggtgaggcctccagcgggggcagccttggtgggtggggcgagtgaaggggcggggacagccttggtgggccaggcgggcgagggggcggggctggcgaggggcggagactggcagccccacctcacactgtcggtgcccgcaggctgcggctatcgcccgacgccagcccccagcagctcgtgagcacgttccggctgccgtcgggggtgggtgccacctgcgtgctcaagtctcccgccaacggctcgctggggcccacgttgaacctgagcagcggggagtcgcgcctgctggcggctcggttcttcgacagcatgtgtctggagtccttcacacaggggctgccactgtccaatttcgtgccacccccaccctcgcccgccccatctgactcgccagcgtccccggatgaggacctgcaggcctggaacgtctccctgccgcccaccgctgggccaggtagtggttcagggggcctgctgggggggcaggggcagtgaggggtccttctcaccgcaccatgctgtgcccacagaaatgtggacgtcggcaccctccctgccgcgcctggtacgggagcccgtccgctgcacctgctctgcgcagggcaccggcttctcctgccccagcagtgtgggcgggcacccgccccagatgcgggtggtcacaggcgacatcctgaccgacatcaccggccacaatgtctctgagtacctgctcttcacctccgaccgcttccgactgcaccggtgagctgggtggggaggctgtgggtgagggtggccggccaccagccacctagtctcaactcctgcccctctagcctcactgcctgcctagcctcaccgcccctcccacctgcctgcccaggtatggggccatcacctttggaaacgtcctgaagtccatcccagcctcatttggcaccagggccccacccatggtgcggaagatcgcggtgcgcagggctgcccaggtgagcgaggctgcgggcctgggccccgctgtgtgtagcgccgcccgaggtctgcagggacccaggtctgaggtcctggggcctttctgtgtcctcttccttctgcaggttttctacaacaacaagggctatcacagcatgcccacctacctcaacagcctcaacaacgccatcctgcgtgccaacctgcccaagagcaagggcaacccggcggcttacggtgagctgacataggcagggcggggcggggcggggaggagctggggccggggcggggaggagctggggcctgaagctgccgcccccgccccgccgtgtgcaggcatcaccgtcaccaaccaccccatgaataagaccagcgccagcctctccctggattacctgtaagtgtggccagtgggggatgaggtggggcaggtgggcactgcagc

SEQ ID NO: 12200 - DNA, 6000 bp, Homo sapiens
gctgctgccctggtgtgccgtggcagcctagagtagctgcaggatggctggcccgagggaatgttcctgggcccttgagtcttctctggccagcagagttccccaaaaccatcacatccagatctgcgttggtgaccaaggccagactgaaggttgggtcctggtacagtgagcctgggggtgagggtagaggtcagggaggtggcggagagtgggtggcagccagccaggcggcttcctagggggcagtcagtgctggtagagactggcgggagggcaggcccacatcaggaggtggcacaggggtgggagatgagatcaggaccaggacccataggcaggaatcttgcacagaacctggctgtggagctgagccatgcaatggcacagggcaccttgcccttctcacctgggactgagtgtcctgcacctccaaaaggcatcctgcagccccagccaggccctgcagcccctccccaagccagttttctccaggatgggaaggcctggtcttgcccactcgcctcctcaccttcctgggaagtgagcttagacactgtctctatgctcagtgccctggcgaggagggtggtggttcttattctgctcttccctcccctcttcaccatttttttttaaagtcatttgataaacctgagggcagccagccccagctttggagttctgagactggaaggaccaaggggacaccccgggttggaggtctcactcttgttctctgaatgactagtcaaaggaggtttctagtgggatggggtgggcgtgctcttgggaggcaacaggtgaggtgcaaggggggcatcagagatgcccgttgtcagctgggcacagtggctcacgcctgtaatcccagcactttgggaggctgaggctggcgtatcacctgaggtcaggagttcaagaccagctgaggcaacatggtgaaaccccgtctgtactaagaatacaaaaattagcccagcatggtggcacgcgcctgtaatcccagctactcaggaggcagaggcacgagaatcacttgaacccgagaggtggaggttgcagtgggccgaaatggcaccactgcactccaggctaggcgacagagacgctgtctcaaagaaaaaaaaaaaaaaagatgcccattgtcctgagggagctaaagggctgtcacctggggaccctgaacaccttggacagctcccagctccggtcctcagtggctccggatcactcttgccccctggtggcctcactgagcgcggccgccgcggctccagccaaagctgcagtcggggccggggccgttctgtgttcctgtatttgcttttcccgcgagtgggggtgcccctgcctctgtgggcacacctgtgccttcctgtgcacctgcccagctcgtgagcacctgtctgcgtgcgcccggcgctcctgtgtctctgtgcgctcgcgaggctaggcccacacaggtcctctgccccatcgcgggtgcgggtgaggggctcggagtcctaccgggaagaggccagaagggagcgcatcctggagaagcccacccgcggcccaaacccagccggacttctgggaaccgcaccggccccagagaccgcaggtgccgagacaccctgaggccgagagaggtccagcgaggcccggagaggggaccagaactggagcagggggagggggcgcagtctggagccgccctcccgccccctcaggtggagcgcgcaggcgcagtctccgcgtgcgcgcctcgccggcgcctccatcccggatccttgctgcagcgtcagcgccgccgcccgtgcctttcctcttcctcctcctcctccttggcatccgcctcttcttcctcctgcgtcctcccccgctgcctccgctgctcccgacgcggagcccggagcccgcgccgagcccctggcctcgcggtgccatgctgccccggcggcggcgctgaaggatggcgacgccgctgcctccgccctccccgcggcacctgcggctgctgcggctgctgctctccggcctcgtcctcggcgccgccctgcgtggagccgccgccggccacccgggtgagcgagcgcgctgggcgcaggccgcggggcgccccggggccgggatcgccgggcggggaccgggttgccgggcgccgccgccctcgtcctgcccaggcccgcaggccctgcaggcctggtccgctggtggcgggggccccgcctcgcccacgatggaataaacaggcctggccggagggcgcagcgcggagcctccaaaaggccgcgccggatggggcttctgccggttcccagaggcgtaccttacattcatggcttcttccgccgggagcgcgtctggctcaggcctccgcgccgcggccatctggctctgggcgggcccgccgggagtctgcctgtgtgcgtctctgtgtctccgtgttcggggctcctgcgggtgtggggctggccctgagtgcccgccggcttcgctgccggtgcgcgtcccggggtcggggcctcagtgctgctctgcctgtcctcacgccttgggtggcgctgggcaccggccttgtgcgccatggtgggcgctgaagttctgggggcacttatggcgcaggctcggggtgctgttctagcttcaataggagggagactgttgcagcctcagagcctccgcctgcatcccctgccctcgagggcactggcattctgtctttgggactgagggctgcaggtggactccggaggagggtgataagcccagggtcctgggacaccctctcacctgcacagatgggtcctgagggtccagagagcagagctccctgcaggaacccaggatgcaaagctgacgtttttctggggggactgaactgggagactttgcgactgcattcgtacagtactcctggcagccctgcagaagaggtgctgtgagcccgttttacaggcaaggaatccgaggcatggagaagttaagtggattgtggcacagctgaggcgctgtcctgggcagcctggttctgtgtgtgtggcctcaaggggccagagtgaggccggcttcctcctgggctcagtgcccctggatgggaggtgggcatgaacaggagaggcttccgagaatcagagtgtgctcagccaggaaaggcggaggccacctattcaggaaacggggctgcagctgctgtgctgagcccgggtgggtggcaggtgccagtcctcagttcaccggcctctgcagcttcgtgtctgcctcaccgggagacctggcagggccctccctaggcaactcctcccattcccagtgcccagtgcttggaagggagggccctcaggcagcccagacgttggcgggtggaggggggtgtgccagccaccgtccagctgctcttgttcctgcgacctcttttcaggaggaggaagtgggggatggaggctcctgggctggggaaaagggctaggaggggcctggaacccagaccctagagccagctttgtacctcaggcccctgcctttggcgtggtggacggtggggtatcagcacaggagcggggactgcctcactccccaggtgccaagttggcgggtgggcccaggtggacctgctggcacaggtttaatgtttaacgtgcccaagtcccggcccactgatactggaggctgctgccccaggttgtggagggtgtgcggtgcctggcgttggctcctgtgcccacctgccactgcggctgctggaactgccttgaaggaaggcggacagcctgagggccctgagtgtcaggttaccaaggaaaccaaaccagccaaccaaggtctggagaaggatgatgccccgtgtggcccccgtggccctgcctgcagtgtgcagtgtggggctgggcagagaggaagagtcctggttagccagaggtgccaccgcagactccccaggcagggttgatggccctgctggggttcccctggctccactggcttgctgtgactggggacattccttagctttgaggcaactcagctatatcccagaggggaaactgaggcagagggccattgccccctcgccccgttctccagcaccaggataagactgattagccacatgtgtcagctggcaccgtggcctgggcccctcatcagcgagatgaaagtgtggttaggaactagggaactagggcctggcctgccatccccagcactgccaacctcggcctcctgaggccctcgggtgccacctggcccctgactgcagcccctggtgtggtggctttgggagtgacctgcctgggttctgtgtctgaggccagtgaggtcagcagactccatcttaggtgtcctcggtgcctgggggacaagccagaggctggaggagcagcatcccttccaggctgcacacttgtcagtgccgggttctggggagagccgcacgggaaggagaggtcgctggcggcatcgtttgctgctccccagagacagacctgggcccttccctctgggactcccaatctggacggggttcctggcttgctgtggggcatgttgaggccggaggctgggcttgtggggctgcacggccctgcccaggagaactcagcactgcctggacggcgagactcagcttctgagctgagggctctatcaggcctggaagtggaccctggggaggggtggggcagggtagttctgataagtcctaggactgttcgcttccgggttctgagccctggcgtcagggaggaagggcatgtccagaacaatggccagaaccaggcccggccagctcggggggtgacgggggcgggtggctggggcagcgctgccgtgtgcaggggccgagccctgcggggccgtgagccggccctgccttctgcttccttcccagatgtagccgcctgtcccgggagcctggactgtgccctgaagaggcgggcaaggtgtcctcctggtgcacatgcctgtgggccctgccttcagcccttccaggaggaccagcaagggctctgtgtgcccaggatgcgccggcctccaggtacgagagcaaagggggaagtcgatggggggatgtccctgcatgaacctctccctgtaagaagcggccggctgggcgcggtggctcatgcctgtaatcccagcactgtgggaggcccaggctgttggatctcatgaggtcaggagttcaagaccagcctggccaacatggtgaaaccccgtctctactaaaaatacaaagtagccgggtgtggtggcacacacctgtagtcccagctactcaggaggctgaggcaggagaattgctttaacccgggaggcggagcttgcagtgagccgattcaccactgcactccagcctgggcgacagtgcgagactctgtctcaaaaaaaaaaaaaaaaaaaaagaaggccgggagcagtggctcacgcctgtaatcccagcactttgggaggccgaggcgggcacatcataaggtcaggagatcgagaccatcctggctaacacggtgaaaccccatctgtactaaaaatacaaaaacaaaattagccgggcgtggcggcgggcgcctgtagtcccagctactcgggaagctaaggcaggagaatggcgtgaacccgggaggcagagcttgcagtgagccgagatcgcgccactgcactccagcctgggcggcagagcgagactccgcctcaaaaaaaaaaaagcagcagcctgcagcctcaatgcccaggcctgtgccaggtggtcttggggcccctggaccttgtggggtgttgggtccaaggcctgggagatcctcattcactctccacgaagcctcccatcctttccaaatggaggtgggcccaggcctggggcagtcaggccctcccaggagaagggctgcacgatgtgaaatgctgggatggccacgggagaggaagggcccattctccccgggcctgggctctgcagggtctgcccagaagccctccaggcccccacttccccgtccccaggcagcttgctctttt

SEQ ID NO: 12201 - DNA, 6000 bp, Homo sapiens
gattgcccactactaacttgttagcttaataatcatttacaatttctcctgctgaaagtagtaaatataactgaaaattttaagatcttcaaacattagttacctaatatgctttggcagtagagaacaataaagtctcatttgagatgtgggtactaggtgatctgcttggctttttcattgtttaggggatatcaacatgtaagcattgaggtgtgtaaaatttaggtatttgtcattgcttgttaaaaactttgagatcactttgaaataattatatctgggaatattgtgtgtataaaggcaagggttataatgaaaaaacagttggcaagatttataaaatacagaagtaaggattgattgttgggagaaggggatgggttaaaaactttgagatcactttgaaataattgtatctgggaatgtgtgtgtaaaggcaagggttcctgtgatatatataatgactaaacagttggcaagatttataaaacacagaggtaaggattgattgctgggagaaggggatgggtatagtgatagaatttctttgcagtgttttaaggaatgggcagatcagaggaagtaccaaggctaaacaaaatacataaaagcacaaaattatgaactagtctatatgcctggtagctctgtattgttgaaaagcaacagcaggtactgtgaggaattgagagcatcatgccacttacacggactgtggcattttacctgtaatggggaacttttgaaggatgagatattacctctgaaggactgtttcttcagtgtatttttcactaaaatactttctcttctgacttgagaccagttagggcttcagtagttgctttgatatgtggtaagtggaagtggaattgaacatgacttcgaagtttctaccttgggaattgtgtagcatgactgagtaagattaggaatattggatgaagtgtttagatgatgagctcacttttgaaaatattggtttgagatgcctgtatgacatccaggtggagattagtgagtagtcattttgaaaataggagtctgaggttcaggggagaggtcaggtagacctagagataaagatttgtgttttgttagtataatgattatagttaaaaccatgagagaatgaaatgttccaaatagaagtgtgaagttagaaccttagggaatgctagtatttaaatgatgggtgacataattggatctagtataggaaagagagaagtagccagaaagcagagaaatttgtactgtcaaagacagcaaaggaataaagagtttgaagacagaggagtgtcagctttatcttgtgtcatacaaggaaagggtgtggaggaattgaacctgtcaacattgctgatgagaaagtcaaatgctgctgctgtggaaaacagtttggcagctcctccaaaagttaaacttagaattaccatatgatcgagcagtttcatgcctaggcatatacctaaaataattgaaagcagagactcaaacagatacttgtacgccaatgtttgtagcagggttattcacgataggcggaaggtggaaacaacccaaacgtgcatcaacgtatgaatggatacacaaaatatggtatatatatatgatggaattatgatttcttccttaacaaggaatgaaattcagatatttgctacaatataggtgaatcttaaaaacattattctaagtgaaataagccagacacaaaagcataaattttgtatgattcctcttataggaggtacctagaatagctacccttatagagatagaaagtacaatagagattaccagggacttggattgagggcaagagaatgggaagttaccatttaagggttacagagcttttgtttggggtaatgaaaaaagttctggaaatgaatagtgctactgggtgcactgcattgtgaaggtacttaataccagtgaattgtacacttgaaaatggttaaagtggtacgtttaatgttatatatatttcaccccaattaaaaaaaaatcacaggccgggtgcagtggctcatgcctataatcccagcactttgggaggctgaggctggtggatcaccaggtcaggagataaagaccatcctggctaacacagtgaaaccccgtctctactaaaaatagaaaaaattaggccgggcgcagtggcgcacgccgtaatcccagcactttggaaggccgaggtgggcggatcatgaggtcaggagatcgagaccatcctggctaacacggtgaaaccctgtctctactaaaaatacaaaaaattagctaggtgtggtggtgggcgcctatagtcccagttacttgggaggctgagtcaggagaatggcgtgaacccaggaggtggagcttgcagtgagccgagatcgtgccactgtactccagcctgggtgacagagcaagactccatctcaaaaaaaaaggaaaaaaaaaattagccaggtgtggtggcacatgcctgtaatgccagctactcgggaggctgaagcagtcacttgaacctgggaggcggaggttgcagtgagctgagattgcgctactgcactccagcctgggcgactgagtgagactccatctcaaaaaaaaaaaaaaaaagaaaaagaaaaatccacaaaaaacttaagttgagtgagatcattagagttcattctctaatgcttaagttgtaagaggttaccatccatttttgtataagatacatagttgaatgtataaaattgcagtggaaaaaatcttgagggatttatatcaaaatctggttatctctgggacagaaatttgggtgagattttttttttcataatttatctgtataagtgtactccaagcaaatatttcttgtgtaataagaaaaaaagagaagttaattttttcaaacaaactcaaatcttataacagaattctgttactctttaggtatatggagctgccattcagttttatgaaccttactctcgggaacttctatcagagaaacagcttatgcacctgggcttgttgacgcctgtggagagaaaaatggtctccaaatccatcaatacaaacaaatgcatttgtttactctcacactggcctttttttgaagcttttaggaaatttcttatgtttatctacaaactttctgtgtctggaccacatcctcttcccattgaaaagtatgtataatgattagaaagatggctggtggaaaactgggtatataaatatatacatttgtttgtgtaatttttagcagcaaagttggaagggaaggaagcctgcatttaactgaacttttttttttttttttttgagatggagtattgctctgtcacccaggctggagtgcagtggtgtgatcttggttcactgcaacctccacctcctgggttcatgcagttctctgtgtcagcctcccgagtagctgggattacaggcacctgccaccacgcctggctaatttttgtagagacaaggtttcaccatcttggccaggctggtcttgaactcctgacctcatggtccacctgcctcagcctcccaaagtgctgggattacaggcatgagccaccaactttttacttactcccttcttcgcctgaatcattgactgtgagcttaaaattggatagtagtggtaaggttggccaaataataatcctttgagaattcagctgaagaagtaactcttataaattatattgtgagtgttcttcttcctatttattctctaataaccaagagacaaatagttactgctgcacacacacccaccaatgcaagtggccattccaaattctaaccgtaatacctctctaaagtgatgtagaaattagtcggaatgagttaattgatgttaaaagtggagttttggttttagcattgacagaattatttgagctttctctttaatttttaattctttttgtcatgcgatctttctttcctaagaaagaaaaatgtatgttgagctactcttttttaaagcatcttttctgatttctagtggcgcattgacttctgtttatgatagtttataatttatgtatcctgctaacaaactaaaaagtgtcaagagctgtaatgtattaaagtatgtgtaagcttagatgtttcttacaatttcagaacttttacattatagcagaaagaatatcagtgaaacatactagtttagtggataaggtaggggtaattatgtgagggtttaaaaataatgctgtccaaaaatcaactttaaaaagagtgaagtactgtgcataaactcatcataatttgatattgaaatatggttgcaactttcattttgtactcttgaaatggcagtttaatgatttatagttctgggtttaactttcagctgtcagattaatttaaagtttattgaagtaaaatgtaacattagtgtcaagttagcaaccttttgaaaaattaagattctatgaatagcttgtgataaaatcaatgtatataatcaatatttttttcagttgaagtaatatgttgcgtttttatggctcctaagagctccaaactttggagaaacttaagaagcaatttttataggtgcaaaaatagaatgggtaggtggttcatccagtgttagaggagtaaatctgggattaaactgaattttagtgtaaattcattatagcacagttagttgctccctgtactggcacagataaccagggctataaaaattcacttctttcatgaaaactatttttatgttatttttatttgttgggtaatgataggggatataaatagactttaagtcaggaaatacattgtgtatttcagaagtttaatgggcatggataaattcatttacatggagcaaatttacttacttagcctacattttagataaatggccatgtcatatctgggatgatatatagtgatatttaagatttgttaaaaactgtgatgcatttagaaaagtaattattatatttatttcaaatttttttttctaggcacatttcacattttatgcaaaacatcccttttccttcaccacaaagaccgagaatccttgtccaggtaatcaaaagagagtatatttggggagaactttgcatatgctcacctgagtcattgcagagtggattctgtatacctttgggtttgaggtggagcaatatgcattcataaagtccttggattttctgtgctttgtagctttactgaacaccctttcttactgggttttggatttgagtgtactgaattggaataattataacccttggttcataacattttcatttttggcccatgcatgacctttatgtagctagttttaataacataaaacccagattatgtttgggcatgtttttaataccagattctctaataaatattgaatataaaatgagcaatggttggaggaggttaatttaaacaaggtctataatagtactgtgctaaaggaccagtttctttttattttcagtaagtagcagacgtaggtaggtgtacagcttgtgacatatgcaacatgaacaggtctatatcctctctataataatagttctactgatcacatgcttggatataggagagaggtcagattgtcataaaagttgcttaatggtttgctcttcatttatatactgtatctttctggaccataacaattaacttactgacatacttaacatactttcagtagcactgatctatagagggaagccatttaaaagtttttctaagacattcttaacattatgtatggtgggattaagtcagatattgttgatcttgaatgttatttcagttccacaagtatttacgtgccaagcaactgccaagtgcctacagtctgttgagtaaatgaatttgaagcttttcagaagcagtagttccataaattttaaataattgtactttaaccaattaagtgaatcaaaattcagtcaaattaaccatttaatgaaaaagaactaatgtaacacttctgagtaaatacagctatcattttat

SEQ ID NO: 12202 - DNA, 6000 bp, Homo sapiens
acagtgccccgccatgaccctctcaaccctctgtgtcctggggccatccgagccaacggagaggtaagcctgtagagccctgcatctgcaggctgggccacggggagtagttccctcttagaactgtcctccacccacagggatagtgaacctccttctgggtcatatcccaccaagctttttggtcccctagggtgggccttccctactcccttgtagcctgtccagtctttgaagcccaccaggtaactggtggtatggggcagtgagtgcttctagcctatccttgtcggtaggtgaatccccagtacgatagcaccttcctgtttgacaacgacttcccagctctgcagcctgatgcccccagtccaggtaacctggctccaactgctgctggggaggagggtggctagacctcttgagggacttctgctgcagagagtgatactcctttacctcaggacccagtgatcatccccttttccaagcaaagtctgctcgaggagtctggtaactatggatttcccctcttacaactttcaaaccagagttggagactcagcattggggttcggccctgcccgtagcacagccaagccctacctctcggttatcttttctcccgtcaccacccagtaaggtcatgtgcttccacccctggtcggatgtaacgctgccactcatgtcggtccctgagatccgggctgttgttgatgcatgggcctcagtcacagaggagctgggtgcccagtacccttgggtgcaggtttgtgaggtcgccccttcccctggatgggcagggagggggtgatgaagctttggttctggggagtaacatttctgtttccacagggtgtggtcaggagggagttgacttggtgtcttttggctaacagagctccgtatccctatctgatagatctttgaaaacaaaggtgccatgatgggctgttctaacccccacccccactgccaggtaagggtgtcaggggctccagtgggtttcttggctgagtctgagccagcactgtggacatgggaacaggattaatggatgggacagaggaaatatgccaatgatgtggaggcttggaggtaaaggacctgcctgttcttctctgcttttgccccttgacaggtatgggccagcagtttcctgccagatattgcccagcgtgaggagcgatctcagcaggcctataagagtcagcatggagagcccctgctaatggagtacagccgccaggagctactcaggaaggtgggagagagccaagccctgtgtccccaaggagtccctaactttcttatcccatgagagaggtgtgtaaaggagaaagctagaggtgaactagtagagagagacttgctaggaggccttagcaataatccagtaatctaaaggaaagatgatggtgacttagactcgggtggttagtggtagaggtggtgagaagacatcagatcctgggcacattcttttcttctgcttcccttgcctatttgctgaccacactccggctcctatgtcaccttgatgacttcctatccattctgtcttcctaggaacgtctggtcctaaccagtgagcactggttagtactggtccccttctgggcaacatggccctaccagacactgctgctgccccgtcggcatgtgcggcggctacctgagctgacccctgctgagcgtgatggtcagtctcccaagtaggatcctggggctaggcactggatggaggttgctcccagtagggtcagcatctggaccccaggctgagagtcaggctctgattccagatctagcctccatcatgaagaagctcttgaccaagtatgacaacctctttgagacgtcctttccctactccatgggctggcatggtgaggcttttcaagtacctatatttagccccaacaccatttctgggctcctggggctcagcctagtgaactgcaacctcaaaggagcaagccttgaaacagttgctgggggaagtggccagagtagagatgctgggactgagggtggagcagcaaacttggtgaaactacatctccaatgtgctttctaatctcctgccagctcttctcaagcaggggatcctgggagatgtagttttcagatacctggttgggtttgggagtaggtgctaacctggataactgtaaaagggctctctctccccactgtctctcttctttctgtcaggggctcccacaggatcagaggctggggccaactggaaccattggcagctgcacgctcattactaccctccgctcctgcgctctgccactgtccggaaattcatggttggctacgaaatgcttgctcaggctcagagggacctcacccctgagcaggtcaggactcagaacagtctggcgtctccagactctcacatgcagtatgtgcaggcacctgatacttctgttgcccttgtgctccagtcattgcacaaggcagaaaacagctctggcaggaagggactgccaaagttaggagccctagggcctggaaggagagtatggtcctcagatcccccttctctcctgcttcctccagggaacccaacagtcatgaccctgatagtttcccataacaacctgggcattccttgggactcaggagctgctaaactctttcatcccctggtggcttcagcagtccttatcaccagcctcacaatcccacaggcccacccccagtgggcctgtggcattcatatttcatattcatatttcaaaccacaatatccagcaaaatgtctcctgagcacccagaactccataccatcggccgggtgtggtggctcatgccttaatcccagcactttgggaggtcaagatgggaggattgcttgagcccagaagttcgagactagcctgggaaacataggaagccctcgtctctacaaaaaaaatttaaaaagttagccaggtatggtggcatatacttgtggtcccagatacttgggaggctgagataggatcacttgggcccaggagtttgaggctgcagtgagccatcatcatggcatcattgcattccagcctgggcaacagagcaagacctcgtctcaaaaaaaaaaaaaaaatgaagtccatgccaccattcttggcagcccagcccttatcctccttaattgctccctgtcccttttccaggctgcagagagactaagggcacttcctgaggttcattaccacctggggcagaaggacagggagacagcaaccatcgcctgaccacgccgaccacagggccttgaatccttttttgttttcaacagtcttgctgaattaagcagaaagggccttgaatcctggcctggaatttgggcagatatagcattaataaaactgtgcatctcaaacttttatcacatactctaatatcagaggagtgtgaaccttcagagatctagggttaaaagctaaaggcatagctccagctacaacttttctttgtctacagatgtgtaaaatcttgatgcaaaaatctaccccaaatttctgaacaaaattaatattcagtattatatctagcctatagattctcttactcttggtgtaatgacagcattcccagtttaggaaactgttttaaaatcttgtgtcttggttgtggctgaggctttgggaaggccagagccccctttgccaccacccctagggtgtcagctccaagcctgggcctgagggtttgatggggagcgggtgagctggatcctgatcccagtggtcagtggccagatcctgggctgctggccagaaccctggctttgtgagtggctgcagcttggctctgctccagcccacaggggctaaaggggcgggtagggagtgtgtagggagcgtgtacgtggctttgtgtccttggctcctccagactctcacatgtgcgggcaccatatacttctgctgcccttgtgccccaatcattgcacaaacagaaacagctctgacagagaagggactgctagagttaggaaccctagggcctggaaggaaggtatggctctcagagtgacctggggtctattcagtcccctctggacctgtttccctggcaacgctgtgggaacaacagtctatgcaacacaggagacctgatgccactggtgtcctccaaattttaaggcgaaggcaggcattgtgaatgatgcagggatggccagaatggtttttgccttcgttctttccccaggggaaccaagcctgtgggtggggaaatcacactaaggctggacagtgactgaatctggcccaggagaaacttggctgcctgccttccagaccagggtttttcttccctgagatcctggaggggaagtacctggaacttgggagtgttgccctggtctggaagatctgatagacatagtatgcacacatttccctcgagcttcccatgactggggagtagatgagaaccctgagtgggtggctggtttcttgaggcatacatatacccgacacaccttacacctctgatttggctgcattttggaatcatctgggaagttttaaacaatactggtgcctaggtccaacctccagagactctgatttaattggtatggggtggggttttgcagttttcaaaccacaatatccagcaaagtttgagaaccactgccctacacagccctccttcttctttatcttatctggagtcaggggcaccttcagcttctccaatcacctggccagtggctcttgtttccagtcctgctgttccagggtggataggccttcaggcggagacccaggaatccagctccagactctgtcccaagcagcctcttcagtccgggacgggacaggaagtgtccggcggaggtgggggtggaggtgattggcagttggagtctccaatgggccaggagcccccctatttcactcctctccttccattggcgcctgggcggagccacccccgctgcgggggcccagggcgggagggagtagaggccggggcagagggcgagggcgagggcagagggcgctggcggcagcggccgcggaaggtgaggcctggtgtagacgccaaagtcttgtcaggagtgggcggggcagggtgatgtatgatctgaaaggccgggagtgactaacgactgtcagtgtgtatgtgcctgtgaggctgtgtctgtgtgacagtatcattgtgtgcgattctgagtgtcacttggtgcagctgtcagctaatgtgactgcgtgtgtcagtgtgcatggagctggaggtgcatgtggctgtgcaagtgtgggattatgtgtgtatctgtcaatgcacatttttggtgggactgggttgtgtgtttgtgtgagagggactgtgaccacatgagggaatgtgttttgggaaggtctctgtggggtttgagaccatgtctgccagcgtgagagtgggtggctggctttgtgtgtgccaatgtgtgacttcagcagtagcagagcaaaagtgaggtttgtgactatgtgtgtgtcctgggtcctaacttaaaccgtgtgggagtacagctgtattcatgtattgggggacctacctcaagagcccatgggactgacctttctcttaagtgtccagcattgacagacacacccacaacacacgtggcttcccctccttcctctgctcaagaatccccagcatcaggtctactgctccttattttctgtttccctgcttggctcagtttcccttacgtgccgttttctgtccctattgctgtcttactagagatacctctgtgtgtttcttcacagctttgttcccctggtctctctgtgtgggtgcatttccagttttgcctttcctttctctctgtctctctctgtgcccctatgcctgccttccctgctgatcttgatctctggctagttgggggcctgtaacagtgatgagatgcgggtctgccccggctaagagctccctgagagagggggcttagaccatgatgaagagttgcttttaggcggtgctgtgagccct

SEQ ID NO: 12203 - DNA, 6000 bp, Homo sapiens
ttttcacaaagctgatatttctggcccttagaatatgatacctgtttgtctaaaaaacatatatctattcaggtaagttggaaactgagatctgatttgaaaacattttgggctgggcgtggtggctcacgcctgtaatcccagcactttgggaggccgaggtgggcagatcacgaggtcaggagatcaagaccatcctggcaaacatggtgaaaccccgtctctactaaaaatacaaaaaaaaaaattagccgggcgtggtggcgggcgcctgtagttccagctactcgggaggctgaggcaagagaatggtattaacccgggaggcggagcttgcagtgagccgagaatgagccactgcactgtagcctgggcgacagtgtaagactctgtcaaaaaaaaaaatttttttttttaaataataaattaaaaaaaataaaaaagaaaatattttgaacttacaaagatgtatatgaattcaaagtaaaaacccttgaccctttaaacaatcacagcagcgcccaccgctgccccctttttttttgagatggagactcactctttcccccaggctggagtgcagaggtgcagtctcggctcactgcaacctccacctcccagattcaagcgattctcctacctcagcctcctgagtagctgggattacaggtgcctgccaccacgcccaggtaatttttgtatttttagtagagatggggttttgccatgttggccaggctgatcttgaactccttacctcaggagatctgcctgccttggcctcccaaagtgctgggattacaggcatgagtcaccatgcctggcccacagcagccctttgaggctgttgaatatctgtgagaagatgaactggatcttagatctacaaccatactgtgcactgctgcgtggctgggagggaagtaggagttggaggggaactggaggtttgacctaatttcaggattctgtctctcccttatggggctaaaataaagaatgcagaatttgagtaaagtctctatttgctttctatatactttgctacatttctttttctacattactttctccttttctattgagatgtgttgtgaagtgtatctttcctgccttatttgatctacctttctatggctgttctctgccctctgttggcaggttctcttggacctgtccgtctgtgtgcaggggacaattgcatggagtcaaagcccatttctgctagtcaggtcagcagagaagatattttgttttctggaattctgtaggcctgggaggcatgatctggtgtagaacaaacctgaggatccagattcagctgcacaaataggtttgttataaaacgtttaatgctgtcagtttggggcatcagagcctatcacgaaaattagcatgagcccgaatcccatggtggttgcagagctcaactagggtcttgaggcacctttggcctgagtgtaaccaggattaggatttcttttgaagaagggacagggcagcttggaaaccataggagattctagcagctggccaatttgatgctctgcagtttagttctggatcagaaataaggtgtttggggccgggcgtggtggcttacgcctgtaatcccagcactttgggaatctgaggcgagtggatcacttgaggtcaggagttcgagaccagctggccaacatggtgaaacgctgtctctactaaaaacaaaaattagctgggcatggtggcgggcgcctgtaatcccagctacttggaaggctgaggcaggagaatcacttgaacctgggagatggaggttgcagtgagccgagattgcgccactacattccagcctgagtaacagagtgagactctgtctcaaaaaaagaaaaaaaaaaaaagaaaaagaaagagggtgttgattgaccctatccagaagaaattatagctggtatctgtttgtggattagaagaaggccatgacagtgctacaaagagaaagttggaccctagctggttgctgcttaggccagtagaatctagatttcctaggttttctatgtattgcagcatggtcaccaaatacagccaaaatattattgcccatatcaatgacagcagtgatagcttggatagtgggatatatacataaccgaagttctcatttatttaatattttcagctttccctcaaacatgaaaaaataaacaccaaaagcctttcactgtgtgttaataaaaaacctcattaggggatttatcttttatctccccactccttcccacttcccttttgtcttttaaattttatttttagtttttacttatgttttcttttcctttctttctttcttttttcttttgagatggagtcttgctctgtcgcacagtggcgcgatctctgctcactgcaatgtccgcctcccagattcaagcggttttcctgccccagcctcccaagtagctgggattacaggtgcccaccaccacgcccagctaatttttgtgtttttagtagagacgagatttcaccttgttggccagcctagtctcgaactcctgacctcaaacaatcctcctaccttggcctcctaaagtgctgggattacaggcgtgagccactgcaccaggctccttccacttcctttttttttttttttttttttgagacagggtcttgctgtcacccaggctgcctctatcctctgggatcaagcgatccccccacctcagcctcccaagtagctgggaccacaggttcgtgccaccatatctgattgatttgtttggtttttaatagagattataggcattacaggcaagagccaccgtgcctggccccttcctactttctagttaactggccaactgggaggaaaagggaaaggcaagatgcttgaatgtttaatccctaacataatgaagaatagtccttaatgttcagaataatgacatatgatgcacttgtacttgcgtaggagtctgggtgacagtggtggctgatcctcactgagggctgcaggtgttccagagagacttgcctgggtttggtggctattatattgtaagcacagctttctacagtaagttccatgagtcagcaaaatatctataaagagcctctccttggagaccatgaaacctgcattttaatctctcttttgcaactaaaaagccatgtgggattgggggagaggagcaagtaaggacactgcgaccttcctctctgggatttggttttcaattatctttaaatgagagggctaaacaatatatttatatgatcctcttagccctgccattctgtaattctttcaggaattttgtcattttggatttgcttgtctcataaaacaatgtgtagttgcttaaaaatcaactattctatttggttgacttggtctaaagtatttctcatgttgtctcgtcattcttttgactgttccttttttttttttttgccttggccagataggacaaaattccttttcactgcagtattgggagcctggaactagagttaccaacccctctgcgttaaagaaggagctgtcctgaggcttccatctctactgggcttgaggcaagaacattgttagggacggcctgctcttggcctctgtgccccagggattgcaaatgcatgttcctcaaaggtaagggctgtatcattcggctttctttgtattcacaggtacagcttgtgctaggcagccggtgttcaataaatatcgtgcctaaggataaagtggcattgtccttaatttcccccaccaaaccactaggtgtcgccttcatctcagggaaaccatgcccgtcctcgccctatacactcccaccccactccagggctccaggagcgctcttagcttgtgatttctggagaaatagcttgaaggggggagagaaaccgtggctcttagcgcgggcagagaatgggcttatgtgcatgtcctttatgacagttggagaaaaatccccaaggtcccatagcagtccctctcagccaccatgagatcatccctcacaagctgttcttggggtcagattggcactccagatatgagggccctagggagagcttcctaagggaagctgggagcaaggtggaaccccaggagagcgtggatgggcttccactgcggggagtgtcccgccggtccgttacaggctttccccaggcgccagcctgcgctgtgcaggagacaaaagaaaatcgaggccctgactgagcagatggtgcggaggaagccgggcgggctgcggtgggcctctgaggacacgaggagggcagggggcatggagacagcggggggccgagagttgagtcccaagcaagaaggagcctcgtggactttctaaggactggtgggaagtgtacagcaggggcccctggctgctggaggggcccgtccagggagcgggcatggtccgcggtggagtaagccgcactgccgtcgggagggcgctatggtttgctaggtgagggggctggtgaggataccacacgtctggggatcctcgactgcttcctggagactggaaccactgagggactcagggagttcagaggggagacccaagaagaacgggctgagcgagggggagaggacaaaccctggggtcgctggcgtgtgtgagatggaaatggaaggaggggcggcagggggaccaggggcgtgggggagaccagggtaggccctgagagtgagggagcgcccgggaaccctgctggccggcgaggccttggtgcggagcccccaagtgctcaccggggtgggtttgggacctggcggtcccgagcgcccgggtggggggtgggggaaggcagccggcgccggagggtggggccgggagggaggaggagaggcagcgggggaggggcgggggcgggcggcctgcccgggggagtcgcactcggccgccggcgcagcgagcggagacgggccgggccgaggcgacctgacccggacgagcggcgcgcgcggggcccaggcggggggcgggaggaagcgccgggcagcgccggccgccagggcccaggagaagcggagcagagaggagcggggacacgggcggggccgccgtagctccggatgggaccagcgcccgggcccgttagtccaagcaggagctccgggagaatccttcacagggagatttacccctgccttcccctgccctccggcccaggcctcgcttcgctccccgcctgcccatgatcccagtccttccgcggcgcgggcaccctcccaccttacccccttggtcctatgtggcgcagcgccctcctgccctcccggccctttcagctgtgaggttcccccaggccgtttctttgtaccacccgccccccacccccaccccatcccagtcccagatccccttttccttctcagctttagatttatcaggcttcttcacctcgcactgtccccatcctggccgcaggccccctcggtccctccctccccctgccaccccgttctcagtcctcagtccttgccctaggctggtagcccactccttgcccgccccccgccttcctcccatctccccctcctctccccggcccccagcaccttctgcatcccagcctacctagcctactcctcctcttcctggccctcttccccaggctccaggctggggggtgctcgcgtctcccctgtaggccagagcagccccaagttctgggggcggtggggctgctgctttatccccatggcgctgccatcacttctgctgttggtggcagccctggcaggtggggtgcgtcctcccggggcgcggaacctgacgctggcggtggtgctgccagaacacaacctgagctatgcctgggcctggccacgggtgggacccgctgtggcactagctgtggaggctctgggccgggcactgcccgtggacctgcggtttgtcagctccgaactggaaggcgcctgctctgagtacctggcaccgctgagcgctgtggacctcaagctgtaccatgaccccgacctgctgttaggtc

SEQ ID NO: 12204 - DNA, 6000 bp, Homo sapiens; identical to SEQ ID NO: 2582

SEQ ID NO: 12205 - DNA, 6000 bp, Homo sapiens
ggcatatgtcatttgtattttgagaatagtgttatgtttattttgctttttagttgtatctggagctagaagaatggggacaggattagactattgcttaagtaagggcataaggctagcatgaatagatgatgtatgcagaactatgttgctttcaattctccatcaaaggaagtgatttccaaaattaaaagggtgttactaaaagggatttggatgacaatgaaagaaaatccaggtaatttgaatgcatttacctctctggggcacactggattgtatctcagggttagcagggttgaaggagttagcaggcatcatctttgagccattgctggtgattgttgagtgaacttggagagtggcagaggttccagaagaccagagatatgcaaatgttgttctatatagcttttgacaaagttgaattcctaaaactttcaatgtgtgaaatgcacccttgcaaaatttctgaactatcatcatataaattatttaggagtccagagaagagattgcattgatccttaggaaccagcataaatctactaatgcgtagtgaccaattgtcacattttcttttataaaaggggcttctatattggaagataatgccaaagacatcaaagcatttgacaaatatctctcaccggtctccttacgcacataatagagagatgttggaggatgacagaataatgcaataaattcatagctgattctattcatatgccataacataggtaatgactgagtgttcgtcagcctagaaagaggtttctagtggcaggtatttagggttttcttggccccaaactgaagcaggatccttagaacttggatagagatctgaaaaattcatatgtatgtggctgatgatgtaaacctatagaataaatcttcataatatgaactatgaaaataggccaacaccaactaggtacatttaacagaaataatgagaacttctaaaattgaggttgtatttataattgaaacaacagttgattttctttatttttggccgtcttgaatttcaccaattaaaaacagtaacacttgtatagtgaaaatgactttttaaggttaattcatgtatggtaggagaatgctgggtccacctacatatggttgctatgagagcatgctataataaagaattgctggactgagaggaaaagatgtgagtactgttcctgtcaccaccataaactagttgtcatcttgggccagcagttggcatcaccttccttggatctgcgtattctcatctgaaagctggagatgacaaggggtggggtgaagttagtcactttgctccattccggctgtcatgtgatatgaggcagtacaacttgattctcatgttccttggcgagtttggccaaatttctagacttttaaatggacccttccacatatttctagcttaaacagaccctttcaggccctctctgagaaggggccccttttcttttaatctgcaagttccttcagatcacccttcttcaggatcatattaaactatccacattttcaacgcttcaatccaagtttcaaacagtgtacttgagcccactttgatctcaggaaggccaacattttttttttcttctttttgggctcaggcccatgcctcaacatttctggatgagcctataccctcttcttcaccggccaaaaaagttctccatggctttaccatggggtccagccttcagtttcttcattctccgtcagccgaccctgaacaatcctggccaccgttggcatttgatcatcgactgtttctctagcttcctccccagcaccactattttgattctgctgtaatctttatgaccatttaattttgaatttttaaacttcatattttattttcctatttcatatcttcacattatcatttgtaaaggagtttaaaatatttcatgtgcctcgatttactcttgcatagtctgattttcccctcttatcagtcctcaaatatcatcaactctttgttttctgctcttatgggacgcaacatttgtacatcttcatacaatctagcctttggcttcttttgtctatatacttagattaacctctcagagttggagatctttgactgagggatatagtagtatagttcttgatccattttgggtacctttattttgactgacaaagacaagaggccacgttagcacattatattctttccttaaaactttaaaatatttaagaaggcagcatttatatttaaacataaatttcagcctccttcttggggcttcccttaataccaaagtaattttggttggaggaatgttttgcaggctgtgatatctcagattgcaacacttctcagcctgctgtttcctgtgcttctcctccagctccttccactgagaattctccccaggcagcattttcacgctttcagtgctcatttcaggcactctctgctctgctgtgcctatgcatgcttgaggctttgccctaaactcatgtgacctgcatagctaatttcaggttctcagtctaggcttactactgctgaacccaagagactgatgtattgcccagactcctgcacgctgtctgccagccacaggtacattctggggtcatgtattatgctcctggttagcacattgggcagggaacaagctacccattgtggctgtgaccaggtatagagtctctgcttatctgaaaaacagttctttgacctcactacctgtggccattccttcctgctactgtgtccttgatcagccagctccccaccctttgcctagaaagcattcccaatccctaccagtaagataaagggagcaaaacagaaagccagttctgtgtggcccaaggctctgctatatatgtgtttgcatccagtgtctgaattttctccctgaagaaatggaagatcttgggacggatcttttggtaagatttagatgttgcgtagctcctaacaaggctgtataaatagaagtacttaaagcctttaggacatggacactctcagaaagtgtttttagtttatctgatttctatacatgtttttgggctgactaaatgttaagtagttctaatacagtatgatacaatgggtctctacagtctcttgggttcagtggaagttaagtggctgttacatgtgtagttcacaacagtagaagacagaaataacctgtgtcttctccataatcacagagatacctcgcataaggactaaggtgccttttaatacatttttatcctgaagctctctgatagtggtcttctatgcaatgcgggagttcaaacttcataactagcactctggttcagtagctctgatgaaatcactggggctcctttagcaactgaattgtttgcatgtcataaaattatgatatgcttcaaaggcaaatatttatttagtgagaaatataggtgtgcacagtaaggcttgtgccttcctcatggcgtatttccttatgaagttcattagtctctgactctaggcaacgtgatataatgggagtggcacagaccataaatgtcacaagatctgagctcaagccatggtgtagctagttatccccgagttggaagacttcaggctcagaagccacttggtgtgtcagaggtcttttacctacaaacctgagagggactgggggaagttttagatcaggtcatttctaagaagtcttttagctttaaaatctcaaattagtatttctaaatgccattttacccacttttatataattacttgcccatttaaccacacttagaaaattaagaaaaaatatatctactctttcattctcgaacacagataaaatcattgttcatgttctggagtattagcttccttttttctgagcagatatatctaagaatgcctaaaacagtgtgtgtacatacatttcaaaaattggaatcacatattttttcataaattgatttttgtttcatttaacattatcccatgtcatctgagtagaacttagagtttttatccaaaactagatttccttggtcacttttgcagtttctttggaattttccatatcgaaggcaatgttatgcactctccaaactaagcacccttggcttctgaatgtgctgtaagtacagtcagttgattccattccagagaacaagcagtagaaatatcccagagcactctgccttcttgctgtcactgcgtgggtagagactgccatggccaggggtcaaggtggaggatgaggggtgacccctaaaaaatgatattagcatgtgaccaaacagtgtctcaaatcgtctcgaaagcccaccaatccattgtggaatgacctctacaaatagttttgcttctgcacaaccaggtgagatggagctgactctaagcaaagagatagagaagggaaacttggtaaccaagccttttctttctgttctctgcctcccttctccacgcctcacctcttcctctctttggcatttctcttcaccctctctagccccccagttatcactttctcctccatgggcccgttacattttgttcatgctgctgatagagtccttatcacgtattactaattggaagatttgggtggtagttgttgggggtggggagaaccagggtaggttatcatggccctactcataagaagtttatgtctcctcacttctatatgagtttcagaactggaagataatcttagctgaggttagaagaacatgtgaagctgaaatattactgaatatttaaaaattattttccactattacttgtttccttgcatgtggtttcaatgacattatgggttacattggttttggtggccttgcttagaatttcaacatcagagagcctatattaagaagtcctacatttagtgggaagttttactacatcactagatgtactataaggtcatctagtttctgattctaaagttctgtgatttgtagcactgtttccatgggaaagtgcattccaagttctaaacagctgagttttggatctcagctcctttgagagttgtggaccagtcagacacaaaattatctttaaatatacagataggggtatgtaatttgtgttgtatgtagaactaaccaccatttgagcccttattatgtgtcaagggctataataagagccttcatacattcacttattcccctcttcaccatgattgtttgaggtaggcattattatttccattttacagatgaggaagccaaggcccagcagagctgagatgtgactgcagagccgtccaaccccagtcctgtgacctttctctggtgcctgatacctctcagcatttgagggccttttctcttcctgcttcatctctaaaggtccttctaggagagaggtgaaaggtaattcttttgaaaatacctattttaaagcagtattattcccttcgagagacccattgattccctttgatggagcccaataccatgctggatctttgctgtttctgagtggtgtgaatgggcagctgatgtgggtggcctcaggagcctgtagaaagaggtgccccaggaaaatcttttacacaaaagaacactacagcatctgactgcaagattcaaataaacacactcaaaatggtctgtagagaatagagtggtcaacaatgatggatagtaggtctctctctttttaaaaacagatttaattatagtattcacacaaatctaactgaaaatatgagccagaatgttcatttgttcactcactcatcagctgtcagactttgaatgaacgcacatatgtaccagattttgtactaggccctaggagggtacaaaagtggatgaaacatagtccctgcttcaaggagctcagaacctagtggggagcaggcccagaaaccttcagatcctctgctgtgcatttttaaaatagcccaaataccaaaactttttttttttttttttcgaaacagggttgtcactctgtctcccaggctagagtggcacaactatagctcacttcagccttgacct

SEQ ID NO: 12206 - DNA, 6000 bp, Homo sapiens
ctccacctcctgggctcaagcaattctcgtgcctcagcctccacacttggctaatttttgtatttttactttatttatttagagatggagtctggctctgtcgcccgggctggagtgcaatggcatgatctcggctcactgcaacctccgcctcccggttcaagtgattctcctgcctcagcctcctgagtagctgggattataggcaggcaccaccacacccggctaatgtatctttagtagagacggggtttcaccatgttggtcaggctggtctcgaactcctgacctcatgatcttcctgccttggcctcccaaagtgctgcgattacaagcttcagccactgcgcctggccttattttttgtatttttagtagagatggcctgttgaccaggctggtctcaaactcctggcgtcaagtgacctgcccaactcagcctcccgaagtgctgggatcaagagcatgagccctttgtccagcccaaataattaattgcgtctgtgtgtggttttttgttttcttttgagacagagtctgcctctattgcccaggctggagtgcagcggcctgatctgggctcactgcaacctctgcctccctggttcaagtgattgtcctgcctcagcctcctgagtagctgggattacaggcatgtgccaccacacttggctaatttttatattttttttagtagagatggggcttctccatgttgaccaggccggtctccaactcctgatgtcaggtgatccggccagctcggcctcccaaagtgctgggattacagggtgagccattgctcctggcaataattgtgttttaaaatcactttatataatttctcttcacactgttaagctaccaacttgataccagcattcatgtgttgcattttgctttttttaaatttaattttgtttcataagaatgtaaaaaacatttatatcattccaaagtcaaatccacaaaacacagtatattcttttttttttttttttttttttttgagacggagtcttgctctgtcacccaggctggagtgcagtggcgcgaccttggctcactgcaacgtctgcctcccgggttcaagcaattctctgcctcagcctcctgagtagctgggattacaggtgcccaccaccatgcctgggtaatttttttttgtatttttagtatttgtaatgattttgtatttttagtagagacagggtttcaccatcttggccaggttggtcttgaactcctgacctcatgatccacccgcctcagcctcccaaagtgctgggattacaggcatgagtcaccgcacctggccaaaacatggtatattctgagaagtctagcttcgatccttgtccttccatcctggtccctccctcccttataggtttccattttatttaataatttatccttccaaaaaaaaaagcaaatgtacttacgtgtgtttctgctttcctaggtaaacagtagcatcctacatacgcttttattactttgttaataccctagtttctgacaaattattgttcatctttcttaaaattgcagtgttcttcaggcttgatcttccctcttgttgaaataagttgttgatgggtatcatcagaagtctaacctaaatgaaaatgagtttttgtttttgttttgagacactgtcttgctctgtcaccaggctggagtgcagcggcacaatctcagctcactgcaacctctgcctcccaggttcaagcaattctcctgactcagcctcccaagtagctgggattacaggcatgcaccatcacgcttggctaattttgtacttttagtagagacggggtttcaccatattggccaagctggtctcgaactcctgacctcgtgatctgtccgccttggcctcccaaaacgctgggattacaggcgtgagccactatgtcaggcctgaacctgagttttataaaaagtactgttatccattctattacttctggcaaaagtttgcgtggggaagagtttggcagtcctaagcaaagttgtctggcgtgagtgatggcatcgatacccaggattttgtgtgtgtggtaaaatgtacatggcataaaatgtaccgttttaacttttttattttttgtttgagacggagtctcactgtgttgcccaggctggagtgcacagtgcaatggcaagatctcggctcactgcaacctccgcctcccaggttcaagcaattctcccgcctcagccttctgagtagctggtattacaggcatgcgccaccaggcctaggtaatttttgtatttagtggagacggggtttcaccacgttgaccagggtggtcttgaactcctcacctcaagtgatccacccgccttggcctcccaaagtgctgggagtacagtttgagccacccagcccagccctttttaaccttttgttttttttttttgttttttttttttgagacgtcgtctcgctctgtcgcccaggctggagtgcagtggcaccatctcggcttactgcaagctccctttcccgggttcacgccattctcctgcctcagcctcccgagtagctgggactacaggcgcctgccaccacgcccagctaaatttttttgtatttttagtagagacggggtttcaccatggtagccaggatggtctcgatctcctaacttcgtgatccgcccgcctcggcctcccaaagtactgggattacaggtgttagccaccaagcccggcccgttttaaccatttttaagtgtacagtgtaaggcactgaaaccgcctttgcaaaagtataactgaggaaattatgacagtgaaagaaatcagacctaactgactctatcttgcttctaacccttaagctgtccttgttcgttcctgggtgtaggcggaactaactttgggaaggaattccgttcatgatttgactctgaaacaaagttgctaacagccctttcctgaaaaagactcccttcttgcctggggtccagtctgcctttgcaggactaacaaattagctacaagattagaaattacagtttaggggtcttgctgcttccggatccaagagtctgaacctctccaaatttgctcctgtggataacatcactattgtaaaacctaagagcagtgcttgagatattttgcagaccctgcactcgatggatcagctgacaccacctggaccagtaacctggcccaaccagttctgccatcgcagataggaacagaagacatatgaaaacctaacttcgacccccgcctgattccatctccaacctgaccaatcagcactccccacttctcaagcccctacccgccaaattatctttaaaaactcagggcgggttgcggtggctcatgcctgtaatcccagcactttgggatgcgaggcgggtggatcacctgaggtcaggagtttgagaccagcctggccaacgtggtgaaatccttctccactaaaactactaaaattagctgggcgtggtggcgggcgcccctaatcccagctactcaggaggctgaggcgggacaatcgcttgaactcaggcgaaggttgcagtgggccgagatcgcccgtgccactgcactgcagtctgggcgacaagagcgaaactcggtctcaaacaaaacaaaacaaaaaaacccgaaaaccaaccaaacaaaatctgatccccgaatgctcgaagaaactgatttgagtaataataaaactccggtctcccgcacagctggctctgcgtgaattactctttcgccattggaattcccctgtcttgacaaatcggctgtctacgcagccggcaaggtggacccactgggcggttacagcattattaggtatattaacactgttgtgcaaacacccccactctcggtctccagaactttttgtcatcccacattgaaactctaccgattaagcactaagttcccattcccttcccagggtttttaacaaggccacgttaaacagaaggggcacctgcttgccaggtggaggcctgggcactggcagggttctgccctcccgactgagcaggggctcccgaggtgactaagcaggctctctgggtagtgctcccgccctcacctattgtccgggtggaggaaccggtatttccggatgggggcctcagacccagtgatcccggctaagggtgaggctggcgggggaggggaacggaagcgggtcgtaaaagttaactttacactaaaatcattaacttttctcacaccccccaataaaagcagtcacctcccccccccaagagccccccacgcacccacagtggcccacaaccatgcttcccgggggctttgaagggtagaggagctgacatcctccttgcccagaccctggaaaggattaggaagcggacctgggcacgaatagagaaagaagcccagcaaattcctcttgcaccagctctgggaggaagctcagctgcagttctacgtagaagaaaagaggcggcaaagtaggcgcgcgggctccagtgacaaaggtctcccaggcagccgcggcccctgccccaccgctgagtggcgtgcgtgcaggcccaccctctccgcctttcccgacaccccaaagtagcgctgcgagcagctgcgtctccctcccggggctcgcgcgcccagaaccctccggtctcaaggaagcaggtgacagccgccgcccacccccttcccctccccgccgctgctctctggctcgccaccgcccaactccccctgcccccaccctggattttttttccccttctctcaaacctctaaacaggaaatagcccgaatcacaataatatacgggagcagccgcggaggccgctggcgccctcccattcccggggagcttcccgcactccggcttgggtgaagtgcagccagcgacgcgcgcagggagcgcagggggacaccagcccagcagctagcgccgcgccgcccagcgccccggagagccgccttcgccctcgcccagcgcccgacaccgccggccgcggcggcggccgccaccggctctaggcaagtaccctcctctctctccctccccggcccaggtgctgcctgccgcacgccccgggagagccgccgaggcgcggcagcctgtgcccaggcgtcgccgggatgccttccctcctgtcccgactttggccagggaatgatttggtgggcgcgaattcgcgctggtgccctgggtcgtttgtgcaggcggggtgaggggcagcgcgagtaaacgggttgacatcccctaggtttctctgcagagtgcgctgtgtacttcatcgggcatttactttttcactgcttcctcatcgcccccggggcggcagcgcctcacagggtctctctgggggaatcatcaacaggtgtgcctgaacacgcacctgcggcagccacaggtgtctgggagccaccttttttcttctccctggcctggcaccctttcactcaagggatggaaactgtttcactttctgctgagcttctcttttacccgattaaaagggcctttgaatttctgttggcgcagccaactgcatcgggtgggggcaggagccggtgccttggagtgacgcgggcggagcgcggcgctggttattggaagctggtggggctgcttgagtgcccgctgagcctccgccgcggggcttgaaaactccgcactccagaaagcttgaccgtacagccctgggggtgctcgccctgcccgcgtggtccgcaaaacggggatctcctccgcctaacgcggcagagacttagaaaacatttaaacaacaaaaaaattttcactttctgacccatttgtaagggaggggccgagcttgtcagcatatacagggcgttgtaagtttcccagggctgcattgcaaggttcttctatagggagctctcagtcaaaaccgagttggagatctttatgttggaaaaaggccactgaattccaggcattcttcgagcttgagaagggcattttcaagactattttgaagtttgcacgag

SEQ ID NO: 12207 - DNA, 6000 bp, Homo sapiens
agaaaacgttgtatgtcttgaaattaggttggttaattacaattccttcgaatgatttgacttctgtattcaccctgatgataaatagacaaaatcaaaagcatttttgacaaagtaatgctttctcacatatttagcttctttatagacacttacccatcttgttaaaacccaaaactagtgattttacgttgtaaaaagcgtttttcaaagcatgtgggccatgtaggatgtagacgacagtggtaaagacctatgccttttttgaggtgagatccaagtgtttggttttgaactttgtattttctatttggatttcgaggtgaccctttcatgtacccacattccataaaatcctgtttaagataattctacttctcctgtttaaaacaaaaaaaaacccaagactcagcggtgtcacaatttgtaacttaaaatctgtttactttggtgaactttattgttactattctaataatagctttattgaatattcacataccataatgtttacccttttaaagtaaacaatatgttcacaaagttctacatcaatctctactatctacctagagaactttcaaaggaaacctttgtacctaccagcattcattgccattcccccatgtccccagcccctggcagacactcatctactttctgtctatatggatttgctttttctggacatttaatataaacagaattataaatgactatttcttagcctaatgttttctagattatttatctacattgtatggaacttgtgtgagaccttcatatcttattatacccgtataatatcccattttatggatataccatattttgtttatccattcttcagttcacggtcatttggcttgcttccactattttagctattagtaatgccattatgaacatttgtatacaagtttttgcgtgaatatatgttttcatttttcttgggtatatacctaatagtggaatagctaggtcatatggtaactctagttttaattttctgtggacccaccaaacattctaaagcagcttcaccaagcatttacatttctaccagcaatttatgatggttccaatttgtccactcaatgagataaaaaatacactagggctgggtgcagtggctcacccctgtaatcccagcactttaggaggccaaggcaggcagatcacctgaggtcaggagttccagaccaaccaggccaacatcatgaaaccccgtctctactaaaaatatagaaattagccaggtgtgggggcgggtgcctgtaatcccagctacttgggaggctgaagcaggagaattgcttgaacccgggagccagaggttgcagtgaaccaagatcgcagcactgcactccagcgtgggcaacaagagcaaaattccagctcaaaaaaaaaaaaaaaaagaaaaaaagtgtatacacacacactgtcagcctgtcaacacagttttatcatcataaattaatgtagctgtcttttaaatcagatgggaagagagttacaaagaaaattacattcatactataaatttgtctgtatatatatacctttactgctgctttctattttttcatgtggatttgagttgctgtctagaatcttttcatttctgcctgaatatcttcatttagtatttcttgtagggtaaggctgctagtgataattttttttttaatttatctgggagtatcctagtttctcattgtttttgaatgattttgctcattatagaatttttggttaacaatccttttttttgagatggagtcttgctctattgcccaggctgaagtgcagtggcatgatcttggctcactgcagtttccaccacccaagttcaagcgattctcctgcctctgcctctcaattagctgggattacaggcatgcaccactacgcccggctaatttttgtatttttagtagagatggggtttcacagtgttggccaggctgatctcaaactcctgacctcaagtgatccgcccacctcagcttcccaaagtgctgggattacaggcatgagccaccacacctagccaacaaactttctgcgcgttgaatatgtcactcactgccttttggtctccattgttgtttatttgaagttgttaatcattttcaggatttgttgtataatcacttttctttaacattttcaaaatcctttgtccttgtctttcaacagtttgattatgaaatgtctaggtaaggatatctgagtttatcctctttggcgctcattgaacttcttggatgtgcaaattaatttttgtttcaatattaatagactatttttagagcagttttctgtttacagacaaattacacagaaagtacagagagtttccatttaccccctcactgtttctgctgttattaatatcttacattagtgtggtacattttttacaattaagccagtatttatacattattattaattattgatacattatttttttcaactatttttctacctccccaaacttgttatataaattattattaagggttcattctttgtgttgtacattctatttctttattgaaattttctcaatttggttagataccatactcgtgctttctttcagttatttagttctttgaacatatttataagagctgatttcaagtatttattaaatccaatgcctgggcttccttggggacatttttattgactgcttttttttgttccacccccctgtatgtggaccagacttttgtgtttctttgcatgccttgtaattttttttttgttgaaactggatagtttataatgtgtcaaccatggaaatcagatctctacccctaccctgaggagggtttgttgtttttgttatttgtttagtggctttcctggaccagttgtctaaagtttatattctttgttatttgagacccactcaagtttctctcagttagttagtggtctgctaatgattccatagagatttccttatgtgccttgaaccagtaaggggcaggaattacttaaaggcatactttttgtagtgttttgatattttagtggttgaaattcttatgttttgttaccgaagctccccgtggtcgctttctgatagaggtgtggagtggggtggtgatcaagattgttagaagaaaatgagatgagcaacaaattcagcttcaggattgtcattaatttgccagtgagcattgggaatcttcacagtgggggaaaggatatgttggattttctaatcatactggactgttaaactgttccttggtatacattaagggaaatgctgctagagttttctttcaaagaacttaacctaaatttcagggtgttttcaaatctttagcaatccacaaacatagaattagaaaaataagtaagactagagagaaggaaattttaaaagagaaaagttaaccacccataattttgagaaaaaaaagcaaatatgtaggattagttcaccaacatattttctgagtgtgtgaatactatgtgtccatatatcccttgtcacattgttttttaatttcacagatttctttaaagactcgtgcagcacatcattatcgctggatgcccggacatgtaatacacctgacagcatgtgaagtgctcagaatggggcaggatgtcacctggaatcagcactaagtgattcagactttccttacttttaaatggtaaaaagtctaaatacttttcttaacattattttatattaatgatggtcagttattcatttttatttgtattattactattcacaactcatttcctaatgaaatagttaagtttctggcattaaaaactcgtgtcaaatctctagaaatcttgttatgaacagatttataacggtcaaattggtagtacttgactttctttttttagaacagcagcgcttatcagctgtagaaccaattgccaagttataaaattgatttttgaaaacaaagctatttaatgtttgtaagcatttcatatagtaaaagtgggttgtgttcctggaatttgaatatagatgaaggtctgtcataaattacaatttgtatacactattgttttctgcaagacttagttattacagtctgttataactaatgcagaaaacgcaagctgtatctctcttttggattatgaatactttgttttcttgtagtttctggcatggaactaaactcattgtgggactaacccaacacagtcccaaacggggctttgtttcatctgagccttttcaatccaatttgaaaattctgttgacttgcccttccttcaaagattcttagaagtcacaaccatttccaaacttctccctaagtatgccccaaatcctaaatcagcaaaaagcagaatggatctgatctcttttagggctgctgacaccagctaatggacattaaaacatgtcaggaggaacttaaattactaacgatttcaagaacaaggggtggtaattctggcacagtgtcagaaactcatcaactatagactgttcaatcattattgcctaggcgtccaactatggttttgcacctcaacataccaaagaggtaaaatgcttgttgttagatattctagtgcatccatgtactgggatttggggtttgttttttcttttgttttctttttcaatctgtggtataaatactagagactgtgggcttcctgtactactacaatttatcctctgattcagccactttgtttttgttttaaacctaacctcatagcaaagaggacagttttttgagcctgagaagatttattgtgaaaaactctctctctctctctctctctgtatatatatatatatatatatatatttatttatatttataattgcttcttttatttcagtgctgctcttcatttcaagatgccgttgcagctctgataaatgcaaactgacaaccttcaaggccacgacggagggaaaatcattggtgcttggagcatagaagactgcccttcacaaaggaaatccctgattattgtttgaaatgctgaggacgttgctgcgaaggagacttttttcttatcccaccaaatactactttatggttcttgttttatccctaatcaccttctccgttttaaggattcatcaaaagcctgaatttgtaagtgtcagacacttggagcttgctggggagaatcctagtagtgatattaattgcaccaaagttttacagggtgatgtaaatgaaatccaaaaggtaaagcttgagatcctaacagtgaaatttaaaaagcgccctcggtggacacctgacgactatataaacatgaccagtgactgttcttctttcatcaagagacgcaaatatattgtagaaccccttagtaaagaagaggcggagtttccaatagcatattctatagtggttcatcacaagattgaaatgcttgacaggctgctgagggccatctatatgcctcagaatttctattgcattcatgtggacacaaaatccgaggattcctatttagctgcagtgatgggcatcgcttcctgttttagtaatgtctttgtggccagccgattggagagtgtggtttatgcatcgtggagccgggttcaggctgacctcaactgcatgaaggatctctatgcaatgagtgcaaactggaagtacttgataaatctttgtggtatggattttcccattaaaaccaacctagaaattgtcaggaagctcaagttgttaatgggagaaaacaacctggaaacggagaggatgccatcccataaagaagaaaggtggaagaagcggtatgaggtcgttaatggaaagctgacaaacacagggactgtcaaaatgcttcctccactcgaaacacctctcttttctggcagtgcctacttcgtggtcagtagggagtatgtggggtatgtactacagaatgaaaaaatccaaaagttgatggagtgggcacaagacacatacagccctgatgagtatctctgggccaccatccaaaggattcctg

SEQ ID NO: 12208 - DNA, 6000 bp, Homo sapiens
gccaatgataaaaaagcagagcacttcgctgaccttcaactcccttcccttcccagtctttccctttgaaaaggtcaatgagtagatcctaaatcagcaaatagcagaggttgagtttcaggccacatccagtttcttccttctctgttttcaactttacatcccatttctcagatagcacctgctttatccttgttcctatatagctcagctagtgcgtgcaatggtggcaaagtttctctaaagttgtttttgataaaggagctggtctcacggtaactaccatgcaccatcggaatgctacaaatgcttcagaatgtcacattgtcaaaatatctatatttcaggctcataagctagacagctcgtttggctgctaaacccacaagatgttcagccatttgttgtggtctaaaaactttccccctcacaaggagaaaataatcttctattgttttgtatcattttgtggtcttttgagttttttataatatgagagggcaaaagttatgagatcctgataggtaaatcgtggcctggattgaattttgctatcagtctctcttgaaatcaaattaatttttcaatatgtagtgaaatatctttagtctgtccacagtatgggaagatcaagggtatgaaagagtagggtgacttgccttctttgaggtgaagggggtggaagtgatagtttgaatgcatattgcttacaattgcaacaggctggcttttcctcagaagaaaaatgccgtatgtgtttttatggcggcttcacttgtttttattgcatgggcgtgtggagctgagatctacttctttgggaaggatggatcacaaaaggcaagcacaagaaggttgcagagggacacttgacatcaattgaaataagggccagggcagttgcatcctgagtggatggcaatggtccagtagaaccgtcatctggcaaagttagctgtgtttccaactgtaataattagtgagcctggaggggcttgtggcaggaaaatagcagatagaaacaaagaaagagaagcctggttaagttcctgctgtaaacatgctgggattagtaaactcttggagttcctgtgccataaacccattggaaataagcctttataccagcaggttaatcgtgttattgagtcaacaaatctttttattctggggtcatgctgtctctatcactaagtttctcctgtttttattgacaaagttgacatccttatattaatactcatattgtttcagtgggaaagaatttgagctccaccctcttaaaagctaagaagtttgatttgttaatttggcatgctcattttacatgccatagtgcactgttaaactagctcagcttctgtttgcctggaggcaaaacttttagaaggagactggagacagatatgaaggagaattaatcagtgctactgagtacttcctaaattcttagggcttttgtgggtgattaaatccataaatgatgtttggcatctgtactgagttcttttggaagggcaggagggagaaatgccatggaaattaagctccatagactcttttagcattgttgtaaatgatgacacagattggtggtggtacttacggttctggaggcagatgacactagcacttggcagaccagacaccaggtggaggaagatggagagtctacatggttgggcttagaggcgtcttccaaagttgaacttgaaaatgtctcggagatttctattaccacatggtctattttgccacttatggatctaataaagattcatgcaaattaaacacagtattatgtatactagaaccttcactgatccactgggtttccatgggcaagttcagtgaaagctcactgtcttcttcttgcagaacttatctcatagggttattgtaaaaataaaaaagaatagtttgggtgcaatgctaagtagagaacctggtgcaaagtagattcactgtcatttattgagcaaattatttactcatctttctccttctatgggccaatgaagtatttgaggtcaaggaactgtgttttctttatttttgtaacatttatcacagcgtctactgtttggttggtgcttaacaaatgtaggattacttaatgttagatattatacatcatattatttatatattattatatataatatatacatatactatatgtcttatagatataatatatacatatacaatgtactgcatgttgtatgctatataagttatataatgaatactacatctccatatgtgtcatatatttgctataatacttaaagttaagcaactaattaattattttatattaggattcttagaaaagaatagctgggcttggtggctcacgcctgtaatcccagcactttgggaggccgaggtgggtagattgcttgaggtcaggagtttcagaccagcctgggcaacatggtgaaaccctgccgctactaaaaatacaaaaattagccgcgcgtggtggcacatgcctataatcccagctacttgggaggctgaggcaagagaattgcttgaacctgggaggcagaggttgcagtgagccgagatctcaccactgcactctggcctgggcaacagagcaatactctgtctggaaaaaaaaaaaaaaaaaaaagaaagaagagagaagaatctaactatttgtattgtctagtatttcaccagttaaagttagccagttctctgggccagttgctgagtaactaatcagttcttttagaaaagatttgctaaaattagctggggaaagaaaatcaggatttgggtagataggtattgttgaaactaattccccccacccataaagacaaatattaggttggtgcaaaagtaatcatggtttttgccattgaaagtagtggcattacttttgcatgaacctatatataaaaattcttcaagggtcatttgtattgtacacagatgtttcctccttaaagtaagctgctaacagctgacacagttgtggatggagctgtatgcagaaatccttcgcatttcttttccttgtttcatgtaccatgtaaaatcagttttaagtttaaaactaagttgctcaataatgagatgcccatttcccccaacttctgttctgttattatatattgctctatggtttaaagtgtattccatgttgtgtctcatttttgatgtttatttattatgttcatttgaaagttattgtacttgtatgttaattttcattgatttttcttttgagcatgacttatgttttattttgtgtttcttttaggttttgttttgtttcataagatcccactggatgggtagctgaaataaaggaaaagacagagaaaggggctgtggtgcttgttggttgatgctgccatgtaagctggactcctgggactgctgttggcttatcccgggaagtgctgcttatctggggttttctggtagatgtgggcggtgtttggaggctgtactatatgaagcctgcatatactgtgagctgtgattggggaacaccaatgcagaggtaactctcaggcagctaagcagcacctcaagaaaacatgttaaattaatgcttctcttcttacagtagttcaaatacaaaactgaaatgaaatcccattggattgtacttctcttctgaaaagtgtgctttttgaccctactggacatttattgacttaattgcttctgtttattaaaattgacctgcaaagttaaaaaaaaattaaagttgagaacaggtataagtgcacactgaatagtctaatctacatgtaacacatattttagtgtgattttctatactctaatcagcactgaattcagagggtttgactttttcatctataacacagtgactaaaagagttaagggtatatataccatcactttgggacttggtagtattattaaaaggttatttccttcactgtcaataaaagtccaaatgtttagcttaggtctgagagtcaaacaatgttaaggattgtcttaaagttccttagccagcaaaacaaaacaaaacaaaacaaacaaatgaaaaacgtttaaaaagaagaagaagaaaaaaaacaagaacaagcagcaacagctgttttgttggggctatagatttaagttaggcatagtcaatttcagaataactaagagtggaatatatgcatatggtgaaattataaccttgcccttttttatttgccctctgcgatccacctgctttttagaagtctgccgagtgagaaggccacagtatctcatgctgtttgcattacagaactgcagcttttctactctgaaaaggcctgggagcagaatggctggcctgctgtgagcaggagaggagattctaagaaggatagtcccccctacaacatactgtcatactgctgggttttcatgggtaggaaagcttgtcctgaccccagcagcaaagaggtggcaggtcgctaatgaatatatgctttataatgtccttcttcattgctgagagggcagccttagagctgtggatttctgcatcccccctgagtctgacccatggacacctgtttcattcactttagcatcacagtgacctttgtatgctctgttcagtctgtgtcaggcagtatgcttgtcctgaagagaggtttggctatccccaccccaccccaccccaccctgttccttttttatcaggaggacttcagagccaggcctgcagcattttgtttgaaaacacaatcagctctgacagttagacatgcacacagacgccatagctggattggaaacattgatgttttaaaaatttattttttttggaaatagttgcacaaatgctgcaatttagctttaaggttctatagatttttaactagtccaacacagtcagaaacattgttttgaatcctctgtaaaccaaggcattaatcttaataaaccaggatccatttaggtaccacttgatataaaaaggatatccataatgaatattttatactgcatcctttacattagccactaaatacgttattgcttgatgaagacctttcacagaatcctatggattgcagcatttcacttggctacttcatacccatgccttaaagaggggcagtttctcaaaagcagaaacatgccgccagttctcaagttttcctcctaactccatttgaatgtaagggcagctggcccccaatgtggggaggtccgaacattttctgaattcccattttcttgttcgcggctaaatgacagtttctgtcattacttagattccgatctttcccaaaggtgttgatttacaaagaggccagctaatagcagaaatcatgaccctgaaagagagatgaaattcaagctgtgagccaggcaggagctcagtatggcaaaggttcttgagaatcagccatttggtacaaaaaagatttttaaagcttttatgttataccatggagccatagaaaggctatggattgtttaagaactattttaaagtgttccagacccaaaaaggaaaaataaaaaaaaaggaatatttgtacccaacagctagaaggattgcaaggtagatttttgttttaaaatggagagaagtggacagataaggccatttaatatatcaaagatcagttgacatctcctagggaatgatgaaaacagcaggctattagaaaattatttcatatagttctcgtgttcttttcttttttttaatccctgaagggatgatcagtaacatagcttctcttttctgtactctagaccaccccttttcatcattttgctttttatgtctcccataagaaatgtgctttttagagcttcctaatgcatgtgttgcattattgcagcattagaaaaggagaggtagcatttttgctgaaatcgggcctgtcactctccaataaaggttctggcacttcaatgccaggcaggtctcctaaatgaacagaatgatctgtgtgagccgatgcctgcccttccagaggggccactgtccccagccgc

SEQ ID NO: 12209 - DNA, 6000 bp, Homo sapiens
ccttccttcgttcccccactgcactcatagatggccacctctacacaggtctgaaatcatggggagaggacatttctttctctgcagctgatggattaatgcttttagaattcctcttcatcccaccctttggacatgggccagccgcctccttgctgcatgcctgtggaagaggggattttccacctcggttgtctgttagaaatacctgggaaactttaaaaaatttatattttaatttttaattgttgtgggtaaatagtaggtgtatatatttatggggtacatgagatattttgatacaggcatgcaatgcataataatcacatcagaggaaatgggatatccatcccttcaagcatttatctttgtgttactaataatccactcatactctttttttcttttttttttagacagagtctcactctgtcacccaggctggagggcagtggcgtgatcttggctcactgcaacctccgcctcccaagttcaagtgattctcctgcctcagcttcctgagtagctgggactacaggtgcgtgccaccgcacctggctagtttttgtatttttagtagggacagagtttcacgatgttggccaggctggtctcgaactcctaacctcagtgatccacccacctcagcctcccaaagtgctgggattacaggcgtgagccactgcacctggcccagtcatactcttagtaattttttttatctatctatctatctatctatctatctatctatctatctatctatctatctgagacagagtctcgctctgttgcccaggctagagtacagtagggtgatctcggctcactgcagcctctgcctcccaggttcaagtgattctcctggctcagcctcctgagtagctgggattacaggcatgcactaccatgccaggctaatttttgcatttttagtagagatggggtttcaccatgttggccaggctggtgtaaaactcctgacctcaagtgatttgcccgtctcagccttccaaagtgctgggattacaggcatgaaccaccacgcccagccagttatttttaaatgtacaattaaattattttttttttttactatagtcactctgttgtgctagcaactggtacgtcttattcattctttctatttttttgtacccattaaccatccccactcccccaaccaactacccttcccagtctctggtaaccatccttctgctctctgtctccatgagttcaattgttttaagttttagctcccacaaataagtgaaaacatgcaaactttgtctttttgtgccttgcttatttcacctaacgtaatgacctccagttccatccatgttgttgcaaatgacagcatctcattcttttttacggatgaatagtactctattgtgagtatatgtaccacatatcctttatccattcatctgttgatggacacttcggttgcttcccaatcttggttattgtgaatagtgctgcaacaaacatgagagtgcagatatattttcgatacactgacttcctttcttttggatatgtacgtaggagtagaattgcaggatcatatggtagctctatttttagttttttgaggaaccttcaaactgttctccatagaggttgtactaatttacattcccaccaacggtgtgtgagggttcaacctggggagctttttaaacacaccaatgcctggtcccatttggatctaactcttggggctggggcctcggcttctgcatgtttcaaaagctccccaggggactttggtgtgcacgagcattgggacacatcagactgtggactctccctaaggtggccccagacaggagtggtaaccctttccatccaggggcttttggaaatgtgggagggtattcttggttgtcatgtcaaccaggtagggctcctggcattttgtgtatcagggaggccaagtatcctgcagatcagccctgttcagtggagaatggttctggcccagatgccaatagcatccctgtgggtcctgcacattctccagccacgactgggagtcctatactccaatgctggtacagcattcccctagttttcccctccttgtaaaaattaggctttctgtggttccagccagcttgatcacaagccatcagttcctgggggagctggcctttgccaggggccagctagaacttgcccagcaggtctgatgttggccctttcaaccttttaaataatgccctcaattgctttaaataagcggatgttggtggatacctagtatgcaacttcctcaatttggggaactcacagatctaagaccctgtctcacgcaacctgttctgaacagtgcaatttcccgatagttgtaattcttaccccagagtggtatttctaatatcccctctgactttctggtgtcattctaaggacaccgaaagctcaagtctggttgatctctgttgcactgtcctgtgtggcaggactcttaggatttttaggtctcaaattccagacaacgtcccccaaaatgtactcaaggaaatctagtgttcacacgtggtctagtctcagtccatctttcctggtgtagtggcaaatgcaaagaaacacggcctggaagcatgctgagggatggccagatttgtaataatgtggagagaaccgttgaagccaacacacaggctgatacctgcaaaaggaaattatagcatttttcactatatgtaatatttcacaataacaaacattaaaataaaaaaatagcaatagtttcaggttctctgccagctatcttaaaaacattttcccaggaagtcctcacattaaccctctgaatggatattataattccagtgttaccactgaggcaataggctctgaagttaggtgacttggctaatgtcacacaacaaataaatagcaggattagaatttatattctaattccaaagctgaccctttggtctgggtgcacctttgttcttaggagataagtatttcttgatgttaaggtgtttcattgtgattaaacctcttgcacttctgagaaattgaaatcatagagcgtttggtcagaatgtccatggatagaatcagagcatattaaagtcatgggactttttgttttaaagccctccgtggcccccagatctcccccatggtggtcacctgccagggctctgacacggctgcagacacctggaataagagaagcaggtctttctcagatgttcctccctcttattggaaggaagacaagaattcacccttgaatttcccaattgtcttcctgctgcccgtctgcataggagagacggatggatgtcttgggtgctttcaggatccatgaagaggagtcggcagtggtgtgcccggtgattgatgtgatcgactggaacaccttcgaatacctggggaactccggggagccccagatcggcggtttcgactggaggctggtgttcacgtggcacacagttcctgagagggagaggatacggatgcaatcccccgtcgatgtcatcaggtcaggagctgacttctgggtgacttgttttttaagcatgcctcattgaatctggctgacctgtgagcggaggccctcgggaggaatggttagctgtcagcttaactacctcccctcttcccacttttttgcccagagtatttgtttatttttattaaacgtgtctgctacacatgtcaattttatatcggtatattttatttatttaatttttaaattgtggtaaaatatacatcatagagaatttaccattttaaccattttgaagtatgcaattttaggctgagcatggtggctcatgcctataatcccagtactttgggaagccaaggtgggaggattgcttgagtccaggagtttgagaccagcctgggcaacatagcaagaacctatctctacaaaaaaataaaaattagctgagcatgctagtgtgtatctgtaggcctagctagctggaaggctgagataggaggatcgcttgagtcaaggagttcaaggctttagtgagctatgatcacgcaattgtactgcagccgggcgatagagtgacaccctgtctctataaaaaaataaataaataaaacaaagcatgcaattttagtggcatcgagcacattcacggtattgtgcaaacatgatctttacctatttccaggaatttttcatcatcccacacagaaaatatccccactaagcaataacttcccattctccccttcccagcccctgggaacctctgttctttcaggcgccccatgtgagtggaatcatacaatatttgtccttttgtacttggcttctttgacttatcatcatgttttcaagtttcctagagaacatcattccttgtgatggctgagtaatattcctttgtacatatatgctacattttgtttatccattcttctgttggtggacacttgggttgtcctttggttattgttaaataatgctgctatgaacatcggtgtacttttatctgcttgagtccctgttttccattcttttgggtatacacctaggagtgggattgctggtcatatgctcattcttgaggaaacatctttaggcccctttgacctggggtgtgggtggatccatggcaggtggaggagtctgctctggccagtgggtgagtcaagctctgagtagaatgggcccaagggaggctcagcagctctcattctggaggttttgaagtgatagcctggcttcttcctccccttccaagttcagaagcaagtgggagacagatgtgggagttgggcaggaggaggtcaggacttcagcctcaccgctggtgtgttgaaccggaagtaggctctgagttttgcgtccacatttggcagttgggcttctgaattctttcaccagagtcctgaccttaagatgacccgctgctggcaggagtggagcaagcaaggagagtgtccagagataaggctggagagatgggcggggccaagggaaggggtttggacttgaccctgagcaggtagaagccactgaagggatcggagcaggaagtgacctgagcatgtgctgcgtgccatgtggtgagggccctggggggaccgttgtaggcagggataccattaggaggctctgcagtcttccaggtcagaaacaatggttcaggagatggtgggcactgtggattccagagatgttaagatggaagaattggaagaaattgagtgggaattggggaaggaaggaattaagaatggcacccaggcttctgtaggagcccttagtgagaacatcctgctcaatccctcactgaataggtttggaaactgagacacagagcaggaggctctaatctaggctacttaggcagcctgtcatgaattcatgggggtccatgaattctaattgccccgttaccccacatgctcagggcacctatcctccccatcccataatatccctgtgcctcagttatctcatctgtataataggtaccagcatatccaccctgcttatttcctagatttttaggataaacacacgtgaaggtgctttgtagtctagaaccttcccttccactggggatgttgctgttgtcttctcagttggccccatgcttggagtccagggcaggccccgatgctgcaggatgttaacattttcagtggttgcgctctcaatgttctctttccctattttttttttcaagttggggtctcgctttgtcacccaggctggagtgcagtggcatgatctcagctctctgcaacctctgcctcctggattcaagtgattctcctgcctcagcctcctgagtagctgggattatagctgtgggccaccacacccagctaatttttgcatttttttagtagagacaggttttcgccatattaaccaggctggtcttgaactcctgacctcaggagatctgcccgcctcagcctcccaaagtgctgggattacaggtatgagccaccgtgcccagccctttccctatttct

SEQ ID NO: 12210 - DNA, 6000 bp, Homo sapiens
tgaaattatgtacagtccattatctgaaacaggatgtcaccgagtgccagagaaaacaaaggcgatgaaacctttgggaggggacagtgccatggtgtgcacatgcacagctctagcctagtgtattctcttcctgtttccatttgaatctggagactcatcagaacccaaccccttgttatattggaatatagttctttagaatggacagctgcttgagaggctcacctaggaagctgtttctagcatgtacctgggtgtcaaacttattttttttctttgagattgtggttattttctccaacttgatagttacagttacatacacagaatacaattatgttaccattgtgttgtattctagagttagtttgttttaacttctagctttttagatggagtacttttaatgtttactcaggaaacagtctcttaggcttggggacctagacttggctgagacctagtgccttaggtttttgaagcagtgagggacagagtatttctctgtattgtagtaaataggatatattattgacagatgcaagtagagaaagggacttggcaccttaaacttgcctcataagattcaagtctcactgatagggtatatatatccctgtgcaagtgagagcctgtgcacttacagaatagaatctcatttgctgcacaatagggttctaggggaaaatgtcaatctggtcatcacagctcatagtttactgtcatttcaaataggctttattgatctcatggcaatacttagtttcaaggtgtgggtggaatatcaactcagggaagtggcttgtggatacagatgtggatgagatagagaaagctgtaatctctgttccacatacctactttagtaatgaaacactgtaataggtctctcaggtgatcttttaatgccttggcattagctgaataaattcatcaaaatttaattttttttaaactgatacaggaattcatgaagattaccaactgccttattatgatcttgtaccttctgacccatcagttgaagaaatgagaaaagttgtttgtgaacagaagttaaggccaaatatcccaaacagatggcagagctgtgaagtgagtatttctttttgatattaggcaattttctaaactgcttctgcttagtaagcaaaagtttgctacttttctttaaggaaaacttttctttaagaattttctttttcatagcagtcaaaccaatgtttaaaaacagaataatttggttttcatattcaattgtaagcacattgaaagggccatggaacatttgcagtggcctttagtgtatcagaacatagtttagatctgccgggcgaactaaggcacatatttttaaatgaatgcctcccttcagccggggcaacccagaacactagacagttaccggacatgaatgaggagccctgtattctagaccagcctggctaccatttcaagggtctgactctgaacaaatccctttagttctctggactttaatatccctttgcaaggtgaggaactcagataaggtgattacaaaggtgtttcaaatgattttccgttttattcatctgattgcccagataaccgttaaccaggaatttagggaaaatgcttttttccagcagtatctgagctgctcaacttcagctctaacaaaaagttttagaaacgtttttgtaattgtaaatttaaagattcgtaagatgaattttatttaacctctccttaattgctagctgttactattacaatattggtgaagcagagcatattcctccaggtttgaagatttgtagcttaaaaaggctataaaaagctgttcagttcagtagttgattttacgtcttaaactattgtaggactcagcagaacctctgataagcaagagagcttgctacctccaacaaaatcacatctccaggcccaaataaataaaatgtatttcagcatgcttaaggaatttgcatgtgacatagtttaataaatgagagtgctgctagattttgtcttttagaaatttgatctacttgggaggctgaagtgggaggattgctggagcctgggaggtcaaggctgcagtgagctgagggcatgccattgcattccactttgggcggcagagtgagaccctgtctcaaaaaaaaaaaaaagaaagaaaaatttgatgtgaatacttcaaagtacaaacttaaaatttcagtgtgaggtcagatttcttctttgctttgcccagctctggtttaggattcggccttttcaggtttgctaaatgagtcactctttgtccacctgctttccagcactggcaccagtaccctattgatggaaatttatgtaatttctactcatttgctattacaaataatgcttaaacaataacaagtgtatatgtcatttaaaaagaaaatttacacgtaaaaattcttatccagaccaatggaaaatggtgcatgcattaatttttttttttatattttcttgtaggccttgagagtaatggctaaaattatgagagaatgttggtatgccaatggagcagctaggcttacagcattgcggattaagaaaacattatcgcaactcagtcaacaggaaggcatcaaaatgtaattctacagctttgcctgaactctccttttttcttcagatctgctcctgggttttaatttgggaggtcaattgttctacctcactgagagggaacagaaggatattgcttccttttgcagcagtgtaataaagtcaattaaaaacttcccaggatttctttggacccaggaaacagccatgtgggtcctttctgtgcactatgaacgcttctttcccaggacagaaaatgtgtagtctacctttattttttattaacaaaacttgttttttaaaaagatgattgctggtcttaactttaggtaactctgctgtgctggagatcatctttaagggcaaaggagttggattgctgaattacaatgaaacatgtcttattactaaagaaagtgatttactcctggttagtacattctcagaggattctgaaccactagagtttccttgattcagactttgaatgtactgttctatagtttttcaggatcttaaaactaacacttataaaactcttatcttgagtctaaaaatgacctcatatagtagtgaggaacataattcatgcaattgtattttgtatactattattgttctttcacttattcagaacattacatgccttcaaaatgggattgtactataccagtaagtgccacttctgtgtctttctaatggaaatgagtagaattgctgaaagtctctatgttaaaacctatagtgtttgaattcaaaaagcttatttatctgggtaacccaaactttttctgttttgtttttggaagggtttttgtggtatgtcatttggtattctattctgaaaatgcctttctcctaccaaaatgtgcttaagccactaaagaaatgaagtggcattaattagtaaattattagcatggtcatgtttgaatattctcacatcaagcttttgcattttaattgtgttgtctaagtatacttttaaaaaatcaagtggcactctagatgcttatagtactttaatatttgtagcatacagactaatttttctaaaagggaaagtctgtctagctgcttgtgaaaagttatgtggtattctgtaagccatttttttctttatctgttcaaagacttattttttaagacatgaattacatttaaaattagaatatggttaatattaaataataggcctttttctaggaaggcgaaggtagttaataatttgaatagataacagatgtgcaagaaagtcacatttgttatgtatgtaggagtaaacgttcggtggatcctctgtctttgtaactgaggttagagctagtgtggttttgaggtctcactacactttgaggaaggcagcttttaattcagtgtttccttatgtgtgcgtacattgcaactgcttacatgtaatttatgtaatgcattcagtgcacccttgttacttgggagaggtggtagctaaagaacattctgagtataggtttttctccatttacagatgtctttggtcaaatattgaaagcaaacttgtcatggtcttcttacattaagttgaaactagcttataataactggtttttacttccaatgctatgaagtctctgcagggcttttacagttttcgaagtccttttatcactgtgatcttattctgaggggagaaaaaactatcatagctctgaggcaagacttcgactttatagtgctatcagttccccgatacagggtcagagtaacccatacagtattttggtcaggaagagaaagtggccatttacactgaatgagttgcattctgataatgtcttatctcttatacgtagaataaatttgaaagactatttgatcttaaaaccaaagtaattttagaatgagtgacatattacataggaatttagtgtcaatttcatgtgtttaaaaacatcatgggaaaaatgcttagaggttactattttgactacaaagttgagtttttttctgtagttaccataatttcattgaagcaaatgaatgagtttgagaggtttgtttttatagttgtgttgtattacttgtttaataataatctctaattctgtgatcaggtactttttttgtgggggttttttttttgtttttttttttttgttgttgtttttgggccatttctaagcctaccagatctgctttatgaaatccaggggaccaatgcattttatcactaaaactatttttatataattttaagaatataccaaaagttgtctgatttaaagttgtaatacatgatttctcactttcatgtaaggttatccacttttgctgaagatattttttattgaatcaaagattgagttacaattatacttttcttacctaagtggataaaatgtacttttgatgaatcagggaatttttttaaagttggagtttagttctaaattgactttacgtattactgcagttaattccttttttggctagggatggtttgataaaccacaattggctgatattgaaaatgaaagaaacttaaaaggtgggatggatcatgattactgtcgataactgcagataaatttgattagagtaataattttgtcatttaaaaacacagttgtttatactgcccatcctaggatgctcaccttccaagattcaacgtggctaaaacatcttctggtaaattgtgcgtccatattcattttgtcagtagccaggagaaatggggatgggggaaatacgacttagtgaggcatagacatccctggtccatcctttctgtctccagctgtttcttggaacctgctctcctgcttgctggtccctgacgcagagaccgttgcctcccccacagccgtttgactgaaggctgctctggagacctagagtaaaacggctgatggaagttgtgggacccacttccatttccttcagtcattagaggtggaagggaggggtctccaagtttggagattgagcagatgaggcttgggatgcccctgctttgacttcagccatggatgaggagtgggatggcagcaaggtggctcctgtggcagtggagttgtgccagaaacagtggccagttgtatcgcctataagacagggtaaggtctgaagagctgagcctgtaattctgctgtaataatgatagtgctcaagaagtgccttgagttggtgtacagtgccatggccatcaagaatcccagatttcaggttttattacaaaatgtaagtggtcacttggcgattttgtagtacatgcatgagttaccttttttctctatgtctgagaactgtcagattaaaacaagatggcaaagagatcgttagagtgcacaacaaaatcactatcccattagacacatcatcaaaagcttatttttattcttgcactggaagaatcgtaagtcaactgtt

SEQ ID NO: 12211 - DNA, 6000 bp, Homo sapiens
aaaagaaatgcaaatggctgataaatccaccctgttagtaatttaaggaatgcaaagtaaagcaataatgagacatcatttttttcaccaatgacatgtctaagaatgataatactaagtatattgcttggaatatggataaatggacattgtgttatgtttctggtaggaacataataggcataaccttttgtgggatatggctatatatatgttttaaaaaccttgaaaaatctgtctacctaataattctatttctagatatttattttttatttttatgttacttttttcaattaatacacaataattttacatatttataggatacatgtgatgttttgatacatacatacaatgtgtaatgatcaaatcagggtatttgggatatatatcatgtcaaacatttattatttctttgtgttaggagcacttcagatcttctagctattttgaaatatgcaataaattattgttaactatagctacctcactgtgttattaaacatgaataatgtattccttctatctaactgtatgtttgtacccattaatcaacttctcttcacccctcctgccccttcccatcactctactctctacctccaggagatcaacttttttccccctttttatttagaaatggaggtctcattatattgcccaggctggcttctaatttctgggctcaagtgatcctcctacctcggcttcctgagtagctgggagtacaggctagatgttccatccatgttgttgtaaatgacaggatttcattcttttttttttttttctccctagacggagtctcgctctgttgcccaagctggagtgcagtggtgagatctgggttcaccgcaacctccgcctcctgggttcaagcgattctcctgcctcagcctccggagcagctgggaatacaggtgcatgccaccacgcctggctaattttttgtattttttagtagagacggggtttcaccatgttagccaggatggtctcgatctcctgacctgatcggcccgcctccacctcccaaagtgctgggattataggcatgagccatcgcgcctgacccattcttttttttaatggctgaacggtatttcattgtgtatatacaccacattttctttatccagtcatccattgacagacacttaggttgattccatatcttggctattgtgaatgctgctgcaataaacatggggctgtaggtatctctttgatatactgattttttttcctttggataaatacccagtagtgggattgctggatcatatggtagttttatttttaattttttgagaagcctctgtacagtttttctttctttttttgagacaggatctcactgtgttgcctaggctgtagtgtagtagtaagaacactgtttcttgcaggctcacactttagggctcaagggatcttcccaccttggtgtcactgggactacaggcacccaccaccacacccagctaatttttaaatttttcagagaagaaggatcttgctatgttgcccaggctgccctcaaactcttggcctcaagtgatcctcctgcttcagccttccaaagtgctggaattacagctatgagccagcgtacccagcccatactgtttttcataatggctgtactaatttacattcccaccaacagtgtataagagtcctctttctcgccaggcgtcgtggctcacgcctgtaatcccggcactttgggaggccgaggcaggtggatcacctgaggtcaggagttcgagaccagcttggccaacatggcaaaatcccgtctctactaaaaacaaaaaattagctgggcgtggtggcatgtgcctgtaatcccagctactcaggaggctgaggcaggagaactgcttgaacccgggaggcagaggttgcagtaagctgagctcgtgccactgcactccagcctgggtgacaagagcgaaaatctatctaaaaagaaaaaaaaaaaaagaggcctcttttgctacatcctcaccagcatttgttattttttatccgtttggtgatagctattgtaactggggtgagatggtatctcattgtggtttttatttgcatttccctgatgattaatgatgttgagcattaaaaaaaataccttttggtcatttgtatgtcttcttttgagaaatgtctattcagattctttgcccactttttaatggaactatttgtttctttgctgttgagttgtttgagtttctcatacattctagatattagtcccttgttggatgactagttggcaaatattttctccctttatacaggttgtgtctttgttgattgttttaaagaaataattataggcagcagtatggatttatgtgtaagcagggtaattacactgtagtttataatagtggaaaattagaaacaacctaaatagccaataatagccaatttgtaaaattgtgaagcatctacgtaattatagaaaattatttacatggaaacatttttattatacttcatcacactattcaaaataaatgttttattttctttgttctttcatccacccatttattctatccgttaacagtttattctattcattgctccttgctattccactcctttgggtttattttctttattgttgaaatattcctttaagtacttttaatgaggggcttggtaataaactctcttagtccttgtatgtctgaaaatgattattttgctttcattttaaatgataatttacctgggaatataccaactctctcagcactttgaaggtatttctgtcttttaatatcttgcttttaaaagcaatatattattgctttgtcagtcttttatgtctcatttttttaatgattcttgttctttaatgttttgcaatttcccttccatgtatttaggcaaatttggtttctttttaatgtatgctacttgaggctgatgtgctttttcagtttgaggtcttacattttaattatcagtatattctctttgaataattccttcttactgttttctttgttctttctttctgggacttctacttgttattaagcttctgattttatcctttatgtcttttatcttcttttttatacttttcatctttttattcctctgtgttctgagtgatttcttccaatcaataattgtttcttatctatataatttactgtttaacacatcttttgagattttcatttctagaagttttacttgttttatattcaggctggcctcttactgtttcataatatctatttttttaaaagattctgttcctttttggaatagaatgtttttggatatttaaaaatatacttactttagtttctttttaaaattattttattatctttcgtccattaggtatgaattttcctgttttgttgggtctgtggatggtctcttttggtaatgaatttctccatatgtccccagtttccattcactgttgcacctgttttaccctctttgtttttgtacctggagattttcctttttgacttttgagccttgtatcaaacataaaaaccaagttactaatgggtaggtattggaggcagtctatataaccaacacatcaagattttcaactgtgaaagaaaggggataaatatttaatgttttggggatgatagatctctgagaatcccttgaaacaatggactctattctccaaaataaactatattcactttttttttctttttttttttttgtagagatgggattttggcatgttgcccaggctggccatgaactcctgggctcaagtggtcctcccgccttggcctcccaaagtgctggtattacagacatgagccaccgtacccggccccttcattcacaatttttcataaagattcagtggctccacaaagtctgtatgtgaattcctatctttatagaccctggactaagacagcataactcagcagtattaacatactcaacttaaaattttttaaacatgggtgaggttgtggctaatgaaatggcatgaaagcatggtgtacaatggtggctttcaagcttggttaagctgtgaagcccattatttatataagctctgataagctccaattcataaaatagttgtaagtaaagtttctacaactgaagtagggagtggagtcctggaacctactcacctctagcccctacgcttgtactctggccccaaatgcatacccttggactttctggaacactagtaggaaactactggtgaagtggaaaaagtatttcaatgtaatttcagaaaatctgggttcttattccagctctgtcactggttttttgaatcagttgtaggcaatactaatcactttattgaaaatggaagaggcagtttaaagcacatcaatgagaaaagttgcatattatgttatcatatatttgaagttgtgtaattacaaagttacattatgatgacattagacatgaagtttgatacaagcatcagtgttaagccatttgataccttttttaaaaaggttattcaatgtccaagatagatcagaaaatgaaaacttggacagtatactcctagcttttttaaaagtatttatatacatacatacctacttacatagaaaaagacctggagagacgtatgccaaaatgtaaagagtacattttgtactctttgtaaaaggtgaggagatgactgctgactttatttaattcttcatttatttatattgtctgaacattctaaaatataatttttgtaaagagaaaaagatttaaaaatcagtggtttcataaagaaaaaaacaagtcactcaaggtcagcattagaaatattctatttattgatttagaataaattgtaaaactaatcgttggcttttaaaaatagtggaaacagatttgaaaacattcttaaagaaatatttttcttttaggtttttctatatgagtggagaagacagctgttaccagggaggtcatacaacatttttttaggatgtctgaagatgaagaaaaagtgaaattacgccgtcttgaaccagctatccagaaattcattaagatagtaatcccaacagacctggaaaggttaagaaagcaccagataaatattgagaaggtgagctgtttcatttactaccacaagaaatagttacatagtttgatttatattggttgttcatttcagctaaatttagaatattagataagaggcattgctgaaacacctagctcctattgatttagcaacattatgcattttttagctggtttttctgttctgcatatatacctctcatatattcctttttctgggaagggatataggaatagagtctatgcttttttgtttgtttgtttgtttgagagacaaggtcttgctctgttgcccaggctggagtgcagtggcatgatcatagcctactgcaacctcaaacttctgggctcaagctatctacacaccactatccgtggctaacttatttttatttttttggagaaacaagttcttgctttgttgcccaggctggtcttgaactcctggcctcaagctgtcctcctgttttgccttccaaagtgttgggattacaggtgtgagccgtggcgcctggccaagtctatacctttttaattgtacatattgaggttttaggcagttaataattaagatacaaattgattgatggtgcactataatgtaaaggcagagaactttggctaatgtacctgccttaatttcattcaccccatggcaagtttttgaactttgagtgtgtgtctttcagtaactcgtattctctttaggtatacatacattaaagaagtaaatcattgtgagatatgagggaatttccttacttcacagcttccctttgaggaaagctcacaattgagaagtactgcctaattcagttgaggaaataggtaaggagaagatgaattagtctcagggactatgatagaggttgcatagaacctaccatgctccggtgaagtggctgtggcattttt

SEQ ID NO: 12212 - DNA, 6000 bp, Homo sapiens
atgcccatactttgaggaggggaatagaggctatcactaggtctgaaacaagagagctaagcagagcagagaggagcatgagcattggagtaagtcagaccacttactattttgtgaccagagtaagttactgagccacagttttcttatctgggaaatgggaatggtaattggttaagggagataaacagcctatttcacaaggctgttgaaaatccataaggaacctttggggtacattgccttgtatcagaatccctttatagccaggcagaatgcaaccgcaaggcccagtgaggcctgctgttctacaaaattaagcaaagtaaattggtaactttggatttacttagctagtgattaaataacagtttagttaataggctattaatggtccccaggtgttggtaattctgagcatttgcttttaagagcagtcgtataatttcttctggtactttatatatgtaaatttatatatacatgcatatgtatatgtatttttaacagaaaacattgaagtataacaaactgtgctctcagaggctatttttgggagggttaaatgatattgtgcatattaaacatttgttacgcctacagtaagggctcaatacaagttatctgctattatattattgctatcattattattactctgagactcaactggccacatgtagggcaagaacctttgtgaaatttagactccccacaagtccaccaccacctagtggcagctagaggtactgcacacatcttgaggaagaattacattgcttggaattaattccatgtaatttcagtcccaccaaggatcacaggacctttgttcagagtgtggcttacttacctcagagctgaaattcatatatcattaatcaatgaagtgacattttttacttccacagttggcacagaataaaaaaacaaaatagggagatggacatgctcatgtgctgttaatagaaatgtaattggtgcaacattttacaaggacaagttggggatataacataagtcttaagtgtttttatcttttggtggagaagtcctaggaatttatcttgaagaactaaaatagaaaaaagagatttatttagaaagtgtgtgtgtgtgtgtgtacacacacatataatgtatatgtaaaagagcattacatataacaacaaaatggggagtaatccttttttcatttgtgaatcagagttcttaatccttacagcagcaattcttagaagtggggaaagttggcatattgacatctggagcagagacattgaggttagggaattggatcagaatctgctgtgtaagctgtgtaatttaagaacaggcagtgtacctattgatttcctaacaaaaactacagaaagttaagctggacatagacatcttggcagatagagataatacagaagagagatattgtacagggtgtatgttaataaatttcagtttggggaacattgattcatagggaataaaagtatgggtgaaggtaaaaaattaatttgggacctttgaggaagaaggagcctggattgggtatcattgtatggatattagagcaacatgatcaaaacagaagcatgggaatttagcattatagggacacatccccaaagataaatgtccgctcatttagctttgctcaggatctgagggccaaaccacctttgacatgtgtccgaacctcccagtgtctgatacctgatgtgtccagtatgaatgtagagcagggtacctggtatttggagatacggattaccctcgtacttcattctattaataacaacttttaggatgaggcagtgcgtagtgagagaccgtgatcaggttctgtcaccctcatgtaaagaccacactccttggcgtcaatttgaagggtctctgatctggcccagtcctctccagcctcagtcaaacagatttcagccattcacaactacagaaaccccttcccaggcatagtgcgtgagtagccggcttgaaatagtgtgattcaaaattagtgtactgtaaacttaaaagtcacagcctcccctgcttaattttttattatggaattttaaaacataacaaaggttgagaaaataatgaatccttgtgtacatatgacctttgatttcaaattattccatttttggcttgtggggctcttttcaagttggttcctaatttttttttttttaatttttttttcgagacagagtcttgctctgtcatccaggctggagtgcagtggcgcgatctcagctcactgcaagctccgccccccggggtcaagcaattctcctgcctcagcctcccgaatagctgggactacaggcgtctgccaccactcccagctaattttttttttttttttgtaattttagtagagacggggtttcactgtgttagccaggatggtctccatctcctgacctcgtgatccgcccgcctcagcctcccaaagtcctgggattacaggtgtgagccattacgcctgcccagttcctaattttttgacatgattggtcagttttaaatggactgcctcatcagtatcttgatgcatgcctgttactctgagaaatcagaggcttggagaatgtaagaaggactgggaatacgtaggcccttcccaactaggggaacgataatgcttactttattgccgcagtcagtgttgcttagctacatttttgccgtaacatatttgagaggttaattttataggaagctttctgtgattgaaagatatgggaatagcgtgcagtcctaaaacacacataggtttcatacacttcactggaagaagacattcactaagcacctgttgtgtgaaacatgctgacccggcactgtagaggatgacaaagtgacttatgggaatcatggttgaatcatttggagtgacccaaggcaagaggccgagaaacagctgtggaatgattctaagaataccagactcctagggcagtccaagctctggactttctatgtcaccatctttgtgatcttgtgcaatccacttcacctttctgaccctttcttctctcagctggaaagagacttgaggaatgtaaagagggacactggactcagtctcttaagtgcctaggccctttcacatctgaaattacatacattgtttacttaggattttaaaaaacagcccgcatacctgaaggatcacagactccaacccctcattttaaagatgaaaaaactgaggttgccattgctccaggtacatgccacagagtgatgaaaacgtcaaatttttttttttttttttttgagacagtgtctcctttgtcatccaggctggagtgcggtggtgcaaacatggctcactgtagcctcgacctcctgggctcaagcagtcctcctacctcagcctcccaagtagctgggattacaggtgcatgccaccacacctggctatttttttttcttctttttcttccctttttttttttttttttttttttttttagagacagggttttgccttgttgcccatgctagtctcgaactcctgggctcaagcaatttacctacctcagcctcccaaagtgctgggattacaggtgtgagccactgtgcccggctgtacatcttttttttttttttttttttttgagatggagtctcactctgtcacccaggctggattgcagtggcacgatcttggctcactgcaacctccacctcccgggttcaagtagttctcctgcctcagcctcctgactagctgggattacaggcgcacgccaccacgcccagctaatttttgtatttttagtagagatggggtttcaccatgctggtcaggctggtctggaactcctgacctcgtggtccgcctgcctcagcctcccacatcatattttatatttgagtacacggtggcttcttttgtcctcagctgtgacaaaagttttggaaagctgtttagttctaaaactggctaacatgatttgggggaataatcagttccctaatattaaagaaaaatcaattaacaaatcagagtctaggccgggcgtggtggctcacgcctgtaatcccagcactttgggaggccgaggcaggcagatcacttgaggtcagtagttcgagaccagcctgcccaacatggtgaaaccctgtctctaccaaaactacaaaaaaaaaattagccgggcgtggtgacaggcacctgtaatcccagctactcaggaggctgaggcaggagaattgcctgaacccgggaggtggaggttgcagtgagctcaggtcgtgccactgcactccagcctgggtgacaagagcgagactccgtttcaaaaaaaaaatgttcaacttttctttttttgctgttatataccagatagtcacagtatagccacaacaatccactttgaaataaaaccccattcctagtacatttctaaatattctccagagtcctgaatatcataattcaaccttaatggaaaagaaagtactgtatttcagacaagggaatcaagtcaggaattaagcttcagtgatttataggcattgtttttgctggagttggtaatcattgcttcaaacttccttttacaggatagctagcggccaggagaaatacagtggaaaatgcaaaacaacgaaattataaagcctgccaaatacttctcagaattggaaaagagcatcctgctggctttagtagaaaagtataaatatgtgctggaatgtaagaaaagtgatgcgcgaactattgcccttaagcagcgtacctggcaggcgctggcccacgaatacaactctcagcccagcgtgtccctgcgggatttcaaacagctgaagaagtgctgggagaacatcaaggctcggaccaaaaaaattatggcccatgaaaggagagagaaagtgaaacggagcgtcagccctctcctgagtacccacgtcctagggaaggagaagatcgccagcatgctgccggagcagctctacttcctgcagagccccccggaggaggagcccgaataccaccccgacgcctcagcccaaggtatccgttcctgatgccagtgtgcacgctctcactgggtatctgtttgacattttaattttaaaaccctccactttgagggaacttctaaaaatgaaacttttgtatcaaatccaattttcctaattcaagatctcaggattatataggacattcaaagtcttatagaagtgggcgtggtggctcgtgcctgtaatcccagcactttgggatgctgaggcgggaggatggcttgagctcaggaatttgagaccaccctgggcaacaaagtgagacccctgtttctacaaaaaatagaaaaaattagctgggcatggtagcatgcacctgtagttccagctactcgggaggctgaggctggaggataacttgagcccaggaggtggaagctgcagtgagctgttattgcgccactgcactccagcctgggtgacggagtgagaccctgtctcaaaaaaaaaaaaaaaaaaaaagtaatatataaaaacaaaagtacttgtttacatcattgtgctagctctcttggagactttattattacttaaacataaagaaaaataagggactggattaatggagttcttattagtgaggtgctgcagttgcctatcagcctgtctcaaatatgttaaagagaattgtatgaagatttgtattcatccactcaatttcacttttttcaaaaaatatttttggaggtccttattatttgcaaagcattgcagtaggccactcaaaaggccatattaaaagagtcaaccggctgggttctgtggctcatgcctgtaatcccagcactttgggaggctgaggtgggcggatcacccgaggttgggagtttgagaccagcctgaccaacatggagaaaccccgtctctactaaaaatacaaaattagccgggcgtggtggtgcatgcctgtaatcccagctacttgggaggctgaggcaggagaatcgcttgaat

SEQ ID NO: 12213 - DNA, 6000 bp, Homo sapiens
ctccccagctcttggaacccagatgcttcagagatacccttagcccttctccccagtgcttccccatggcccagtaaaccatgacagcagcagctctccctctccagccccatcacagtgccacggcccatgttctctccctgaagctgctccattagctttcagactgagaatcttaaaagctgtgtgggccgggcaagatggctcacgtctgtaatcccagcatcccagcactttgggaggccgaggcgggcagattacgaggtcaggatttcaagaccagcctgaccaatatggtgaaaccccgtctctactaacaatacaaaaattaaccaggcatggtggtgcgcgcctgtagtcccagctactcgggagcctgaggcaggagaattgcttgaacacgggagatggaggttgcagtgagccaagatcgcgccactgcactacagcctgggcgacagagcgagactctgtttcaaagaaaagaaaaaaagctgtgtgaccctgaggattctaccatttactgaacaagctcccactgccaggttacatgataatttaacatgtatgttttcatttaatccctatgacatagattttattattattttcattttactgaccagaaaactgaggttcagagatgtaagctatttgcctacggtcccaaagccaatagttgatgcgtatggatgtgaactgaggttagctccaggctcaaggtctctgctaatactgtccttagtaaggtttctctgaagagcctctttactcataggctgattagcaaagggttcctaaatatgcttaagaatcaataaccattaaaaatccctcaccctacaagaaactccccatcaaaaaactggatcagtgaaatgaacaggcaatacacagaaatggaagtacccgtaagaaaaatagtttactaccctagtaatcaaagaaaaacaaaattacacgggtgtattccttttggcttatcagattggaaaatatttttctaaaaagaaaaatgtaattatcttgtaatgactacactaaaaatctagggcataattgacttaatttactccaaatgtgttgctattgcgtccatagcacggacttgcccatttcaactcaatatatgttacgcttggggtagtttattacaatgagcaataaacattctcataatcgccaagacaagccaagtgcaaaacaggaagggcgaagacagagggcagcaggtggtccctctcgctcgcgactccgggaacgccaagcctcagcccttgggaacctggggcgaggcgcctgggtctcggccagggggcgcgcccgaggacgccgaagtagggcgcgtgtggggaccacaactcccaggcgcccgcgcgccgcctcgcccggaccacgtgatccgtgcggccagggtagctatcgcggcggcggcggcggcggcggttgaactgactcggagcgaggagacccgagcgagcagacgcggccctggcgcccgccctgcgcactcaccatggcggtaagggccgggcgctacggtgaagagggtgggcggttggggcggggtctcctggagctgccatctcggcaccccgaatcctcgctgccgctggcccggggctggtgaagggtgtgttggcagcattgccaacagctggaacagggttgggggacgcggcaggtataggttgcggtggctctgtggttttcctctttatttgtccctcctgctgggaggcagtccggctaggcgagcagttaccgagcgcccgcggtggcgcggcttgagagtgggggcgcggtggctgaagacagctgggtccggggcccccggccccggacctctggccggcgccccagggcggagagcagcgccttgggagattccaggaaggcttccacgaaagggaaacccccggcgcatttcagcccgcagccccgcgcgcacaccgagcgcacatccccggccctgctcttgtcaagtttgtagcctgattcttcggggaataaaacagaaccagctactttccagcttccctacactttcagtcagaaaacagcgtttcagacaagctgtttttcttggtagggttcacctgggctggagagaacgacagcttgcaagactcgttcgtctttgaagaagtcatatcattttcttcatcccatgaagaatgtcatagaatttaagatacaggaagctcagcctgggcaacatagctagaccccgtctctacaaaaattagccacaagtggtggcaggcgcctgtaatcccagctactcggaggctgaggcaggatgaggaggattgcttgagcccagaagttccaggctgcagtgagccatgaccttcggcctgggcaacagaacaagacgtcctcaaacaaacaaaacaaaaaaaaaaagatataggaagtgtatgtaggccatttagtgaaatgatcagccgtcctttaaaaagggaaatagatggaaagcacttgcaaaagttccccagccagtcagcctagcaactgggaccttcatctccttcccaacccttgtttacaaataaggaagcttttctcaaagtgtaagtaaccccaaatgaagaaatatagaagaaaacaagttccagggattgctccctccttcaccacagccccaccctgaaaaaagcacaaatcagttaaactttcagaggccaagattcatcccaagtaggaaaacaagattggggccctgccccttgcctatctgaccacaaagccctttaattgaaaactgtagcccagatcgcttctctcaagtcagggtgtgctgacttccatcttttcctctagcaaaaaggcaaaagtagaaagggttgagtgacaggtgagtcttcgtccctctggggcttcggactccgtgggtgtttccagctctgaacaaaccatacagttcatcttcccagctatctcctgcttctctggcttcagaaccatcctagccaactgctctctggccagggcaggtgtctctcaggcggcttggtccccagcacccccagggagcctccactgtgcctccctttctctgacctacaacctgttgtaattatttgctcacttaaatgtcccccctcatagacaggtagctccctaagggccaaagacttgtcccattcatctctgtatcgccagggtctgcacagacctagcacaacaaaaagaaatctttcaaattactcttactgttctgtgggtgttcaggtctatggcaaaacatgtctgggctgttttgggctcctaagataactggcccaggcccaaggatgatagaaggaaaccagttatggcaactccctgactgattaattagccactagggacattccattcataccatctgctttaccaaatggactcagagaaggggtgatgggtgtcacccctacctctacctggcagagatggtgctagaggcttctgctgaggatgaggccatctccggtgtaaatggagtttcacagtattgtttgtacctgtttggttttgtatatcaatcttgcgtaaacattttgctgtgtcaaaatgttttttttttttttgaaagcctaacaggagagatctctgagtagtaagactcaaaatgattttttactttcttttcggtactgtgtcagctttttacattgagctagtgccattgggggtggggggtaaaagctattcttatttttaaactcttcaacattttttaaagtcttcaacatgatctttatcatgttgtgatgtgaccgcctagatttccattttgaagctctcatataatttacttgaccagtccctactggttgacaggagaccatcatggttcctatgatttctcaaagtgtgacccccaacaaacacctgtcctagaaacacctgtcccagaaacacccagtacactaaggtttgagaaccagtacaggctttccagaaaactctctggctctgggtacctgattgccgagtgaccatggggagataagtgggcttttatgtaccttccttgttaaagaggttaataatagtaggcacctgcggagatgtcacagggagtgacacataataaatggaaggtgaacgtggtacaggcacatgcagtccctcagaagacacagagctgtgtggctgttctgtccaatcagatgctttcacatttctttctctgtcctgcagctccacggtctccagtgagcccagtccctgggtaggcgcaggcaggggttggtgacacaagtcagaccccttttggcactgaaaggcatgttagctgagtgtagggagtagaacagccaggttagtcccaggtctctaccaaaccccaggctgcagcgtccaaatctgagagatgcatagatgtggtgccccatccaacccggaaacagaggcacactcactgttattgttgttgtttttgagacagagtcttactctattactcaggctggagtgcagtggcatgatcttggctcactgcaacctccacctcccgggctcaagtgatcctcccacctcagcacctcccaagtagctgggactacaggcacatgccaccacacccaactaatttttgtattttttgtagagacagggttttgccatgttgcccaggctagcacttttttcttttacaaggtttcaggaagagtagatagagttcaagatgggagcctgtgaaagtgaggccaaaccaagggaaagggttcctagagtcctgtcctcatcttacagacgaggagactgggtccacagggggctttctgcgtgtcagcagctcaaggccacgcagctggttcctggcagagctgggagggagatccaggcagtgcagctttagagaccgtgcccctaaccactagccttgctgcctctgttcaaactgcaacaaagtgaactgagcctcagaatctcctgaagggggctggttaaaatctatgtcttccctgtctcctgtggctctgaccctggactctgatttaggggcctgaggaggcccaggaatctgtacttttaataaggccctggagtctaagcagctgctgctgtccctctacactaagccgcttgccagtgtggagctcatgattggcctgtggtttcccagtgattcacccgggactgactctgcctctgtggatccggctataacagcatcgtcatccacacctgtgatccgctccagtgtcctccctcccaccctatcctctttgccttttcatcctgttgtccgctgttgtccctgggctctggtcttactgtcccatccccagactggtccttgtttgtttcctttatttaaggtgcactcttcatctttctcaggaaatatgggccagctattggctgaacatccttcgggggctaagcatgactatcctaattgcacagaggctttttctcatacattccttcctctccccaatttcttcccatattttgttccaaagtggccatatcagtttcttctgctgtttgcatatcttcctgaaatgttaaaacaaccgaacgacagcacagccctcatctctgtctagtattgcacaagaaagtgggctgttctctgtgttgtagcatctgttttcctcttgccaaatgagggcctggtaagaagacccaggatccagtcctgatgctgccaccaactcacagtgtgaccctgggcatgtcacagctgccccttggacttccagtgctgccctgagaagctgcattgagagcagttaggagcacagaatctgaaaccagcccacccaggcaaaattctagctagcaacttggcaagttacttaaactctgtctgccttagtagtctcatctatgaaatggagctaagaataataattcccctcttgaaattgagtgagttaagacatataacatttttagaagagtgcctggcacagaataatcagtgtcatttccctcccagcatgaaaaaagagggttgctctaaattagcacttcctagaggatagtctatgagat

SEQ ID NO: 12214 - DNA, 6000 bp, Homo sapiens
cttattatccagatcttctacttttaaatgttctaagcttctttgccccaaattctcatttagaattttcattcatctctaactgacttgttttggttttctggcagcctatgaccttctactttggctttaagaatgtggaactactgttttccggtttggtgatcaatacagctggaggtgagtaagccattaggtagtgttggaaggtgatagtcacatgagagacagtgacaaataatttggaagtccagcacctctttctgtcctaattactaagtcaacatggtaatgatgcataaccatcttggttcctatttcctacctagaaggtaggaaacacagtacttttttggtcctctggtaaacctctgttaactaacatgtatgttttggagctctaaaaaataatttagataccagatagaatcttttgcaatccattttctttcattcttttccagagtgtttaatttttttttttttttttttttttgagacggagtttcactcttgtcacccaggctggagtgcaatggcagctatcttggctcactgcaatctctgcctcccaggttcaagcgattctcctgcctcagcctcctgagtagctggagttaaacaggcacctaccgccatgcctggctaatttttgtatttttaatagagacggggttttgccatgtttgccaggctggtctcgaactcctcacctcaagtgatccacccacctcagcctcccaaagtgctgggattacaggcatgagccaccatgcccggcctcagagtgtttacttatttgataagttattagtcctggacataagactaactcaaattaagtaccacaaaataagtttaaaactattgttctaatacttcaattttacaataaattaagtgccacaaattgtgaaatgactcgccatcaatcatagagttaatatgtcagagctaggacaaggacccagaccttctagagctacctagaccagtgttcttttagtctaccaaactatggcccacatccttcctgattcttggcacggcccatcttagacactcctagttttgaggtagatgattacccatctgtttgtgtctattatgttgtatggtatactttaaatttaacttgcgcaaactcaatagtcagttggactgccttaggtaccagatgtctgtttggagccataaaatcaatttgttttgggaagaaggagagcatttagttcaggtaatgtgttaaattagcagtttgaatacatttatatcattaccaacacttcacagtgtgaaagacttagaattgaaatgcctattcaggaaatgtagtcagccactgatgaaactaaattgttttattccctgttccatattctacattgtgtgtttcagtgtaacaaacctaatttaatgatatcaagcagtctgaccaaaaggttattgttgttctgattatttttcttatcttaatcagaaagtaaatatgttcttggcagaggcaatagttttcagttacaccatcttagccgttctcctatctgagcaagagaagaggtaaaaatataatgtcttcaaaagctgagagtagcattttttctatgtgtctttctagctggacagcacattggctaatgattttgcacatgtttgacagtacctccatattttccttccatacttagaaatggctggagcttttgtggcagtgtttttactagcaatgttctatgaaggactcaagatagcccgagagagcctgctgcgtaagtcacaagtcagcattcgctacaattccatgcctgtcccaggaccaaatggaaccatccttatggagacacacaaaactgttgggtaagaactgaacagatccagatgaagtcctaaagaactcgatcagttaagcagcaaagcgcagctgtgtgatcagcagcagccctcttcttgagttaggagttctgtatgaccttgatcaaaactgtccttggaggtttgggtttgtaggtcatgagcaggccaaaggaggaatgagagggagtcttctgcaaatatgaatgtttgttctgagttgtacggattggccactttggaagaagggaagtgaggaatccatattttaaaatatttaccaaaataataatgaacaagttaagaaattcagatcaagatataaaagaatggcagattgcagttgattctataaagttacacctagtcagccctgtcctctttttctttacaatgtaagactgtattgatttctgtgttctgtctaagaaagtatttggatgattattggtttttcccatagattggcaaatgttttttgagattgttttaataaaaatgtaagtcttaaaaccaaattggaccttaagaaatcctatagactgatatcctgctttcaaacaagcagtgttatttattgtactgatgagcttactggggcccagaaggattgtgacctacctaaggtggcacaggggatgagtagccaggtctccttatccctaattaagtaatttcttctatactacccaaccctcaattctatttttttttctttttttctttcttttttttttttttttctggagacagggtctccctctattgcccaggctgaagtgcagtggcactatcttggctcactgcaatctctgccttccagactcaagtgatcctcccacctcagcctcctaagtagctggaactacaggcatgagccaccacacccagctaattttttttattttttgtagagacaaggtttcgccatgttgcccaggctggtctgaaactcctgagctcaagcaatcagcccacctcggcctcccaaagtgctgggattaaaggcattagccaccacccccagcctctgtttctgtttttgtagaatgtaaactttgcaaaggtgggaagcctaaaaatattcgggcagatgagcgtgagagggtttacggcttccctttcaggatctaaggtggaggtaagtcgggattactcctcgtccttttctcctcctccggaaaagggttccttctactggaggaaccacagccatatctggccaatgtttataagcctgacagccctgtgctgtttcatttccatggaccaatcaaagaacattcaagtacccatgagttgccagagtggctgtccagttccagctgagctcatggcaagaactcttccctctttctcctgatctgcagaactcctaggagtccctgattgttgtgtccctgtttactctccaggcaacagatgctgagctttcctcacctcctgcaaacagtgctgcacatcatccaggtggtcataagctacttcctcatgctcatcttcatgacctacaacgggtacctctgcattgcagtagcagcaggggccggtacaggatacttcctcttcagctggaagaaggcagtggtagtggatatcacagagcattgccattgacatcaaactctatggcgtggccttatcgattgcagtgggaagttgttgaagacttgaagacgtgattcctgctccaatcatcccttcttgctcctctttgtgcacgtacacacacacacacacacacacacacacacacccctgctcaacagaggtttagtttacagtctctgaactaaagtagtaacctcccaaattgttttttctaataagctgagattcccatttctcttaaggagaagccacccatgagatgtcttttccttctccatcatcttagagccaagttatatgttcttgtctaatccatgtagctttttgttcaatgacttgatcatctgcttcctttttgaatttttaacagatagtaagtaaatttggtggttttttcccctgggtcagtgatggaaaggggttaacttcagccaggattgatggcagctgagggaaattcttgcccaactaaacccagaactcaaacttaacattagaaaataaggtccagggccggacacagtggcccatgcctgtaatcccagcactttggggggccaaggcaggctggatcacctgaggacaggagttcgagaccagtctggccaacatggggaaaccccgtctctactaaaaatacaaaaattagccgggcatggtggtgggcgcctgtaatcccagctactcagaaggctgaggcaggagaatcacttgaacctaggaggcggaggttgcagtgagccaagatggcgccattgcactccagcctgggtgacaagagtgaaactccatctcaaaaaaaaagaaaagaaggtccagcttttggattcaatgagtgggaaatacattgtgcctttctctagatgtgatacgttataccaaaatctttgtagtgtgcagagcggtggtttgagactaaatacaggcttagaacttgcagagtgtgtattcttggatggctgatgcatcgacttgcattcccacttaacactttgattagcatgaacttgccaatcaaaaaatgacaatcaatttgagaaaatagaaatagatatttttaaataaaaccattcacagtttactttgtcttgataccttggtttgtcccagctgaagtgaagcaagagagtttgaattaatttttccattataatgttttcgcatgtctgcctctaaaactgtgattttcaagctttagcgtgcatcagaatcacctgtagggcttgttaaaacactaattgctgggcctcaacccaaaagcccccaaagtggcacttctgagttcctgctgatgttacaagggaccacacttttgagaatctgtgctttaagctaaggaaatattgcctggtgggttggctgcctggtattgggcatggaaatttgaattgctgattggtagatggtgtgtctggacttaactcacgtagtaaatactgctgatcaatacctaatcattccacatttattgagctccacctgtgtgtatgtgtacccaagcacacatgtgtgaagggctatagccaaagtatttttactagcctgtatgaaatcactagtccttatttttaaaggtctatggtttcttggaagtagtttgattgttgagagagacctttgatctgcagtgtaaatctaccagtcatgggccagaagggcaaaagcccagctttctctttggaaagactcaggctgtggtttgttgatggccaggttttcctcaggctccaacaactgtgcttataccaagcagatcctcatcctccatataatcatctttgttattcgtgggggtttaattacattacaagtggccaaaacccctgttctcagtgaagaaccacattggatttgtattctgttcagttgtagtctacactgcagtcttattcctggttcaaactacctctttaaattgatttgtcttgtgctggtctgttaaatcctgccctccttggtgctagatccagttgtgcctcagggcagaggaaacaaaacacagctatcctgttggcctgtgttgtggttttgaagtttgtactttctctgtgggtgccagttaaatattggagagcaaggaatgtggacttgtatggctttgaaccaagagagggttatgagcctactggattgaggttaaaatccaagaaccaacatttagagctttgtgcttttctctcattccatcactttgtaatgatgatacttaacatgagcagggtgaatgacaggtactgacgaagtccaacacaaaggtataatacagcctgttgtctaaagccaaggagtcataaaaccatgagaaataaataggaatcaatagttagtagtgacattggtgctctctagaaatctcagcatgagctgctatagaataccctcccagcaacaaaacctaatcagtaaggccagctagacccaatggctcatgcctgtaatcccaacactttgggaggccaaggtgggaggatggcttgtgtccagaagttcgagaccagcctggacaacatagtgagatcctatctctataaaaaatca

SEQ ID NO: 12215 - DNA, 6000 bp, Homo sapiens
ggcactaagggtaccttctccagagtgtggcccgtcccaggcccacccatggtctgagccgagaacatcctggagcggcttcccagagaggcctgaagtcgggaaggagggcgcagctggggacagaaggggcgcagtctgggagcgaagctgagtccagggcagagtctgagtctgcagtgtagatgctctggatcctacttcaatcctgaattcagacaactgtactctgagggcagagggcagtttgaagtcacttcagagcaagaggtacagattggggggctgggttccagggcagggggcctacagcgaagagatggcagctgatgaagagagatttgggaagctggttccatgcatctttctcatcgttccagtgtctcagcgtctgggtgtattagtgtacatgccagtgcaggtcacattcgtccatgtgtctcctagttccaagttctgttttgcatctgtaaagatctgccagtacctgggggtgtctgcagtctgagtgcatgtgtgggcagtgggttgttcgggcagtgggttgtgtgggcagtgggttgtgcgggcagtgggttgtgcgggcagtgggttgtgcatccggatgtgtagcactcacacacttcgggtgactcttcctgggtaagctgtggatgtgagtgggggcagcatctgccgtgactcattctctcctctttccattccaagccgggtgggggagtttgggatttccagacaaggcctggctccccctggcacagagggtgggagtggggatggggagggaggagggaagggtcatgggaaggtggggccatgttttgtgctcaatgaactgagaagggggagggttccagctggagtcagctgggcctctggcccccgcttgaccaaacccacttagggggcagggcctgctggagtctacagtgacacgtgagtccaggatgatctcaggcagcgtatctgaaaccctgggactccccatctcccttcctcttcaccatcaccctgggagagccactcagctgtcgtgattcgcccaggactgcgagggttctggggacttggtactttcagttctaaaaccaggacagtgcagggacactgggaggagtgattaccctactcaagcatctcctgcctctctgggatctgaaagccaccagagtggaccttctaaaaagtaggtagggccaggtgtggtggctcacgcctgtaatcccagcacttcgggaggctgaggtgggtggatcacttgaggccaggagttggagaccaacctggccaacatggtgaaacgccttttctacaaaaaaatacaaaaattagccgggtgaggtggcatgcacctgtaatcccagctactctgcaatctgaggcacaagaatcacttgaacccagtgggcagagattgcagtgggctaagattgcagcactgcactccagcctgggcgacagagtgagactctgtctcaaaaaaataaaaaacaaaaacaaacccaaaacaactaactaaaatgtaggtgggaccaagtcacttacctgtctgaaactttcaggatggacccagaggttacctggtccccaaggcactgacacctcccacccgactcacctccgccaccctctcccttgcttccaaccctccaataaccccgcctagggcatcatggccctgcccctagtggaacttgcctcttgctgcagtctctttggaatccaactgctgcccacagtcccctatctgaatccttcaaaagcctcttcttctaggaagccttccctgaacagagcagaccccggctattgctttcccaagacccaacccctttccttgttgaacttggcaacatcacctagctcatttaggtaattactggctgaatcaccccccaccatgtcctggcctagactgctgtgagccccatgaaggcagggctgtctgtctcgtttctctccctgcggttgctggcatgacccgtcccccaccccccaaccaccaccaccaccatccggctctgaatgaatgaatccacgagtctctaactctggagcaggcctggcgcgacctcttccgccctgctctgggtgtccatcctgcaccctgtgtgtcccctgccctgtccaggcgtgacctgcgagatggaggtggacgagtgcgcctcagcgccctgcctgcacgggggctcgtgcctggacggcgtgggctccttccgctgtgtgtgcgcgccaggctacgggggcacccgttgccagctggacctcgacgagtgccagagccagccgtgcgcacatgggggcacgtgccacgacctggtcaacgggtgagcgagcggcggggcaggcggcaggggcgccgggtgcccgagggcggggaggccaggcgcggggcagaaggggcaggcgcgcgctcagctccgccggtgcgccctccccaggttccggtgcgactgcgcgggcaccggctacgagggcacgcactgcgagcgggaggtgctggagtgcgcatcggcgccctgcgagcacaacgcgtcctgcctcgagggcctcgggagcttccgctgcctctgttggccaggtgtgtgcgtgcaggtgcgcggcctggcggggggaggggtaggtgtgcgcctgtgcggcctggggcggtggggcaggtgtgtggctgcacgcgagtgcccgctgggtcctcgggaccagagtgtgtgtgtgattgcaacctgtcggagcctcagtttcctgatctacaaaatagggctgatcgtagcgcctgctcctggggttgctgcggggagctcgaaggtgcgacgcctgggaagcccttggggagggcctgacagctgcaaagggctcagtaattaatgctagtaatagtagtaagactaggccgggcgcggtggctcaagcctgtaatcccagcactttgggaggctgaggcgggcggatcacgaggtcaggagttcaagaccagcctggccaacattgtgaaaccccatctctactaaaaatacaaaaattagccaagcatggtggcatgtacctgtagtcctagctactcaggaagctgaggcaggagaatcgcttgaacctgggaggtggaggtgagcagagatcatgccgctgcactccagcctgggcaacagagtgagattctatctcaaaaaaaaaaaaaaaaaattagtagtaagactagtaatagcagtaataggccactgctgctgaaggctgccgtggtcattcctgcggcccttagtgtgtccctccctcgccattcgtggcttattccgagctgcggtcccttgctggccctcgctagcctggtcatagtgaagaggtgctgcccggcaaccccgtgagacctgatgtccgcgtgtgtgtgcccccaggctacagcggcgagctgtgcgaggtggacgaggacgagtgtgcatcgagcccctgccagcatgggggccgatgcctgcagcgctctgacccggccctctacgggggtgtccaggccgccttccctggcgccttcagcttccgccatgctgcgggtttcctgtgccactgccctcctggctttgagggtgagcccctgctggggaagcggtcagcccatgtccagatgcccagggagggatcttgtgcccacccccccaccccccccacccccccaccccacaccccacacccgagtctgccctctctcttggactcagtctctctagctatagaatggaccctctcagcccctgcctggctctgagggtgcaggtgggacccacagctgggcctcttacaggagccgactgcggtgtggaggtggacgagtgtgcctcacggccatgcctcaacggaggccactgccaggacctgcccaatggcttccagtgtcactgcccagatggctacgcaggtgtctggggtggggtgggccctgggaccatcagaattggtggtcctcaggtgagaaggtcccttctgtctggatgtgtggattgatggggtcaaggagatcagggaggaggtgggtatggtggcccaggtgaccgctgagggtggctgaactgggactcgctttggaggtgagactggggctcaggagtgtagtcctggcagctggggccatagtgggctgaggttgtctgggagaacgtgtggagggatggtcttcagggaagacggaggtggttcagccaggacagagaaggaaaggggggctattgcagagagttagggggcagcatctgtagaaggatgactctgacctttggggagctggggcctgtcaggcaggagttgggggttcagaagtctgcccctgccttgggtacacgcagatgcacagacacaggaccccggtgagcccagggagctccaccgccaacactgaacgtccctgccccctctggaatgcctgcgacacctccctcacacccgcccgcattcctgctggggcacactgcctcctccccctggcaggctcctgggcacaggctcctccaccaggggaaagagatggtggtcacctcttcccctctctcactcgcctgaagatggtgggactcagtgtcccccagccctggatggctgacactcctgggggtcccgaaggcccatccactgcctccatgggccgaggttccccaagtcctgctccaagagccatggcctcctgggtacctggcacacagtgggcccacacagcacgtctggcctctgggaagcatttgctctgcattttgttttttccttgccacagccccatgaggcaggggtttaaaaccccatcttacagctgagaggatgagggggtgtcatcccccaggttcaccactatcagcgggaacccggctcctctcccagttgagctcactgttgggtgacagggagggcagacctctgaggtcagagccagggaggggggaccccagctgcagggctgggctctttgcccatcctccctccctttaggccatgctgggcatgggggaggccagtgcctggcattcctgagcaggctccgaaggaggcagctgggccaggcagggagctctgcctcctccccacttccccagcctcagtgcccgcccaccactctcaacctgtctggagggcatggcaatggagccgggggctctgtggaccttcctgggccacctgtggctcctggcaggtatggaggaatgtgggccctgggcagggggaggttggtgggtggtggttcctaggaagaggctgtggtgtttgtgagctgatcgaggctgggcttcaaaccctggtgacttctctgggcctgggttcctccagctgggatgtggctctggctgagctacagtgggctatggcttctggacccaagctggggcctgagcacctgaagggatccctagagggaggatgaggcagccccttcacagccagtgtgggggccctggggcagagggactgaggggttagagcctgggaggccactcagagtgccttgggtacttgcactaccccactagctcctccatgccatcactctgtccataaaagccatgtcaggccctttgctgggcaccaaggacatattcaggtccctgaagatctcagctgagtaaacaaatacttttaatacagggttctggggagctgtgcctgggactgcagagtgacacagtagtttgaggttgggagttagggaaagcctctgggccctttgagtttgggctttgcaggatgagtaggagtttgaaaggaagggtaagggtgaatgaggcattccaagcagacagaacagtatgagcaaagccccagagtcacgactttccaggaaatgctcggaggaatgggacgttcaagatttgtgggaagcaggattgaggcttgagagcctggtaggacccagcccatgagggtgtcttaaatgtcagggtgagtgattggacttcaggcggcagaggaacccagcctggcgatgctttagaaatggacctctggctactggtggagatggatgggaaagggctt

SEQ ID NO: 12216 - DNA, 6000 bp, Homo sapiens
aaggctggcctgacccctgccctcactggatgatgctgtctggctgcccattctgggccacctgcccagggtcagaggcgggggccgggttagctgtgttgctctgcaggtagcggcggaaatctttgatcataggccggaggacctggatgaggacgctcagggcagcctgtgtgccctccatggcctgggcctggcgctcctgggcacaggcctgcacttcctgggagcggcggatcatctgcagtaggtcgttctgctgttccaggtgctgtgcgatctccttcacatgcaggttggtgacccgctgctcctgtatcagcttggcggagttgagagcaatgcggctcttgagcgcttgcggcttgaccgacgtgtctgcatgctgggccatcatgtccacaggggtctctggtggcagaggtgggggcgcctcagccgtgcagtactccaccacgccctcctccagcgtgtgataggtggtctctgtggggactgcacagtagaaagaacagaggccaagggaggtcactttctggaaggaataaagctggctgtatggggtggggaggaggccataaagtcctgtcctggagggacataaaggggaatccaggcctcccctggctgcatagctattcacatataaatctagaatctaaggggttcagaattttttttttttttttttttttttttttgagacggagtctcgttctgtcgcccaggcgggagtgctgtggcgcgatctccgctcactgcaagctccgccttccgggttcacgccattctcctgcctcagcctcccgagtagctgggactacaggcgcccgccactgcgcccggctaattttttgtatttttagtagagacggggtttcaccgtggtctcgatctcctgacctcgtgatccgcccgcctcggcctcccaaagtgctgggattacaggcgtgagccaccgcgcctggccggggttcagaatcttaatctacttggtaatcaaagggccagccctggatctggcaaaagcaaagatgttgatcataatactagcaaaacttttagagcaactactacatgtcaggcactttgtactcattagctcaacaaatcctcaaaatgacaccaagaggttggtgctgtcatcttcatttttcagagatgaggaaacagactgagaaatgtagaatgacttgctaaggtcacagagctcattcagcagagccaagaggcaaacccaggtctccccaacagcagagcccgatgtgctcctgacctccacgctgggctgctcctagctaagaaaggcacccccggccgggcgcggtggctcacgcttgtaatcccagcactttgggaggccgaggtgggtggattacctgaggtcaggagttcgagaccagcctgaccaacatggagaaacctcgtctctattaaaaatacaaaattagccgggcatggtggcgcatgcctgtaatcccagctacttgggaggctgaggcagcagtgagccgagatcatgccattgcactccagcctgggcaacaagagcaaaactccatctcataaaagaaagaaagaaagaaaggcaccccagaggctgggtcacatgctctctgtggtaccatgcagcaggcatcttgggtgggactctacacacgctctttgcagccacattagtcctacctcctttgatgctttctgcttttttttttttttttgagacggagttttgctcttttgccctgttacccaggttggagttcagtggcacgatctcggctcactgcaacttctgcctcccaggttcaagtgattgttgtgcctcagcctcccgagtagctgggactacagtcgcccacctccaagcctgggtaatttttgtatttttagtagagacagggtttcaccatattggccaggcttgtctcgaactcctgacctccactgatctgcccacctcagcctcccaaagtgctgggattacaggagtgagccaccatgccagccctttgatgctttcttgacttgacttcctaggcccctatggcgaagcagaaaaggaggtgggaatggggcagcagtagctaaagtacccagtcaatgtctccctgtctgtcatcatctgggtcaatccgatacttaaacatccttcctgttccagaacagcatctgacctagacccgtgtttgtcccccttaccccaccccagtgtattcttgagaaatacgcattgtgaggggatggcactcgcacatccacccaactcccccaacccccactgagaatcactgaatgatccagctcacggtcatcacaaacgagcagaggtaacagggcacaaactcttctttgaactaaaaaatccaaccaaagttagttctgttgtcattcctgagaaccacggaaaggatcctggctgggctgtatgggcctccgcgcatgtgggagaggtcaagctcctccacccttcaacgccaatgtcagctatgtgtccttatgccaccaagaagcccccttcctcttccggggcctgaggttttcccaactgatggcgaagctattcctatatgtgtcatctctgtcctactagaacataactggcctgtattttagacaacttggtaatcccagtgcccagcacagggtttggtacagaataagtgctaatgtttgatgaatgaatgaatgaatgaatggagtagattaacaccaggaaccatgaggctcctgagcagcacctgatgaaagatcccccacactgaaaacagaatccagaatcgttgtctcacttgggcagtattattcccatcaattttttcaacaaatatggcctggctgtctactacaagccgggccctgtgaaaagtcctgtggggatacagacacggtctcttgttttcaaggaccacccagttcggcaagtggaggtaagtcatggacaaacatggtggcaatgctcagtggcgagctatccagcacgtcagaagtccagcccacgtgctgaggaagtcccaaagagagcaagatcacttctgtctgggtgctgctcttggaaggcctcatggtcttccaagacccccatctgacctctgacccttggcagccaaccttccccaggccaccccagagcttgctggcccttcccacttatgcacgccgcctgggcaggagaggtcactcactctgtgtcagggtgaccgtggctgcggctgcggtggccgagggtccgagggccacagggtggatctctgtggtgctgggcaggctgatgatggtggcctcgcccagcaggttgcagatacgttgttgcatgggggtcagcagcactggggctacagctgggccaccgccaccactgccaccgcctgtcccaggccccccagctccgtcctcctcagtgggccccggcgcctcaccaccctccacggcggcccggacctgggcaaccttgcgacggacctcggtcttgaggtcagaccacttcttcttgacctcaggcagctctctgcggcaggtggccacggcgttgacccttctcaggatgccgtgccaggccgcactcttggcggccaggggtaccccggcgttgaagtggttcaccagcaggtgcttcttcagctccagctcctccacgatgatctccacctcccgctctgagaagttcatcttccttttcttggctgggacggccatggcctctcccctcccctctttttaaagaaattataatcccctcaagcgccccaattccccttctcttcttcctcagcctcgcccctcacccaccccctacaggggataggccaggcttgctcgaggccaagcactaggcctttggtaacccccctcgctacgcaaagtgcgtagggcccagccccgaccggcccggccgctgccagccagcagcgtaatggcttcctgaatctgcctcttccgccgaggtgtgcggagatccgcccacttcccctcttcccgcctcccagcgcttctccgggaaaaccggccttcccggttggtagctgctcaaatatcacgtcgatcactggttctttcgatctgtcgctcagctaaagagcacgcctgcttactgtaattcgcctgatcattggtctaaaattgtgtccgtcgcccagagggccccgcccacctaacctttattcacttccattggaaaatcattctgtcgttcaattgtcagtattacgactattaagccgttaaattcagctattttattggtggtttagggagttagattaccaaaaccctgcttcctgaggatacttagtgctttcggccgtgacccatgggtcaattaacttttaattcctcccaccggcacaaactctgcctcgcaactgcagttcacaaatgctctcacacaaatcctgtttcccactggaggctacgatctctccgtacactaccgctcctcccatccttaagatcccgcagtctaaacagagttagttcatcaatggaaactggacacggggccttccgcctgccaatcacattactcatgcctatcgctgcgtgattttctctctcttggcccccggctcagccaatccccgcctccctcagtttgaatcggccccaggcggagccgggtgaccccgcccaccccattgatccgggtagtccgtggcgcgtgggctgtccttagacaggctccgcccctccctcctccccatccgagcctgtgactggccttcggtgcgcccgggcgtggccggcgaagcggggcgcggaggggcggggctcccggaagccgccccttccgccagcttgccggcgtctccgagcccgcgctcccagctgcagagcgcctggcttgcctcccgcgcggtcaccgccggcccgccgcccccgctcccgcccgcgcccggagcccctgcctcgcgcccgatggtgagcagtgtgttgtgccgctgtgtggcctccccgccgccggacgccgccgccaccgccgcctcttcgtctgcctcatcgccggcgtccgtgggggacccctgcggcggcgctatctgcgggggcccggaccaccggctgcgcctgtggagactctttcagacgctcgacgtcaaccgggacggcggcctgtgtgtcaacgacctggcggtggggctgcggcgcctgggactgcaccgcaccgagggcgagctccaggtaggctgcgcgcgtcctcagcactggcggggagggagcccctcgagggccgggtgacaggtctcgggggacggccccttgggctgggcggaacccccactgtccagaggaagggtgccccctgactcactgagggacaccccacttatgccctggtgggagcggggctccttcctgacttctttgggtgcttgagccgggttcttcgtggacacaggtgggcatcctatgggctttctgatgggcgaaaagccctttcttgcccagagtagaaggccaggtctcaggagtgtgcctttgtcacctcctgacctcaaggccaagctggacgctcccttcacccaaggatgggttcatccatcagtccccagcagcaccccctcctttccctctcgtttccatgccagccgtgggccctgatctggttcctctcaggaacatgtgggagttgaaaaaaaaattggtattggggtttcaggctgatccgtgtggacgttggcggcgaagactgacagttctcatggtttaggctcatctccattgccctgtttatccagaaaatgggatcgtgatccccgcggggttggagtgtggacggagtgaaagaatccgggggaaattttttttctaaaagtcaaagcgagattgttactattgtgggctcttggccgaggtgtgggcataggggcgcagagaaatggtcatccctgggcctgccaggaagagaagtgctggcctttctgtatgagaacctcagagcagaggctgtttctttcccttctgtctcttcccccttcagtctgacttggcgggtgtagctgccat

SEQ ID NO: 12217 - DNA, 6000 bp, Homo sapiens
gcctttcctttctgttgtctctccaggcaccatgcccagggcccagcctagtagcaggagcagcccctgcctgggcctcagagcgccacaatctcctctgactatccctgggaagccgtggttggcttttgccttacatcccccagagaatggcgtctttgttcttggtgtctaaccatagtccctcatgttgtctttaaagcccaaccacttcccaaaaagcaaggtcaacagctgactgcataccacagcaccccagtggttcctgctttgaggtgggacctggctggggggaccctgccgagtagaaacaggcattcctcactgggtcaggctctgttctgaggtcgtccacgtaccttgctgaatggtggtcaccacattcctgcagtgtggagtcagttttacagattggaaaactgagacacggagcattgaagtgactcatctgtggacacactgcgagaaaaagagctgggattcaagcccatagcttggctgcagagcccaatcccttaaacgttcttccatagtgcctctgattcctaggaggcctccgctggaggtcattgcattcaatcccctgcatctggatgtctacccaggcccacctctgttcacagataaaaatcaatcaagcttttttttaaataaactttatttttattttttgagacacagtctcaccctgtcgcccaggctggagtgaatggccaccatgcttggctgatttttgtattttttgtagagatggagttttgccatgttgcccaggctggtcttgagctcctgggcttaagtgatccacctgcctcagcctcccaaagtgctgggattacaggcgggagcctcccaaagtgcttgtccaacctcgtttttaaaggcaactgcagctgggcacagtggttcacgcctgtaatcccagcactttgggaggccaaggagggctgatcacaaggtcaggagttgagagaccagcctggccaatatggtgaaactccatctctactaaaaatacaaaaattagccaggcgtagtggcgggtgcctgtagtcccagctactcgggaggctgaggcaggagaatcgcttgaacccgggaggtggaggttgcagtgagccaagttcgcgccactgcactccagcctgggtgacagagcgagattctgtctcaaaaaataaataaataaataaataaataaataaataaataaaggcacctgctccaaggatggaatttcccctggggataagcagacatttctttattcatagccttctggcagggagggaagaccctcccagccagaactcaccatgtccagctgcctcgttgttcctctctccttcccactggagtataatttcaggaaggaagcggctccgccttgagtattggctccacaacctccaggctgtgtggcgttggacaaatgactgaacttctctgagccttagcttatcaagtgtaaagtggagctaattatacatctgctttgtgagtctgaaaaagtttacatgataaaagggtatgaaggtctgaaagggcttagtgagcacagtgcctggcacctctgaagtgcacaggaccaagtggcaaatacttctcactgcatcctgaggggtcgttcccagaccctgagatcccacccagccacagccaagtcaccttctgggttgtcttacttagccatgggattgtccctgttcccctgtcccctccctagtccgggttctggcctcaagaaagaaggccctaggggtaaaggagttggaggaggggggcttggcagcaccaccatcaccactgtcatcatcctcattgaaactcttctacctgcaagatcagagcctcgtgcttttggccttatagtttagccttcttactacagatagggaaactgaggcccacagtggggaaggacttgctcagggtcacgtagcaaattggtggtggagcaggaactagctctcagtcctccacattcccggttggtttcccctgtctcttcttgatgactgcccacctcaagtcctcccctggtgtgcctagggtgtggggcctggcacccagtcctgcctggcagagcctggagagaagtgagccgcggttggtggagtagtcgcagcggcccggcgcgttctcagcccggctctttgtctgctgctttgtgatggtaagtgctgctcctaaatcagttctgtgacactgttattgttgcccagggcgcaaagagtctaaacttttcccctgaggtcaagaatgtggctggtccccaagccgcccagagcagaggcctgggtggctgggggtggggatggggcctcgccccgagctggggcgagatgttggggggagggggtcagcgggaacaaaacgctttgaaatgcctcctctccatcactgccaacattgtccgctgcccgcggggggcctggcaccgcctcgccggggctccggcccccagccctggccaggcgcggcccgacatctgaaaatggacagaaggttattgtcccttcccgcagccctttgtctgccccagttccagatgtctaggctgggaccagggaactgacccatggtgggcaggggggagaggacaaaaagggagagcacgggtcactgcatcctgaggggtcgttcccagaccctgagatcccacccagccacagccaagtcaccttctgggttgtcttagccctgagattgtccctgttcccctgtcccctccctactccaggttctggcctcgagagagaaggccctaggggtacaggagtcagagcaggggaccttggcagactcacggacggggctgaatccagctccacccggtaactgtgtgatcttggacaggtgtggccctctcccagcctgctttccccatgtggggaccacggaccaggttcattcacaggtaatgatggagccctcctacgtaccagctctgagctgagcatgggggcacgcggtggtgcatgggccacttggatcctgcccttgaccattgtggttaaatagaagagtaacaggcagcatttcccacccactacctctgggtcaggtcctgggctaatcacttcatctgcgtcatctcatcctttccataacaaaatcaaagatgcagaggcgtttttcctgtctccattttgcagctttggagactgctagactcttgagaggtccagtcacttgcccaaagccaggcagtctggaggcagcagagctgggattctagcccaggccgaccgtagccaccaggaggagtaattcgctaataaatacttggaaagaatcgagcacagaacctgacacagctccagactcagaactggtggtgtttactccatgcatagagtgtccccattccacaggtggggcgactgaggacagggagagaaagcctggggcaaaaagctccagggaacttaaacagtaacaccaacagcagttccagagtcaccagggctggccagagtgagacaggcagacttggtttcaaaccccaaaccccaactctggatgagcttggcaagtgatttatttagattctccgtgcctcagtttcaaggtttcctcttctgtaaaataaaaatattcccaactggccaggcatggtggctcacacctataatcccagcattttgggaggccaaggcgggcagatcacttgaggtcaggagttcaaaaccagcctggtcaacatggtgaaacctcatctctactaaaaatacaaaaattagctgggcctggtggcacgtgcctgtcatcccagctacttgggaaactgaggcaggagaattgcttgaaccagggaggtagaggttgcactgagttaagatagtaccactgcactctagcctaggcggcagagcaagaatccatctcaaaaaaaaattaaaaaaaaaagatttcctgacttcacagggttgtcgtgaaaatcaagttatataatacatttaaagcacttagcaggctgggcacggtggctcatgcctgtaatctgagcactttgggaggccaaggcaggtggatcacctgaggtcaggaattggagaccagcctgaccaacatggtgaaaccccatctctactaaaaatacaaaaatcaactgggcatggtggcgggtaatcccagatacttgggaggctgaggcaggagaatcgcttgaacccaggaggcagaggctgcagtgagctgagatcgagccattgcactccagcctgggcgacacagtgagactccatcgcccaccgcaaaaaaaagcacttagcagatgcctggtacacagcaaacggttaatgatagctatgattattattctgaataaggttaacatttatccctttgagcctcctgctgggttcacctgaggacaaggctctgtggagtggggcgggggttaggagttgttgaggggggtggggatagcaaaacttggtcttcttggggtccctagaagtcccgagatgggctagttctgtgggtcagggggaagcagaaggtatcagggctgagagagggaaggggctgcctgggcccagaggagttaacagctcccaggacctggctcaacagggctgccacgctgcagccacagcaacgattttagcggaggagccaggactgcttcctgatgggcaaaacagctggctgcccagagaaaacagctggcctggtcccagcctcctgagaacagaggcagagcctcagaggaggacagctgcacatctgggatcctgggagaggagggcatggccaaaagggagagagagggtggtccgtggaagtgtgtgtgggtgttgggtggacccccagaatggggggagctgagggcagattcctcgagcagagaccagggtgcgctaagtctaagcagaatgggcagagatgcctccagctgggctttgagggtgtcagtcttccctcaaataggaaagatgaggggcaggggaggatattggggacaagcctctgctcagccctgggtcctcttggaaccgggcttggagccggaggtggggagggtgtccaagctgagctcctggattcccatctgccgaactgcacccagaaccaggagtggggtgcgggcccatcctctggccaggatcctgggctcccttggccacaaagcaggacaggggaccagagatcccccaactcaggagacgtgaagctggcagctggtaagagcatgcaagcatcctctctgctttgggtccccatttcaagcctgtttgactgccaggccatgaggactcccaatccgggggccctacctgggccctggggcacccccaggctgcccctacccattggcaaggaagcagctcctgggacctcaaatgaggtggggcagggtacgcagagggttaatgggggtgtggccagagtccactggaccagagcagcctacccgggttcctgacccccaactcccagtggcctgatacccctagtttctctttgacccaaaggggctcttgtagcccacctccctaacatctaggagtaggggttggcccccagtttgagtctgccagcctcagctcccctctccctggtggagccatgctacaaagtctttgccaggggcaggcaggccttggaactgaggctcccagcgggacgaaggcgctggggagggggacggttcttgcagggtctctactccaggaagccagagtcaagcctgaggcgctggcgccatcacctggatttggtcagaactacaatggctgaagtgggtgaggatgctgcaggcagaaaccggcagccccaccaggtgtcaaccccataggatccggatcgtgctcagccagatgggtccgagcaatcatttttttccaggcatgacccagctaatgaggtcttaggctccacaggacagcacttttttttttttttttttttttgagacggaattttgctcttgttgcccaggctggagtgcaatggcgagatctcggcatacagcaacctctgtctcccagg

SEQ ID NO: 12218 - DNA, 6000 bp, Homo sapiens
agggcaagtcccacatggtggcgaggacctgagcccggtggtagagggacaggcctgctgggtttgttcttactctactctgccccttaatagcagggggatgttggcaggtgatgtcaccttcctgagccttagcacccccatctctgggatggggctatagaggcctggcctcttgggcatcaaggatgaccctaggagggcctgcaggggaggcctgcctggtgcctggcacacttccaggccctcagcactggctgtggccatcatcacccttgctgagtgccccattccacctgcctcacatggggtcctgctctgccttcctcctgtcctccccatccagcatagcctagaaagattggggctggggagtgtttggcatttgcagagaggtgctgttcttttttttttttttttttgagtcggcacctcgctctgtcacccaggctggagtgcagtggcgtgatctcggctcactgcaagctccacttcccgggttcacgccattctcctgcctcagccttccaagcagctgggactacaggcgcctgccactatgcccggctaatttttttgtatttttagtagagacggagtttcaccttgttagccaggatggtctcgatctcctgacctcgtgatccgcccgccttggcctcccaaagtgctgggattacaggcgtgagcctctgtgcctggcccgagaagtgctgttcttaaagagttcctacctaggccgggcacggtggctcacgcctgtaatcccagaactttgggaggccaaggcaggtggattggttgaggccaggaattcaagaccagcccggccaacatggcaaaacaccgtctctactaaaaatacaaaaattagctggatgtggtggcgggcgtctgtaatcccagccacttgggagattgaaacatgagaatcacttaaacccaggaggcagaggttgcagtgagtcaggatcatgccactgcaccccagcctgggtgacagagtgagactgtctcaaaaagggaaaaaaaaaaagtttgttactattctggttattaacattatcagtaatcaaagaaaggtggcccatcatctgggcacccctgttcctctcctaagagagacagacacatttgacacaggcatttaaaacttggtttagataaaaatctaggttctgggttacagtgtaaagtaaaaattgaatgtaaagtaaaagcacaatttggccaggcatggtgactcacacctataatcccagcactgtgggaggccgtggcaggtggatcacctcaggtcaggagttcgagaccagcctggccaacgtggcgaaattccgtttctactaaaaatacaaaaattagctgggcgtggtagcgtgtgcctgtaatccagctgcttgggaggcagaggcaggagaatcatgtgaacccaggaggcggaggctgtggtgagctgagattgtgccactgcactccagcctgggtgacagagcaatactctgtctctaaataaataaataaataaaagcacaatttattctaatacacagaaagggctgggtgcagtgcctcactcctgtaatgccaacactttgggaggctaaggccagaggattgcttgaggccaggagtttgaaaccaacttggccaacatagtgagatcctgtctctacaaaaaattttaaaaattagccgggcatgggccaggtatggtggttcacacctgtaatcccagtactttgggaggccaaggcgggcggatcacaaggtcaggagaacgagaccatcctggctaacacggtgaaaccccgtctctactaaaaatacaaaaaaaaattagccgggtgtggtgggcgggtgcctgtagtcccagctacttggaaggctgaggcaggagaatggcgtgaatctgggaggcggagcttgcagtgagccaagatcgcaccactgcactccagcctaggcaacagagcgagactccgtctcaaaaaaaaaaaaaaaaaaaaaaaaaattagccaggcatggtggcacacacctgtagccccagctacctgggggaggctaaggtaggaggattgcttgaccaggaggttgaggctgcagtgagccatgatcacgccaccgcactctagtttgggcaacagagcaagatccaatctcttacaagaaaaattataaaattataaaatacacagaaaggactggaaggttattattcagtgaaaagttaacagtgtgtaaccctggtggggattgtaaagcggattcttctttttttgctgctacgcttttttacaattttccgtatgttctccagggaacatctagtaccttatccctccgtgacagccatacgtctttcattgtaagagcaaccagccttggccgtgtgaccacgaatggccacagagaggcattctcacagagatcttgctgcgtgcctcctgtgtagcacagtctgggtttcctaatgtggcttctcagccagtgtttcccaagcttggccaatcattagagtcaccaaagttatgtgttaaaaatcaggttcccagccaggcacggtggctcactcctgtaatcccagcactttgggaggctgagacgggcagatcaggaggtaaagggatcgagaccatcctggtcaacatcgtgaaaccttgtctctactaaaaaacacaaaaattacctgggcatggtggtgcaggcctgtagtcccagctactcgggaggctgaggcaggagaatcacttgaaccctggaggcagaggttgcagtgagccgaaatgatgccactgcactccagcctggcgacagagcaagactccgtctcaaaaaaaaaagaaaaatcagatttccagcttctcgccatagtagtcaaactagactctctctgggagagcctgctgttgctgctgtttttaattcctttatacacacgcaaccagagatgattttacattaaggcctctctgtgatcacccagtttgtgagggaggagagccttattcttaatcccctctcttgaggccgctcccctaggagcctgtcattaagacccactatgtgacctttggtcttccgagtgttcccagaatcttgtacacacataactatacacacatgtggaattttgttgttgaagcagggtctctgtcacccaggctggagtacagcgacggggtcatagctcactgcagcttcaacctcctggactcaagcgatcctcccacttcatcctcccaaaatgctgggattacaggctaggattacaggcgtgagccaccatgccagcccccatgtggaatttttttttttttttttttttttgagttggagtttcactcttgtcgcccaggctggagtgcaatggcacaatctcagctcactgcaacctccacctcccgggttcaagtgattctcctgtctcagcctcccgaatagctgggattacaggcacccgccactacgccaggctaatttttgtatttttagtagagaccgagtttcaccatgttggccaggctggtcttgaacttctgacttcaggtgatccacccacctcggcctcccaaagtgctgggattacagacgtgaaccacgtggaatttttaaaccttgctctttgttttatggaagtgagttcatgttgtgccccctctgcatgttgctttctttcctcatattttgcgggaatccctccagccctttgctgcagctttacagcagctggttcccagtgaactgggagttttaaatgtgtccctctggtcaatctgttcattaaataggtggactttagaaaggagttcccgattgctcttactggaatgcaagggatggagcagagaaccctgaggctgcactggggatctgtctaatctcactgtgctcagtcttcctgtgtattaaatggggagcctgcctgcctcccccagggtggtttcccagccaagtggccacatgctttctgcagaagggctgataagtgggctgccccgtggagtaggcaggctttggctcccagctagatttgaggtggaattttggacaatggaagaattttcattgtcttcttcccctgacccctggtcctaggaaagccaggccaccctgtgctaacccccctcctatggctcccttttaggttgaaccatgattccggtgacagagctccgctactttgcggacacgcagccagcataccggatcctgaagccgtggtgggatgtgttcacagactacatctctatcgtcatgctgatgattgccgtcttcggggggacgctgcaggtcacccaagacaagatgatctgcctgccttgtaagtgggtcaccaaggactcctgcaatgattcgttccggggctgggcagcccctggcccggagcccacctaccccaactccaccattctgccgacccctgacacgggccccacaggcatcaagtatgacctggaccggcaccagtacaactacgtggacgctgtgtgctatgagaaccgactgcactggtttgccaagtacttcccctacctggtgcttctgcacacgctcatcttcctggcctgcagcaacttctggttcaaattcccgcgcaccagctcgaagctggagcactttgtgtctatcctgctgaagtgcttcgactcgccctggaccacgagggccctgtcggagacagtggtggaggagagcgaccccaagccggccttcagcaagatgaatgggtccatggacaaaaagtcatcgaccgtcagtgaggacgtggaggccaccgtgcccatgctgcagcggaccaagtcacggatcgagcagggtatcgtggaccgctcagagacgggcgtgctggacaagaaggagggggagcaagccaaggcgctgtttgagaaggtgaagaagttccggacccatgtggaggagggggacattgtgtaccgcctctacatgcggcagaccatcatcaaggtgatcaagttcatcctcatcatctgctacaccgtctactacgtgcacaacatcaagttcgacgtggactgcaccgtggacattgagagcctgacgggctaccgcacctaccgctgtgcccaccccctggccacactcttcaagatcctggcgtccttctacatcagcctagtcatcttctacggcctcatctgcatgtatacactgtggtggatgctacggcgctccctcaagaagtactcgtttgagtcgatccgtgaggagagcagctacagcgacatccccgacgtcaagaacgacttcgccttcatgctgcacctcattgaccaatacgacccgctctactccaagcgcttcgccgtcttcctgtcggaggtgagtgagaacaagctgcggcagctgaacctcaacaacgagtggacgctggacaagctccggcagcggctcaccaagaacgcgcaggacaagctggagctgcacctgttcatgctcagtggcatccctgacactgtgtttgacctggtggagctggaggtcctcaagctggagctgatccccgacgtgaccatcccgcccagcattgcccagctcacgggcctcaaggagctgtggctctaccacacagcggccaagattgaagcgcccgcgctggccttcctgcgtgagaacctgcgggcgctgcacatcaagttcaccgacatcaaggagatcccgctgtggatctatagcctgaagacactggaggagctgcacctgacgggcaacctgagcgcggagaacaaccgctacatcgtcatcgacgggctgcgggagctcaaacgcctcaaggtgctgcggctcaagagcaacctaagcaagctgccacaggtggtcacagatgtgggcgtgcacctgcagaagctgtccatcaacaatgagggcaccaagctcatcgtcctcaacagcctcaagaagatggcgaacctgactgagctggagctgatccgctgtgacctggagcgcatcccccactccatcttcagcctccacaa

SEQ ID NO: 12219 - DNA, 6000 bp, Homo sapiens
gaggccaagtccaggctccacagggcaggccccatcagtaatgcccgggagcctcctgtgcagaggccgggtgtcgtctggatgcaaagaactttgtttggaatctggcagcaccaaatccttggctgtaagcaaatggtgccacctggggcattttccacattcccagctggaccctgggattgactctttgatgtttctcatcatgatgtcacctttgaattcatgtcaggatcaatgactgattccacagaaaccgggctgcctttcccaattagttacggtgagtttcctcacctgggaagtaggaaatgattatgtttgtggggtccctgaaaaacgtgcattcagcccagagggtgacgtgtctgctgaattgtcttgtccctgttcttcaaagtaccactcccagaattggcctcttttccattcggcaactaagggaatacagagctgtggcttcccttggcctggctgtggccaggctgagacgatatccatgaaagaggcgtggaacctgccagggagagtgcggagggtgcatgaagggtctggggggatgggggccgtggacaagtcagctctctggatggacaaggaactaggactgaagagctggacacgaggccaactgctgaatggaggaaacgtcccccagcaacagccatgggtctgtgggatgctctccccagggcaagtagctccccatcactgtcactgggggacttgaagagctgacactgagggaaagggggaaggacgatacctcggaggaagttgaatctcctgggtcggcagctcaggccagccgtgctcacaaaccccaagcacagtggctcatgatggcaacggtgtgcatagggcacaggctgcctgggggcacctctggctcacatgtcctgtcattcgagggccctgggcaagggaggggccctctctggatctgttttcctcatgacagaggcagagagacagggtgtgactgagacatttggctctgaaagctgctcagtcgtggcccttagccgttctccctcccggggccaaaatcgcaggtcacacagccacgcctgatgcaggtggtgtttgggagactgtcagcttatgggaggtgctgccaggcacagggagccgggccaggatggaaatcctctccagggaagggggtgaggagcagttacgcctccacccatgtgtgaacccagaggcctcagaggaggggagtacagggaacacttggctcagaagacccatgctggtcttctgtggctgccgagagggagtgcccaggggacctgtggctcctcccattctgcctggcttgaggccaggtcctttccttgctcctggaatgttccagcacagaaagggaatgaaaaagctacatacaacgtagaaaaaggagaggtggctccatgtgggacctctctctgtgtctcttctctctctgtgtcactctatctttcttctctctctctcttctctctctgtctctcatctctctctctgtctctcctctctccgtctcttctctctctcctctctgtctctattatctctcctctctgtctctcttctgtctctcctctctgtctctattatctctcctctctgtctctcttctctctgtctctcctctctctgtttctcctctcttctctctcctctctctctgtctctctctccatttctttgtcttcctctctgtctcctctctgtttctttgtctttctgtctctctgcctttgtctctctctctctctcttcttctccccttctccctccctttcttcctcccctccccttgtttcccttcaagatatttgccaatagcctgaggagagtatgcgtatttttaaacagcaaccgggcatccaaactttgtcccttgagggcatcctttgccaaggagcatcgggaagtggcccagagacctgcttccctccaagcagccactcctggctctgggacctgagtaggtttgcatcctgcggacctcactgttctgactgtgggtgtcagtggtcgtctgactgtgggtgttggtgtcgtctgtgccctatcagctcaccatgtggctgtcctagggcttctcgaggtgattccccaatagcccacgtgtgtccgcctcttgtaaggtctatagcaagctgggcaggagcaccctctcacacttgcgtcttctgagctctgaagccgggagatgcagagggggtgtgcttgtttttatgtgtgttgatgaatttgtacagagtccaccaaggtcaaggcctgtagggggctggcatgaggatagagacgtggctgttctaacctgtcatgacagggagggtggtgcaggctcgtgccaggactcagaaaggggtgggcaacctcctgtccttcccacgagcgtggaaggcaagggcccatgaaatgtcttctggcggcctctgtggctcgtggaactgtgcggacagccagggctgctgtggccatgcaactcatgccacttctggggctcgtgagatttaactatggccatgacatttataagacgaggatgccaccatgtgtatgggcttagccctggaaataggctgtcaccatatgaccttggacaggtcttatcatctttctaggcctgagattcctcatctatacagtggagtcaatgccaccacaccatgcacttcagtaaggattgggtgccaggcatggcaaagccccagtgccaccaggggcgcagcacctgccccatcagcatccgtatgattgttcagagctgcaggtgtgatgagccctggctttaagagaagtcgtgaagaaattgggattgaaagtcctctttaggaacacttggtattgcctggcgccatggatcccctaatccaaatgccttcattcttcaacgatccatactttccttctggaatgctccatggccttctaaatccaattacacttactcaagccttatctgacgaccctttcaaaaccattatgcccactgaatcacagattttagaaactggacaggacagtttggagcaggtgcaggttggagccgctcaggtgcaggttggagccgctcaggtgcaggttagagcagtccaagtgcaggttaatcttttacttcgttaaataaataaatgtctatggcttctgagatggcctgacagttttgtggattggattgggttgcatttgaatttgttcccgcagaacaagtggtccttgtccttccgcagcgggaagcggcgtgagtgatctggacagacacggcttgtggccttgaatcggtgttaaacatgcatggccagaggaggggggcgaagccagcccaaccggacttgtgtctccgcctgggcccagtctgtgagccgggcctgcagtcccagcttacactgggagatggcgcccttccccaacagttggaatttcctggcatccgacccagcccggctgcctgagattacagcattaatcagaaaagcagatctgaggggctcatttaactagcgggtctcacacccagcactcaggccaggatcatcttggctgcagctgaagtctcttcagccgaggactgcgcacacagagagaaaagccccaggaaggcgttgttcctctcaggcgggcgccagggaggcgcgctccttccggcccggcgtccgtctttcaaatcccatccaggaagggagattaattttcgcccaggcagagaagagtgtagtgagtgatctggaggattctttccttcccaaatggctgggaaagcttaatggaaggccccggaggaagtggctttcatctccgattagaagccttctgtaaatgcaaaagccctattaacgtgtttgacccagtcaggcctgcgcttcaggtgggactgacacgcgtgagtcctgctgcggtcgccgcagagggccgggaagaggggcagcgtgcgccacttgccctgcctctgtgcctgggcgccatgactcgagcgccacccctgagtcagtaaggacaccccccaacccacacccctccaccacagaccccagtccccgccccacacacccacctccccaacaccaggttcatgggcgtggtcccttcagctcctgaggtccaggcctgagccccagaccttatgcagctcctgccgggtgtgcgccctcccagggccctcactgcgcaccgcgggccacggcagaccaccccagcccccgccttgctgtgcaggtgtcaggagtgccggttggctcccttcctcccaagcaaggccttagggcaccgcggctgccctgggatcgcaggggcgcctttagctctccaccgatgccccgacgcccccctggcgctggaggccctcgcgagtctggctgcttttcggagcctgccctgcctgctgggtttcaggcgacggcccaggctggctgggaccctcgaatcaccgcggaaaagggctccagtaggcaggacggcgccgtctctctgccggcaacctttgccccaaagcggaccctctgcggggatcggagagggatgccccggcgtgaggatgggagaagccccgggacgggagggccgcgggccgtgcccccagctggagtccccgcgccgccgccgggtattttatgatctgggggtggtggtgtgtccgtctcctcatgtcaccctgatcccaactcctgggcggactggagtttgcagacctcgctgccagcagccagggggcggcggggagccgagcgagaggaaaaatccacccatttcctgggcggattgcgtcggtcccgcccggccgagccccgcctcccggccgcggcccccgcgcgcagcccgcgcagcgctcagagccggacggcgcttcccggtggcggcggaggagcccggagggacgcagccgggcaaggcagggcgcagggcgggcggcgcgaggcgcagggcgcggcgggcagaggccacctggccaccttccctggcgcccggggaaggcgcggcgatggccggggcgcgcggggcggcggcggcggcgggcgggcggcggcgggccgagggggcgcggggacacagccaggcgcccctgcccgccgcggtgcccgccgcctgaaggccgcctgggcgcgggagccggtgccagctcggagcgggcgctggaggcagctcgaggcgcgatgtcggtgccgctgctcaagatcggggtcgtgctgagcaccatggccatgatcactaactggatgtcccagacgctgccctcgctggtgggcctcaacaccaccaagctctcggcggccggcggcgggacgctggaccgcagcaccggcgtaagtgcgcccgccggccgccttggcgcggctcctcctcctcctcctcctccccctcctcggtccggagccccgggctgggcgggcgccgcgcgggacccgagtcgcccagggaggcggcggggagcagggcgggcaagggcaggcgtcgcgggccggcgcagcggtggcgaccctgctccccgctcccccagcctgggccactccatctccgcccgcgcgcccctggggcggcgtttccttcgtctgggcccctcgccgcggggccgggggagcttggtgggttctcggaggcttggagtcctgggtcagtaatcatgagccccccattgaaaaggttaggaaactaaggctggggacttggggacttgtccaaggtcacactcagcgagtgaggggtggagccgccgctagaccctagtctgggctcggtccagcggggactgagcccgccctagtttgtaaaagccagactggccggaccgggctgggagtggggccccagccggtgggctccggagctcctgcccgcgcctgcattcccaaagtcccaaggcgccctttcctccccagtccataggagggtttgttccttctcctccgaggacggtgccgaggggcttgggtggggcccctgggagcctgcccttgggcgctcaccccctcgcctttgccttcgtcttctgcgcgcacccctccctcc

SEQ ID NO: 12220 - DNA, 6000 bp, Homo sapiens
agttgggtgaagtctttttttttgtttgttttagacggagtttcactcttgttgcccaggctggagtgaagtggcgtgaccttggctcactgcaacctccaggccagcctcagcctccctagtagctgggactacaggcacccactaccacgcctggctaattctttgtatttttagtagagatggggtttgaccgtgttagccaggatggtctcgatctcctgacctcgtgatccacccacctcggcctcccaaagtgctgggattataggtgtgagccaccgcgccgggccggttgctggcatcttaatgttctgtaggtggaatatttccaataaacacaaggtgccgtaattgactgctactctggcaagtgcagtttttgggcagtgcacgggtgttgggaacaaggatcaggtgttcacagctgtgtcccagggctggagctcactgggggcccccttagggacaggagttcacacatgaaggccaagactacttggggtgccaaggaatccccccgcggtcccatcccactcttcaccagggtctcaggagggcctgagacaacctgcggtcaggaacctcggggcgctctccagggcaggcttctgcatgctcagctctgacagcctggagactcgctctcctgcacctgcatccttgagatgccaaggtttccctgctaaccacgtgaggatgcttggggtactccagggactgacaagagtgagtggtgtcaacctaaagagaaactcaggctctccagaataaatgaatttaatcaagaataacacataattgcaatgcagagtatgcaagcctcagtgggtcacaggcatgtggtgggggggtggggtggggattgaggaaagggggaattttttttttttgagactggatctcactctgttgcccaggctggagtgcagtggtgcaatcatggctcactgcagcctcgacctcctggggcttaggtggtcttcccacctcagcctccagagtagctgggaccacaggtgcacaccaccacactggactcatttttttattttttgtagagacaggggtttcaccatgttgcccaggttggactcctgagctcaggggatctgcccaccttggcctccaaaagtgctgggattactacaggcatgagtcactgtgccccgcccacgggaaatttcttttttttttttttttttttttttgagacagagtcttgctctgttgcccaggctggagtgcagtggtgccatctcggctcactgcaacctccacctcctgggttcaaggaattctcctgcctaagcctcccgtgtagctgggactacaggtgcctgccaccaaccatgccctgctaatttttttgtgttttttgtagagacgggtgtctcaccatgttggccaggctagtcttgaactcctgacctcaagtgatccacctgcctcggcctcccaaagtcctgggattacagaagccaccgcgcctggccccaaggggaatcttttaaaaaagagaagttcccataaactgctttgaaaccataaagaccaaaggttagaagggtttgccgcaggcgctccgttgctaatgtttttgtgagggcttcttcagggcctcttgttagagtgtgacataaacgacttcatttgggtaccagcaagtgtcacagggggcagagaccagcagaaacctaaagatgacccctagaagagcaggaggccaggggaacagagttagacgagccacgtgctaagcaggacgtcgctgccgggggagctctccagacacgcagaaatgccacagtcaggaccgtgggacgcagcggattcgcccaagggcaggagcagcctggccaggagagaatgaaggaggggccgggcgtgaggttcggctggggagaacccaggcagggagggcctcgggcggccacggacgccgctttgccattttgggcgtttctggggaggacaacgcgtgcaggaagcgcagtcatctcaagctgacctccaaggttaccgagttcgagggctgggagccgggtctgaaagccccgacccgcctatggcgcggggactgtgggtccagccggccgattggccgcctcgctcggcgccggtccaggcgcagcgctcgggccccggggaccgtgagatgcggcgcagccagcttagctcggggtagcagccaccccagcccgggtgccgcccggcctggtccgcgacttcgggagggtccggtccttcccccggcccccacgcctgggtgaggccctgggcttcttgccggtgaccacgcggccagggtgggcaccagcccaggacggcgcccaagggcagcccagctccatccccgcgccgcgggttccggaaccgaggcgcgggacgctgggactctctgccaacatggcggccccgcccgggcgcctccccgggtccctagtgtctgcgtctcccgtgagggcgtgggcaaagtcggtgcagccagacgacaggaggcgagagaagcccagctccaggcccatgaggcgaaccacgtgggagccccagacagcgaccacgccccaggcgaaccaaggcccgccccgttgctacagctacgctcgtagcacacctgggcaggcgctgccggacgcatgcgcaatgaacctgagggcagggcggagtcgcagcagttgtctgacgcagtcgccgtaggacgcagccccgtacgctggagcgcagcggagacaggcgcgggcgcactggccgcatagagacgcagcgcacgcgcagtcgcgtatccgtgtgatgggcgggctgttgacggcgctgcgatggctgcctgcgagggcaggagaagcggagctctcggttcctctcagtcggacttcctgacgccgccagtgggcggggccccttgggccgtcgccaccactgtagtcatgtacccaccgccgccgccgccgcctcatcgggacttcatctcggtgacgctgagctttggcgagaactatgacaacagcaagagttggcggcggcgctcgtgctggagggtgagggtcgcgccgggctgactggggcccggggctgccgtgcccgccgccctcccagactgcggctccgagcgggacctgggcgggcggactcgactccccaggcgccgccctctccaccccttccccgcaaaaaggggcaaatgtgcgttcctggttggggcagccgtgggcggctcgcctgcagcggtctcagcggcccaaattctgcggggcggtggtgggaagagggctcagagccccagcaggttttctgggcttcgttcgcttttctgcaaggtcctggcccaggcgcctgcccctcttggagcggaaaccggaggttccccgtggtgtatgctcccctcggtacagtgagaaatgagcccctcttgattggctcctggtctgttcgtggtggtctcaggccgaagggcattgataaccacatgcggactgtgcatcgcctgggcggtgcctgggctacatctgtgggagtcgcaggagtctttctccactgttgatgaaatgtgacagaaatgtttctgcttttttcttatcctcgtctcatctgcaccactgtattaacgacatctgtagtattgtcccagcaatgttcctactccctgctgagagggaacttctccccattcaaaataaatagagctggccgggcacggtggctcatcccgcgttccacccactacactccagcctaggtgtaacagaatgagaccctgtttccaaaaaaaaaaagaaatagagctgaacactggatcttccagaagaattccttattgtcctcacagtttgtgacagttgagacgttccgtgtgatatattcagtaagaaatgtcattctctgtacctcccttagaaatggaagcaactgtcgagattgcagcggaatatgattctcttcctccttgcctttctgcttttctgtggactcctcttctacatcaacttggctgaccattggaaaggtatcagaaacacgtgtacttgaaaacgatatctgtgttgagggttgattgggcagaagcaatcttgcattctaccttaaacagctccaggaggcatatatggcaacgaattggcaagaaatcaagataaagagaaaggtagagctgtatgtaaccacctggctagaacacagatgttaatttgatgctgtctgactactttctaggtctctggtgtaagtactgatatgtccagcctcccttatagagtaagtcagctggtgggcttgaacactcagcctaaataaccacacaaatttcgtagcactcattagcgtgtgtttggaaaagaccaggcagagttctggtgaggatgtggagaatctcttctcacttggtctaagatgcttctctttggagcaaagctaaagggctcctgcccacctgccacatgctgaacgtccctgaatggaaaataggaaggcaaaagatgtggggttctgtgttatggacaaggacacaaactgccaagtgttttgaaaaagatttcattcccttgggacattgttgaattcatttcagtgactatcaggtatcataatgttgatttgtaatggatagtgcctgccaagtgtttttataaagcagtttaaatctcttgtaggccttgtggcatatttgaaataaaatagcttctgttattcagctctggctttcaggctagaggaagagcagaagatgaggccagaaattgctgggttaaaaccagcaaatccacccgtcttaccagctcctcagaaggcggacaccgaccctgagaacttacctgagatttcgtcacaggtactttgagcaaatggtgtggggttataactggggttcaatccagaggcatttcaaaccactgaagattgagaagaattattttcctttaccatttattaccacgtgtttacctctctctcgttttggactggtcggataatacttggggaaagagaggcgtagtctttgcttcattctttttgaagaccagccatggccagttccggttttacttctgactgtgcagtgttgaataagacagacctgtttcctctcaagaggccacagctggtaggagaggctggtgagaagccaggcacagatgggcagaggcagatggcacatggtgtacatcctatgtggaaaagagcagggcgctggtgaagaacagtggctggtcctgagggttcaggggaggccgtggcactgagggcaagatctgagggctgagaagctgctggcaccgggcaaggtggggagaggcagacttgagcctgagtgaaactgcctgaggcaaggaggaccttggcatatgcgggaaggtgaaattcccagggctgggagagggagcaggggttggctcagtccagctgtggtcctgcaggtcctggaggcagcatggagggtccagttgatgtatgcgggaagattttggcgtggactggaggtctgagatgtttactgtgaaactgctctggctgggtggagacacagtggagggcaggaggccaggagagctgcctggccgtgggaaaagctgagtggggggaggagtgctccgcaggagtgggccttgggagaaggagggtgagtccccgggtggaggggccagcaaaggctgtgcaggctctggcttggggacactgaggagctccgttttggatctgcccactgtgagatgtctgggaggcgccatggagaccttggtgggcaggtggtgccaggatcagagtctgccaggggagacaggttttaggagtccctaggtataggtggtttgtgtcctctggaaacgttggaagaaggggccaggcctagtcctgggcaccaccaggctgagaagattggggtcagggaggagggcagggggagtggagactggggatgggtcaggaggcagctggagaaccaggaaaacgtcctgtcagtgaaggtttggttcaggaagaacagccaaatccccgacaccgttg

SEQ ID NO: 12221 - DNA, 6000 bp, Homo sapiens
agatgattcctgtccacactggtgagtatgatcttcttaactcagtctactgattcaaatactactgtcttccaaatatacctttgcagacttacccagaaataatgcttctctatttatctgggcatctcttagtccactgaagttgacacatgaactttaccatcacagctgtaccatcaaacattttcttgtggtatgttacagttattttcattttgagtaataataatgttttggcacttctctacacattagacaatatatttgttaaacctaggacaattgaataaaaattatatctttgaatactatgaatttaaaaaacagaaatggatgattcagagtatcaggaggaaatggaaggcacaatcaggaatcattttaaagagaatttcgataagggatactttctagaagggtagctgtgttatgggatcccatgagggatactggctattttaattgctagccatagtggaaagctgaaggagcaacagatacaatggggatattgggggaaaatatgaggtagagctatggaaaggtggtgacaagaaaagactgtgtagccactgccagaaagaaccacagtgccaagttatgctgcaaatgggggaaacatggccctgctttttctctcctcctgcccctttctggtgcctctcattgacaaaacccaaacagaaaccaggggacaagggaaaccaggttagtacaatacctaaagattaatccatagagcacagaaaagagcacatgaggggtctgaggttgggattaaatagaggggcagggatagaaagctaccagcacaataagtgagaaaataaatgtgtacattatgtcaaaacctgaagcctttagattgtgtgtaatttagcattagctacatcatgatttcagtggaatgacatctataccttgtacctacaaccatctcaaatatgacttcattaagactccttaaattggataattatatagacaactcattgaataattatatagtcaactcactttttccattgtgttgtaaggtttcctgagcagctttcttggtatccaaccatctataagaaattgggtaaattatacccatttagtcaattgaaattgtacttccattgactaaataaaagttaaagagcaggagattatcttttcccacatgaaataagtatgagcagtttgattcattaagtacatggttttctgcatgattttatgttatcaatataaaattgtttctacttgtagtttctgccaagtggcataactttagaacgaaaagtggagaaaagggagaataaattaagtgaacaccattactgcagactgaggcaaagcaaacaaacaaacaatagtcaaagtgtgagagtctactgctgacaaatccaacctacctacagattgggcttcgaacacctcctagatccttgtctcctttccaacaggttacttgctctccctggcttccttattacccttttatctctttattccattccacactatggaattatctctttattcaattccacaatatggaattatctctttattcaattccacaatatggagtgctgtataattaggaaatttcctcatgatgctctcaaaacatttaaataacatactagaacaggaaattattgctgtgtagttgctatttatgtattgcaaattctaatttaaaaactgagtcaggaaggaaattacttatttccctcaaaaatccaaaatacaaatgtaaattttgagatttcttctccttacagcaggctgttaaaattaattataagcctatatataacaaagctaaatgtagatttgataaataaagaaatgtgttaaaataaagggaacctcaaagcaactgatattcaggaccatgctttgttggcccaatttcactgtccctttttggttatttttatcttacatttgttatggttgttttaaacacgtggtccactgacaacaaccaattcagataggttactgatttttaagagtaaatatatggcaataacttaaagcggacatttgcatctgcctttttattgaagaaggagaaataaattataatgttacaggaagtgtagctaggtagttagataataaaattttcttaactccttaagcttggtgcaatcaccttcaagtaagatatctcaatccaattctcagatgtaattaataataaaatctctacaataagctaatccattgaacatttgtgatattattatgtggggaggaggtaggaggaaggggattgagtataacactgattcttccattgtttaaaatattctttgttttccagaggacaccaaaggatagttgtacaggagcaagagtaaatcagccccagggagcactgtctctgtgagatcccagcctggagctgaagtagagaagagtttcaagttgctgaacacccccatgcagcagtaaaaagatataagatatcgacacgctcagctgcatcttgttaaaagcttcctgcgggttggcagaatgaaatctttacttaaaacacacaaactattgtcaagggaaagatggaaaagagaatacagtaaaagggccaaatgctttgcttaacccaccagaagcagtagaaagggagaggtggtcacgttgtctttgcaacaacaacaacagaaaaggtgactaacacaaccacatcagcctccatctgctcttcccatggtttcaagatgcattatttcttttattattaattacttgtgtttctgagggaggacaaatatattattgtgactagcaagagaggaaatcatttctgcttctacttggcattaagtacagtagtgtatgtaatgactgagggatggcaggaaacagagcggcatcattgagaccagcctccctcctaccaatccactccaactcgcccttggtagtcagaggctgcctaacagaaagttcatgtaaaaccattattgaacactgacaggaaggaactgagacaggagtgagtggtgtgtatttgtgcagaaagggagaaggagggagggagagagagagaatatgagtcagtcatcatcatcttggggagacagcaccgtaagaggggcaagtgctttgtataattacaaaaatatgtacacatgcacacacacttgcacatatggtgtaattttttttcgttcatatcttgtcatttccaagaacctttttaagtgatgatgactgtttgtgcatgggaaccttcttggatgggtaggctccgtggctttagggaggctgagcagggaacccggcagcgcgtgggttcaggagaagggtcccttttaaagagcaaagggacacagcaagcagtggagaaggtatgaaaagaaaaaggtgaagggaccctggggaaaattccacctatagtgactaagctttatttctcttcgggagaaagtgacatttctgcgattagatcattgacatataaggaaagtagatggataactggtttttcgttgttctttttttatttgttttcttctacagtgcttacagaacctttgaccagatggtacctggaatgctctgtgttgcatattacaaacaggataattattttggctttttagaaaacgcaccgacatggtgacattgctctctgtttatcaagagacagagcatttgttgcctatagctgtatgctctgatgagacatgaaagatagtaaaatgacaaaaagcttcctgctgtttttctctcatcctgccccttcttctccccccagctccaaaccttatttctagtttcgctgggggtctaagttcctcctcccctgtctcccgagtctgtggtacaccacatctgatgcactccgataccccactctaccttggggtaaggaggaggtggggaagaatccgctccctgcatccatgtcctctcctctgcagcgaggcatattctcagcaactcttgtacaggttttcccttctcagctaccaccttggcagagctctatccctccctcaagcccagccagactgccaagcgccccgactgaaaactccatccagctcagccgaagtacaccccctccgccaagcaacccctgtgcccctgcccttcacctccctaagtctgctcttcataagcatcgattccattgcaaatcaaatgtacgtcccccagctattaacacccactaccccttaggtgttaccgacagcctccctcggaaaataataataataataataaccgaaagcacgcgaacacctgaagaagcacagatcgggatccgcatctggaccagtcctctgtggctatagtgatggggaatagcctgtgcctgacatatcctcctgttcccgcgcgaaccgctttaccctggatccctggaatcgtgcctaggcacccgggcggcggggtccgcccaggccgcgtcaggcagctctgggccggtgggtgccgggtctcccctcctcccgccccatctggcgcgcccgcagcgccgccgccgccgccgcttctctccccagcgggcgctcggagcatcccgcgccgcgttctccccgccccggcccccgcccgccggagcggggcccacgccgctggcagccatcaagtggctcgttaaggaaatgcaggtgagtgcgtgaggccgagcggcagctgctggagacgtggggtgtgtgcctgtgagtgcgagcgagacgaggagggagcgccagcgagcgagcgagcgagtgcgggagcggccgcctcggctccccgcccagccgcgcccgcagccggcggccggagcgcgtgggggcagcgcctcgccccgacagagcctcgcctcctccttgccgtctcggctgcttctccgaggagccgggagccgctcatcggcctccccaaccctgcgctcccctcccagcccgagtcctcccgctgctctttctcctcctcctcccgagcctcctcccctccggcgcggcgccgccagccagcctcggcggggagagtgcaggtactttgccttcagaataattagcaggacccaagccggctttccgagcgcgctttctttttcttcctttgccccctccctccggaaaagaagatcccacttttgaaacaatcagaaatcgaagcaccccaccaaagccaaaccctgacgggctgctgtgcatgtgccatccctttttgcagtttattctgggcctgtgtggaatagaaagacaattctttatttgactggtaggaaagaaaagagaagactcctcagggtttccaaggaggactggagcggctgctttagtaagtaaactgtgcttctgtctttcttttctctaaagtgaagcatatgctgatgcttttcaatgcccaatgtccaatgctgtggacagtttattcattttacctgggaataacttgacttatataacttcagtagctcctatttgagaagtggttcgctaagcatttttttcttttttttttttttttggaagagcccttagaagacttcgatatgggatcagtatgggcagccttactggaaaactgatttttaaacgtttattgttcaagggctattggaagcctgctttgttaaacattggttggttctaagatttaagggtggttatctagaaaaagcttgaaaaatctaaccctactggctcacttctcctgccaccttcaacctcagccctaatccatgctaactcccaccctactctgacttcagttggttggttgttttatctttagttctgaaaagctctagaaaaaaaaagggggggggggcggaaaagggaaagttaataaggatggtttgaaagaccagatgaaaattctgttgcgatttcttcatgcctgtaaggagataataattggaggaaaatcctggaactagaatagttggagaattagaatgaacttaatttggagagagaatgtgaaaaatactttggagagggcagggctgagactgtgactttgacacagcgggttataaactct

SEQ ID NO: 12222 - DNA, 6000 bp, Homo sapiens
tgtttcctgtctattttaaatctttaagcggtgtcagtagagtattaaataattgaggtagttaaaaaggacataaaattgaggagtcaatatggataagattatagaaatgacagggaaaaatacagaagtattgtagattaaatgtcaatattctgctgctgctttaatattctggagaatttggttacagatactgatttgttttaggagatttgttctaagaattttcctttgtaggatacatttggggatggctttgttttggcatggcaagtagctctaatgccactggaatacattcaggactttcaaatttgtctcagtttaatgttttttcagttgttgcacagtactttataactttttttttttttgaatgggtgaaaaatggctttgtgggctgacgtaggtcatggaaaattgaaagccaaagctctaagatatataagtttttcatctcttggtttagaagaaagtctcttagatttgagtagaggatatcagttttcacattagtttactaatttttttttgtatgtgtgttctttagactgagagatttctttgacaagctgtataagccacagaagttttatattctgatgaataagctggcctgtagtggtggaagcgatgatgaagatcttggctagcagagcacatggtctgtttttaccatttctagtttaagtaggctgcactataagtggctgaggatgtagttggctgctgctcacttagtctggcacagatcacagaatctcccttttcaaagttgagacacttgactttgtgctgaaaatgtctttttagctgtttaaattttcattctcttccctttacttcttgattattttttcaaggtctatgtacagacatggagcactcagaatctttctatgaccattacacgagatgagtatccgtccaaccctatggtgctccgaggtattaatcagaaggctgcctttccacagtaccagcctgtcgtcatgctggagaagggttataccatccactggaatgggccggcaccacggactacatttctatacctcgtcaacttcaacaagtatgtttctgttactgttatttcaaatagttgagcaagtagtaatttagtggagaaaaagaataacttatgtctcctttgcagcaagcaaagaaagccaattttacatactttgcttctcttgtggggaggctgtatattttgtgttgatggaattaaagagattatacaaattgaatcctgtcatttcaaaagctttttttttctctgtggtcaagttattatgcacataaagccattcaacgataggttttaatactgctgaatgctttaattccctctagctgggatgggaagtagttttctatgctcttccagtggagcatttgcttacctgaaaaattaaaagatttttgaggctgagtttagacttggcagaagaaagtagtgggatggattagtaatgcctgctaggggcaagaagtgaaagagttgggacatgaaggccaggtatttgctagccctgcctgaaagcactattttatcccttcttgatttctcagttgtctgttctaatcacaggcaatccaaggggctatttttataattgatttattcaagtgtttattgtgtgtaagttgacataaaggtgaatgagagaagtacttgccttctaggagttcagagtagacaggtagaaaaaactcaagtagatagataaaccaaagctattttttagtggacaaatgatagagcaactattaaataattctgcctaagggagttgagccaggctgcagtgaggaatgattctgatgaagcaatctgtcttgttatattaataaaagcacagtgttgggaaagggccagttctcctgggggaaatgatggagtcagtgtgatggggacatagagtgtgtcaggggaaatgacagaaggtgaaacaaggaaggtgggatgggactatttagaaagggaggggtaaaccacatgtatcttatcaatctagatacatgtggctattaacccatgcgactccatgaaactgctgagatatgtacctgaaaaattgaaatggcttgttcacctgagtcgtcatcaagccctgacttgtcagaacactcttaaaacatccagttgaaatgaacatagaaggactagagcatgtaggaattcagctttaagaaagtcacttccaaggatgatgaacatcgtggcagatgcccttgttctgagattgttagggctctggcatgtgctctgagctgaaccgttaccattactgttactgttttcctgtaatccttgctgcggccctctgtgccccacccacacagtcaaccaagccccaaggccagtactcattcctgtctcttccttttccctcatcactccatcttatccgtaactgcaccctgttggttccagctcctaaagtcatctaaatctgtccacttctttctacccacagtgtttgtggctaagtcaagccctcaccatctcttgcctggctccgtggagcagtccccacttcagtctccccacctccaatccttagtccacattgtggccagagtgagatttctgaaagcccaatctaatatcatcagtgagttgcagagaagtcaatgaaagaaacaaacaattgtcagagaggatggagaaatgtcaaagggtgatcagtactctataagttatattgggcagaattatgaattggaggtgaggtatgacaataaaatgatatgcagtgttttgtaaagtaccgtgcatacctttccatcagatactgagcaagtaaagacattttaaagtgaaaaaaaatgctgagcctagaagtttcaaaaatccacatgggcatgaaattcagtcatacttgtttaattagctgaaagtttataaaaattacacgatggtcagaggcaaaaggaagagatggacaattttttacccctcaatttaagataattatagggaagtcatagattttgtcataatgccatttctgaaaataacacttttagaagttatgaaggcagtacttattcattaaacaaaataaggaaaatatagaaaaacataaagaaaatggaaataatctacagttctcctaaccaaagcgaggcattgtaaacatatatagtacattcccctctttctaacctcaagttgctttgtgtctatggatgtgccataatttttttaactaccccccttaccccatgaacatttaggttgtttctcctgcccgcccccccgcattttgctattatagacaataattcatagaacatcttttctatcttttgtctgcattttctagttattctttagtggggttatttttttcacttgaaaacctaggtgaacaatatttttttttttttttttttccttgagacaacatcttgctctgttgctcaggctagaatgcagtggtgcaatcttggctcactgcaacctccgcctcctgggttaagttgatcctcctacctaagcctcccaggtatctgggactacaggcgtatgccaccacacccagctaatttttgtactttttatacagatgtggttttgccatgttgcccgggctggtcttgaactcatgcactcaagtaatccacctacctcagcctcccaaagtgctaggattataggcatgagccactccgcctggctatgtgaagaattttaaggccttgttacatattatttaaacattttttagaatgacaaaaaagtttgggaaatagtgatgatgattgaacaacattgagaatgtacttattgccactgaaccatatggctaaaaattattaaaatggtaaattttatcctaggtatatttactataataaaaaggtcaaaaaagagagaaaatgataaaaagtggaaatgtttttaatttttaaaaaggattaattttatatttaaggacactaagaaaatcctagggccatttagtgatatgcatcaaaagctttaaaaaggcatatacctttacatacagcaattttcccactaggaactcatcctaatacatttataaaaggtaaaattataaacaaaaaaattatttagaatgcttttgccaatgtacagttccactctccatatattagtgtttctatcttgtacacctatacccaaccatctcacttaattttcttatctttttagagtgtctaagtctgttttatccaactttttaatgttctttcaaatcctcttaaaactaagaatttttagggctggacacggtggctcacgcctgtaatcccagcactctgggaggctgaggtgggcggatcacttgaggtcaggagttcgagaccggcctggccaacatggtgaaaccctgtctctactaaaagtacaaaaattagccgtgcatggtgttgtgcccctgtaatcccagctactcgagaggctgaggcaggacaattgcttgaacctgggaggcggaggtcacagtgagctgagatcgcgccactgcactccagcctgagtgaaagagcaagactccatctcaaaaacaacaacaacaaaaaaacaaaaacaaaaaaaattgtaaaggctcatatttttgctgtatatctattgatatgagaaatttgagcaacagatgaaggtgggtgatttgttagtatgccatggttcagaacttccactgtcagtggcccaacacacagaagaaatttaaggaggagaaaactatgggcaggaagtggaagaagtggcacatgaaggacagttatctgcatacgctatagtacttaacagataatggctgaagtgtaaactaatttttttatgtttctcctttaaaggaatgactggattcgagttggcctttgctatccatcaaacacaagttttcaagttacctttggctatttgcagcggcagaatggctcattatccaaaatcgaagaatatgagcctgtgcattcactggaagaactgcaaagaaagcaatccgagaggaaattctattttgactccagcacggggtaattcagtgaaaccagggaatgagaattattcctatttttctttaatggtgaaattgctagttcttcagcatcgcggctgtttagtgaagcagctgatgtgggtaattctctgcacatcttctctattagaggtttagaggggaactagaatggctcgtaattatagttggcagtagggatcgagtgaagatgtttgctgtatacgtattgaggcaatttagagaaagaaattatcccttgtcgatgaagaatcagtaggcccagttggaaattacaataattttttcccataataatgttcttcatatgattatttacatgtgatatagttcatatttcagtgaaagctcatttttctcttcctgacttaggctatcttacaagttgaccttgagtttttgaaaatcactgtgtaactgtggaatatttgctttcaactttctctaggctgcatctttccactttttaattccaatcctgttcttctggggtcctgttggttttgactgcttttacccagttacagtctctcagcctgtgggctatggtaggctccatctcctgtactcttccagcaggtagcgtgttccttcagcctttctcctcacgcagacattcctcctatatgccattgtctatgcactataaagataccaatggaaagaagatgcatttcttctgcaaactcaccgtccattgaggaatgtgggcatgtaaatcaagtcattagagaaggaaaggttgaatgctctcggttctatattcaatgtggcttttggattgcctcagaagttcagcctagagtaaccagtgacatcctgagagggtgatcctggagctaattcttgagaaacacttaggaggagatggaaaaagaagtgggtgagatgtcttacacagaagagacagtgtgcacaaatgcatgggggcatggtagaacatggcattgcgtgtttggggaaaggcaag

SEQ ID NO: 12223 - DNA, 6000 bp, Homo sapiens
ttttttttttgagatggagtctcgctctgtcacccttgctgaagtgcagtggcgcgatcttggctgactgcaacctggcgtctttctttttgtgatgccagttgatggtcaatgcctgtatcaattcatttttatgttatttgttaattggaatgttcttagaaatagacacttcagctgggcgtggtggctaacacctgtaacccagcactttgggaggccgaggatggtggatcacctgaggtcaggagtttgagaccagcctaactaacatggtgaaaccccgtctctactaaatacaagaaaattagccaggcgtggtggcacatgcctgtaatcccagctacttgggaggctgagacaggagaatcgcgtgaactcgggaggcagaggttgcagtgagccgagattgtgacattgcactccagcctgggcaagaagagtgaaactccgtctcggggaaaaaaaaaaaaaaaaaaaaaaaaacctcagtggtattgtttgtataaggtagataggataaatgcttgatttctttcctttttaacagttttcatgactatgaattacttccccatcttctctgagggtaactgcttttaaaatatcatcataaacttcagaattcagcagaaatcctcagggcagcaggagtcgttgtaacaactacttcacttcagtttcggccttgctgatcctgccgatgccctttttttttttcttcctcagatggagtctcactctgttgcccaggctggagtgcagtagtgcgatctcggctcactgcaacctctgcctcccgggttcaagcgattctcctgcttcagcctcccgagcagctgagattagaggcgcacgccaccacgtccagctaatatttgtatttttattagagacggggtttcaccatattggccaggatggtctccatctcctgacctcatgatccgcctgccttggcctcccaaagtgctgggtggcgtaagccaccacgtctggctaacaataccttcttttattaccatctgggcaatgcattattcatttaatgttttaatacttacattttttttaccttttcattttgaaataatctagacttctttaaaaagcaaaaaatttctgtatacccttcacccaggttccccaaatgttaacatcttatataaccacagtaaaattaccaaaataaggaaattaatgtttatacaatgctattatctaatctgtagactttgttgaaatttagtgagtgtccaattcatgtctttttttctgggttcaggattatacactgcatttattgtcagacctctttagtgttctttatcgtggagcagtttatcatttatgttgttggtcttttttgaagggtagtggctcagttatttggttgaaagtccctcaatctgtgcttgtctgatttttcaacaatgtccccctaaaaattatcttttatatttctccaggatgtcagttgtttcaattggcagagttgtttggaatttttagaatccaagtcctaatttgaattttcagctgtcttcatttaggcaattttttaaaaaggcaaatggcaaaatacactagcagccagactttgaagcaaatacaaactctctgttgtcattgactccactcatttatgttcttgagcatgtttcacggtctggtcactgtcttacttctattcttttttttttttttttttttttttgagacagagtctcactcttcttgcccaggctggagtgcaatggcacaatcctggctcacagcagtctccgcctcctgggtttaagtgattctcctgcctcagcctcctgagtagctgggagctgggattacaggctcatgccaccatgcccagctaattttgtattttcagtacagacagagtttcaccatgtccactaggctggtctcgaaatcctgacctcaggtgatctgcctgcctcagcctcccaaagtgttgggattacaggtgtgagccaccaccccggctctaaccaccttttaaattgggcctagtttcctactaaatgatgggctttgcggtgaagcctttttggatctctcattccctacactcaggtgtcctaaggacttgaccttgtgcaaggttttaaacaaagtaagtaggtaaggtaaagaaaatgagtgccttgtcagctctttgaagaagctgaagaaatgtcaacatcagcttcaacattattttaagattgtgtcattgaaacagtgagaccttacttgctccagggaaattagaagaaaaaagcattagctccaactttattaagagcctttaacagataccgttaatttaatatggcaggtatttaatggtcattaaactaccatttaatgtgccatagttataaatcaagaccgtggttttaggttttatttgtgatgtgcctttttatgttttctgtgtgttaaaaggatagagtaagatcagatggtagaagctacatacagacatcagctctgtaaagggagagctttggagtcacaagagctgtctgaagctgcagacagctctcaggaggcagcgtgtgccattagaagtgcagtagcaagggagtcacgccgcacaggagcgtggtgattatatttaaaatgtcatgagtgcacttgatactgtccattttctatggcatatggggcattatgtcactgttacaaacaagtatggaatctttaggtgcttcagctttgtttcatggcacattgttggtcatccatttggacactttgaaaggggaggagttccagctgggcgtggttgctcacgcttgtaatcccagcactttgggaggccaaggcgggcggatcacgaggtcaggagatcgagatcatcctggctaacagggtgaaaacccgcctctactaaaactacaacaacaaaaagaaatcagccgggcgtggtggcgggcgcctgtagtcccagctactcgggaagcttaggcgggagaatggcgtgaaccccggaggtggagcttgcagtgagctgagatcgcacgactgcactccagcctgggtgatagagccagactccgtctcaaaaaaaaaaaaaaaaaaaaaaaagttcccttatccccttcacagggcatgcaatgggggtatggctttcttcttcagtgccccacagctcaaacccctaggggaagcatgcggacggacaggttgtggggaggatgggtttcaaccccgcggcagcatctagggttgagtggttacagctcctggagccccactgggtgtgtgttgcagtgcgttctttcagcttagctgtccacaggcagcttgtgttaatcagttcaattagaccctctgccttatcgcaaggacagagggctttctgtatcccaggttcttgccctagtgtactgaaaaaatcagatcatgtgggcttggagaatgaatgcaagatttattgagtggtggaagtagctctcagcagatggctggggagccagaagggggatagcatgggaaggtagtcttcctctggagtctggctgctcagcagccgggatctcctactgtccttggccgaatttcccttggcgtccgaatcgttccaccatcaatggcctgccagcgtctttcgatgtgttcttctgccagtgtgttcctcttgacgtccagccgcttgtgtgtgtgcccgctggggtctcagggtttttataggcacagaatgggtggcatggcaggccagagtggtcttggaaaatgcaacatttgggcaagaagacaggagtccttgttctcattaggtccatgggcacaagcctgagggtggagcccttgccagtgaccctgcccttctctacccagcacttccctgtccccctcccatatcaccgttgccatcttgtccttgatgaggaatacaactcccaattacagtgttgctgtgggagatgcagtcctctttatgacagtttctagaagttgataagaaaatgggacctgcctagggctagtatctcatttaatactctatagaatattatgtgtttttcctttttagtttttaatgttgaagatcagaaaagagacaccataaatttacttgatcagcgtgaaaagcggaatcatacactctgaattgaactggaatcacatatttcacaacagggccgaagagatgactataaaatgttcatgagggactgaatactgaaaactgtgaaatgtactaaataaaatgtacatctgaagatgattattgtgaaattttagtatgcactttgtgtaggaaaaaatggaatggtcttttaaacagcttttggggggtactttggaagtgtctaataaggtgtcacaatttttggtagtaggtatttcgtgagaagttcaacaccaaaactggaacatagttctccttcaagtgttggcgacagcggggcttcctgattctggaatataactttgtgtaaattaacagccacctatagaagagtccatctgctgtgaaggagagacagagaactctgggttccgtcgtcctgtccacgtgctgtaccaagtgctggtgccagcctgttacctgttctcactgaaaagtctggctaatgctcttgtgtagtcacttctgattctgacaatcaatcaatcaatggcctagagcactgactgttaacacaaacgtcactagcaaagtagcaacagctttaagtctaaatacaaagctgttctgtgtgagaattttttaaaaggctacttgtataataacccttgtcatttttaatgtacaaaacgctattaagtggcttagaatttgaacatttgtggtctttatttactttgcttcgtgtgtgggcaaagcaacatcttccctaaatatatattaccaagaaaagcaagaagcagattaggtttttgacaaaacaaacaggccaaaagggggctgacctggagcagagcatggtgagaggcaaggcatgagagggcaagtttgttgtggacagatctgtgcctactttattactggagtaaaagaaaacaaagttcattgatgtcgaaggatatatacagtgttagaaattaggactgtttagaaaaacaggaatacaatggttgtttttatcatagtgtacacatttagcttgtggtaaatgactcacaaaactgattttaaaatcaagttaatgtgaattttgaaaattactacttaatcctaattcacaataacaatggcattaaggtttgacttgagttggttcttagtattatttatggtaaataggctcttaccacttgcaaataactggccacatcattaatgactgacttcccagtaaggctctctaaggggtaagtaggaggatccacaggatttgagatgctaaggccccagagatcgtttgatccaaccctcttattttcagaggggaaaatggggcctagaagttacagagcatctagctggtgcgctggcacccctggcctcacacagactcccgagtagctgggactacaggcacacagtcactgaagcaggccctgtttgcaattcacgttgccacctccaacttaaacattcttcatatgtgatgtccttagtcactaaggttaaactttcccacccagaaaaggcaacttagataaaatcttagagtactttcatactcttctaagtcctcttccagcctcactttgagtcctccttggggttgataggaattttctcttgctttctcaataaagtctctattcatctcatgtttaatttgtacgcatagaattgctgagaaataaaatgttctgttcaacttataaaacttgtcacagctctgtttttttgcttttccccttcatcctctattagatccttaaagaatccaccctcaaactgtggactaaggatggcagtttgccttaaaccttctgtggaatgagatgggctgtcaggacgtcttcaacccacagtaccccgaaagctttgtgctcaccacgtgtgcactctgcatgctttctccaggctgc

SEQ ID NO: 12224 - DNA, 6000 bp, Homo sapiens; identical to SEQ ID NO: 2598

SEQ ID NO: 12225 - DNA, 6000 bp, Homo sapiens
agcatgccatcagtatcacctgcagggtttgttaaggtacagattgctgggccctagtcgtgttcctttttcagtagatctaggtttgggcccccaatttttcatttctaacaggtttccaaaaagttctgatgctgctggtttgtggaccacactttgagaaccctgtcccagatgttgaatatcccagtctcccagaaccattttctttggtgctgaataaggcaggtgactcaggacatgtgaacagagaaaccaggcagagtagaatgaaagggaggttgtggggaaagtgggtctaaaagctaaggaaacattgaggcctggtgccatggctcatgcctgtaatcccagaactttgggaggctgaggcaggtggatcacttgagatcaggagtttgagaccagtctgactaacatggtgaaaccctatctctactaaaatacaaaattagccaggcgtggtgacgtgcctatgatctcagctacttgggaggctgaggcaggagaatcacttgaacccaggaggtggaagtcgcagggttgcaccgagccgagatcgtgccattgcactccagcctgggcaagaagagtgaaactccatctcaaaaataaaataaaataaataaaagctaaggaaagattgaaaggacatcctgaatgttagagacttaggacagttaagcctggaagtcctgctcatgatgctttggtatctgtgtattggtgaatgatcaacagtctgtctgttatggattaagcatatcaagttcaaagcattattggtacactacacagaaagtgtacttttttcatttttttctttgttttacattagttggcttcctgaggctcaggtagtccaaagagccctgaattctgcggctaacaacgtgtatcagtatggacgagaatggataactcacaaggtaagggaagaaactttctttgtggctttctcttttcagggtctttactggtggttgcttgttgctttgataaaacataagtagaaatgctattcacagcagtaaataggcttaaataaacaggtaagcaacatacaatgaaatcttttgaaagatcacattgaataggggtagtaccctgaacaatctgagaggttggtcatgtactttttcaagatagatgtgattcattacttgtgagttaggacagaatgatcacttggtttgggtagtcaaataaggctttgtagagaaaaaggtattaatgcatattaaatcttattgtctgctgataactgtctttggcagtttccagttattttcatttaatatttgtttttttttcttttactgtttctaagaagcctgcagtatgaattattttgcctgctttgcagatgaggaaacaagactcagcaaggctgagtcagttcccagtggtcgtgtagtaaattgcagagcttggtttgaaactgaagcttaacttcaaatcctttgtttctactgtagcatgctcgcagtgtgtgcccagaactggattaagtgcttttgatgtggcacttgagataaaccttgaaggaatggcagatcaaggaagagtggattttaagaagggtatttgtgtgagccaagatgcagagacaggagtgtgcttgaagagatgattgagatgctgagacaggagtgtgcttgaggaaatgatcttgactgaagtggagggagctttgtgaaggggaaatgaatgatagaggaaaggcagcacagttaaggattagattccaccatatggatttgggatattctttccctccctagttttgcctgtaggaataaaggtaatttgcacttttagtatactgaaataattaggattatgtaagaatcgacaggatttgttgcagtaagacttgtgcctagaaaaatatattagtatgtgattccatattgaaaattcaaaaacaaaatctaaaaaaataatataatggaagatacgctgtatacacatatatggaatcaggctggccgtggtggctcacgcctataatccaagcactttgggaggccaaggcaggcggcggatcatggggtcaagagttcgagaccagcctgaccaacatggtgaaacctggtctctactaaaaatacaaaagttagccaggcgtggttgcgcacgcctgtaatccgagctactcaggaggctgaggcaggagaatcacttgaactcgggaggcagaggttgcagtgagccgagatcatgccactgcactctactctcagagacggagaaactccatctcaaaaaaaagaaaaaaaaattagatgagcttgtttacctcaaattagatggctctcaaatgatgttctgactatgcttcatgcttggttgcctctcatatgcagaggcatatcaggcaccaccaacagtacttgtgtttcagtgatgtgtagttttttttttctttttgtggagagggagtcttgctctgttgcccaggctggagtgcagtggcgtgatctcagctcactgcaacttccacctcctaggctcaagtgatcctaccacttcagcctcctgagtagctggaactacaggcatgcaccaccatgccctgccaatttttctgtttttatagagacgtggtttcaccatgttgcccaggctggtctcgaactcctgtgcttacgcaatccttccaccatggcctcccaaagtgctatgattacaaggcatgagccacgatgcctggccaaatggctttattatattgaatatttagttttcagtttatgaataaatcaaatataaaggaacaaatatgaacagatacgtttgcattgaatatgtctagtaactggttcacatatctgtaaggccagcatcaaataggcaaagagtaaggaaatagatgttgtaaactaacgtgggaaaatggtcactcctttcattaataaagaagaaaataataaataatggctacatttcacacctgttaaattccctaaaaattttccagttagttcataaggctttgaggaaattgggtcatttatgtaattttagaaagcattaattggtatatttcttattatagaagtcagtttaccaatgcatagcaagagccattaaaatgctcattttcggctgggtgtggtggctcatgcctgtaatcccagcactttgggaggccgagtcaggaggatcacttgagcccagaccagcttgggcaacatagtgagaccttgtctctacaaaaaataagaaaattagctctgtctggtgtcagtgcgcctgtgatcccagctacttggctgtcttaggtggcaggatcgcttgagtctgggaggtccaggcttcagtgagccatgatcatgccactgcactccggcctgggtgacagagtgagaccctgtctcaaaaaaaacaaaacaaaaactcattttatttggttgcagtacatttatttatgtcacaagtaaccctgcaatgaacatccatatatatccttaaaaactatgtaaaaggatgttcattgcagtgttactcatgacactaaaaattaggattcatgggtgggcgtggtggctcatgcctgtaatcccagcacttgtggaggctgaggtgggcagatcacttgaggttaggagttcaagaccagcctggccaacatggtgaaaccccatctctactaaaaatacaaaaattaactgggtgtgggggcgcacacctgtaatcccagctactcaggaggctgagacaggagaattgctcgaacctgggaggcagaggttgcaatgagagtcgagatcgcgccactgcacttcagcctgggtgacagagcaagactctatctcaaaaaaaaagaaggatttattgtatatccttagagtgggtaatgatcagctaataccagaacgtaatgaattaatataaaagtattaaagatgaaggttagtgatgaaggctaaagattgaatgtttataatgaagtagaaaaaattctaaattgtctctatgtaaataggcagaaagttgcagaggaaatagaaaaatggaaacaattgtattaaggaagtgggcctacaaacttctagaaattctttgggtttttgtttttttttctgagaccaggtcttactctgttactcaggctggagcatgttggcgtgatcacggctcactgcagcctcaacctcctggactcaggtgatcctctcatctcagtctcctgagtagctgggactgcaggcatgcgccaccacacttggtaatttttttgtatttttgtaaagatggggtttcgccatgttgctcaggctgatctcaaactcctgggttcaagcgatctgcccacctcagcctctgaaagtgtgaaaattgttttttatattataatatggttttaataataactaagtgggacaacattttataatgatagccttcctctaagttacgttgtctcagtgtacttgatttccacaaacccggggccagtctgatcaattgtaaatgagaccggacatctctcagcatgcaaatagaggaaggattcgtgtttatagccaacatcctaaaattttacttaaaattctgtggtaattcttaataatagagataaatgtaacatgagacatatgtataatggaaggtcactgggattacaggggaaagatttttctctggacaggtaagatcagataagtcagcaatcatggcttcatttgcaccattctctgatagcgtgaggtagctctcttagagacctaagaatagagcaaagaaaatagaagcaaaaacatgagaaaggaaatttactgggaatactcaggagtagatttaaggaaagaacgtaatatggctagagataaatagtctggaacatttttgtttgctttggaacaaatgtaaatacccagcatatattaattttactctgttgttgcctgaaatattgtaccacgtcgtatctgtgtttttttctagctccataaaattctaggagataaggtgaacaatactgctgtaattgaaaagcaagtactagaactttgggacagactgtatcactcttggtttgtaaaggtaagttattttagctaaagtttcctgttgtaaactaataaagtccttttattgactcatcaactagataggattatattcacagtgggatttcattcatggaaatttcaaaacagcaaaaccttaagcctcaggtcactaaaagtcagtgtgagttgatggttagtctccatggcagaacctgcctatctctctggtgcgtcagtattccatcctcagtctgttgtcacggacatctcatcccctagactagctctgtgcgggagaagtgtaatgcaagccacataaggtaatgttaaattttctaatacttatactaaacgaattttacctgttttagttttttagtgatattttatttaacccaatatgccccaaatactattattttaatatataatcattagaaaaaatttaataagatattttatatcattttttttccatatgtctttgaaatctagcatgcattttataccagcagcacatctcagtttttgagctagccatattttaagtgctcagtagccacatgtggctagctcctactggctactgttttagacagtacaactgtaggcattaataacttttctttgagaaagtgaaactgaatctaaacgcttagagatcttttattttttattattatttatttatttattttttgagacagggtctcgctctgtcacccagactggagtgcagtggtgtgatcttggcttactataacatactccgtctcttgggctcgagtgatcctcctgcctcagcctcctgagtagctgggattacaggtgcatgccaccatgcctggtgaatttttttgtattttttgtagagacagggttttgccatgttgtccagaccatcctatacactggatctggcagggcctgtgggctagcaggagccgtgctgtgtatagagtggatagagttggtggtg

SEQ ID NO: 12226 - DNA, 6000 bp, Homo sapiens
gggctgacccccacacctccctcccggacggggcggctggccgggcggggggctgacccccccacctccctcccggacggggcggctggctaggcagaggggctcctcacttcccagtaggggcggccgggcagaggcgcccctcacctcccggacggggcggctggccaggcggggggctgacccccccacctccctcccggacggggcggctgccgggcggagacgctcctcacttcccagacggggtggctgccaggcagagaggctcctcacttctcagacggggcggctgccgggcggagaggctcctcacttctcatacggggcggctgccgggcggagggtctcctcacttctcagacggggcggccgggcagagacgctcctcacctcccagacggggtggcggccgggcagaggcattcctcacatcccagacagggcggcggggcagaggcgctccccacatcccagacgacgggcggccgggcagagacgctcctcacttcctagatgtgatggcggccgggaagaggcgctcctcacttcccagatgggatggcggccgggcagagacggtcctcactttccagactgggcagccaggcagaggggctcctcacatcccagacgatgggcggccaggcagagacgctcctcacttcccagacggggtggcggccgggcagaggctgcaatctcggctttttgggaggccaaggcaggcggctgggaggtggaggttgtagcgagccgagatcacgccactgcactccagcctgggcgccattgagcactgagtgaaccagactccgtctgcaatcccggcacctcgggaggccgaggctggcagatcactcgtggttaggagctggagaccagcccggccatcacagcgaaaccccgtctccaccaaaaaaatacgaaaaccagtcaggcgtggcggcgcgcgcctgcaattgcaggcactctgcaggctgaggcaggagaatcaggcagggaggttgcagtgagccgagatggcagcagtatagtccagcttcggctcggcatgagagggagaccatggaaagagagggagagggagaccatggggagagggagaccatggggagagggagagggagagggagagcaaaatcagtatttttcttagttacagagtgattatacagaagatgcaacagatactaaacctgatagggatatcgagttagagctttcagcacttgatactgatgaacctgatggacaaagtgaaccaattgaagtaagtgccacaattagataattgagaggctttgtttgattgaaaatttataaaatactttcatactgaaggattaacattttattttcttaggagatcttggacatacagcttggtatcagttctcaaaatgatcagttgctaaatggaatggcagtggaaaatgggcatccagtacagcagcaccaaaaggagccaccaaagcagaagaaacagagtttaggtgaagaccatgtgattctgtgagtgttagacagaaaattcataaacagtgggcataggacataataaagagaaaaaaatgcgaaattaatttttggctttatgctgtgaggggaagaccttatatgggcaatgatttggtcaatctggatttttagggaagaaaaagtaaaattgaactaacaaagcagtccattttggtagcctgaaacttgctttttgttgagataaagttaatctgtgttccagcatcaggttatgcttctttaatctggttgccaaatttctagactacaaaatggagaatgacaacctagattaatggtttctctttttgaaaatcatgttaagattttcttggctaggctgggcgtagtggctcatggctgtaatcccagcactttggaaggctgaggcgggtggatcacaaggagttcaagagcagcctggccaacatagtgaaaccctgtctctacaaaaatacaaaaaaattagctgggcatagtggcgggcacctgtattctcagctgcctgggaggctgaggcaggagaatcgcttgaacccgggaggcggagacagtgagccaagatcgtgacactgcactccagcctgggcgacagactgagactccatctcaaaattatctatctatctatctatctatagatagatagcatataatatagtatattttcttggctataatactgccattttgaataattactgccaaaaatatgggcttaatcttcaacttggtagtttggccttaaactaactagtattttaatttttatcataacttttggaaaacaggacttttcaagccaggagtggtggctcacacctgtaatcccagcactttgggaggccgaggcgggtggatcatttgaggtcaggagttctagaccagcctggccaacatggtgaaaccccatctctactaaaaatacaaaatagctgggcgtggtggcacatgcctgtaatcccagctacttgggaggctgaggcaggagaattgcttgaatccaggaggcagaggttgcattgagccgagatcatgccactgcactccagcctgggcgacggagggagactctgtctcaaaaataggaaaacaggacttttctagttacttctgatacttctagtgataaagacatgtctttgctagagactcctaaagtttgctgtagctttcattaaatatgtatagtcacccttaacagtttgcacttaaagctaatttgtttttaatgtcatttcttttttctcagggaggagcaaaaaacaattctgccggtaacttcttgctttagccagccactcccagtgtctattagcaatgcaagttgcctccccatcaccacatctgtcagtgctggcaacctcattctgaaaactcatgttatgtctgaagataaaaacgactttttaaaacctgttgcaaatgggaagatggttaacagctgaaaggaggttcatctttcaaatttgtgaccacaccatggaagcatttacactagctttttatatatataatatatattatataatgtatattttttttaaaaaaaagatattactgggggcatccatttcctgtggactctttgatacttcaagccctcttgcattagcattatgaaaaaaaaaaagaaaatttactttactagggtaacatgttcactttccagaaatgattggaatttggacaacatttaacttaagcttcaagcagctttttatgagtttgtagcaatccggtgcagtaactgagccatttcctattttaaatggcttctatagaaaattaacaactcagttattaaactagcaggatcctacaatgatacatctagtgaaagtagacttagttaacttatttatttctattttatgtttcactgagagaagtttccatctcattccagctgctttatttatctttttcatggaactttgcatggatttctttttctttttttaattttgaagagtggagttagatgttcttaccatagaattttacagggttatatactagcattctttactgcattatatgtaggagtgtggtgcagtgcttttatctgtagcatataatttttttttaattttccatttttcaagagtagtttctgctttgttaatatttatacacaggctacttgttgaagtaattaattaaaaatataaccaagtgcctaagtctttcagctgatgtactagatattaaattctcctaagttatgcagaatcgtttttacaattttgataaattatgcactaatgtaatggcagttttttaaaatgcagatttaagcctgtacattattgaatctgatgacttggcaaaagaatcaggtgctttcagctttcttgagaaaaccctgtatgtagcgtttgcactgactaacaagatggtattgctgggtttttaatttaaactaattaatttggttgttcattgcattatcttggttaaatattgtttattgttacttcatgttggggtttagtttttcttgttttttgactgttaggttgataagactatgaactgtgtaatagtagaacagtggctaacatttattcatacttaagaacatgaataatttctgccttgctaaaatgtgactgaaatggttttgacttggcatctgaaagtatacaatgtgttcaacaagtcatgcatcagatttgtgggaggtattgtactgaaacctaaatttcagtcaacatttgaaaagaagagctgggcattccttcctggtgatctttacctatagtttatctatctgtttttcttctgtttctttaagattagtttgacttttattattatttttttaattaacttctgtgaagttgtttactctgaaaattgtactggaatattttaagccaagctgatctttcaccaggtgtactgtatgtaagggcttttcctgctagcaagatgcttaaacaggatcatgttattggtcgtctgagctatttagttgttttacaaaaccacagcattgtatcagataagattttgataaaaagttttgtgcacatttccaggggcgggagggttgacatttccctgaaatttcttgattagaatgagtaaatactggtgtttgatacctgtcttaatgaacatgctcataaggtgactgataagttgtaaatatacctgagaaacaaaggggtagttttgatattctggtgtcagtatggaagatcttacacatttatttaatactcaaatgtatgaagatgtttgtttgtagcataacaacagcacagtagccttgacttagtttcctttggttagtactgtaccttttttgccatggccagtgctccccatccctatgaagacattttatttatttcactctgtaacctgaaatgaataggaacaagggttttaaaccatgttacattaacttttctgacattataaattagcctagaatattacaggaacatgattgttatataatttatatcagaacctttctataaatatgtgcttattacatttgaaatgcttccaatgtactttatttgctgtttgtaattccaaaaaggatatgcaaaccagtctgtctatttcatggatatttaatagtgagatcttccatgttgaaggtaatgtatttttttttaagattttaaaattgctattttgttacaaaatagagacctattaacagtttgagagctccttatgtgccctcagggaaagaaccctctgtgcaacagaactacacaaaacatcttcagcacgttctgagggtgaatatatactacataaattgatcttgtgtatttaaccttatctttttaattttaaaattgaaattttgaaacttggttgtgctctgctggagggggttgggataaactgcttagatgtttgcctacttgtccagtgaaattacatttgcatcagtatatgtatatacctgccaaccttattggtatgtctcagaacatttatattaaaataatgcttgtcttgcagcaggtgatcccataaaacaataactccctgttcttaaaaacttactctctttttcactaacaacataggaattgtttctgtgttgagattattctgtgttgcatccattctctatgtagtggtcaccttctgtctgtcatggtgggcttaatgtgaagtaaagccattggttctctgccactttcgaagaaagggcagttcatctgatccttcttcagaatggtacctactgatatcatcgaggaaaatgttacaaatcagacctaggatatgactttttaaaattgaggcatttcccgtcatttggcctttttaccaacaagatgtgatgtacaaatttggaatcaaaggatacaaagcaacaagagaggaaatgtgtaatgtgggtaaccaaactgcatatgttacctattgtctaatcagaaaaaatagtctgaggtctggaaagcaggaaagtggtggttattttctttcattttt

SEQ ID NO: 12227 - DNA, 6000 bp, Homo sapiens
gtctctcctctgtgtcccccagggcccgtcacagctggagctgactctccaggcatccaagcaaaatggcacctggccccgagaggtgcttctggtcctcagtgtaaacagcagtgtcttcctgcatctccaggccctgggaatcccactgcacttggcctacgtgagtgtgttccctccaaccccaggctgaggctctggccatgggaggtccctactgtccatctctgtgggtcagggtctcccaccccagcggcccagccctgcttctccctttcatcttgacattattcaccagggtcctgcctggtgaagccaatggtctctaccagagagaacccagagggcaccaggactacagtaaagagtctagaccaagaggtgggagtcaggttgatgtgcagccctggccaactctgatcctctgcataggctcagtttgcctctctgtccagtgggacaactgaactcaatattttatatgataatcttttcattgtctttgaaaaagttacacgacatatatttgaaaatatttaaagacagaggaaaagggccaggagaaaacctaacgtgttaacagtggttatggctgggaagtgggattaggagagacatttagttggttcttcacactttgttgagtttgcaagagttgctctaaatggatttggcctattttggagaaaaaagtatttttaaaaaactcaagttttcaggtcagctgtggatttgggaaaaacaattaaaaacaaacaaccaaaagcctcaacttttaaaagtgttagctatatccaccagagagaggaggtcagggagctgggacccactgccagaggtcagggctggaggaggcagggtggcttgccagcactgcctcctccatgaggaatgtctgggaggtggcccccagatgtgagcagctgttgtttacaacagagaaagcagagggtaggaaggggagagcccgggggagagcaaagatagcaaaggggagagaggcatagaaagaaacatgcccactgcgggagggaggcaggcttgagcgaagttgggcgtgggggacaggggagaagcttccggactggtgacagggacagcacagagacagtcagacatgaccaagccagcatgccaaagtcctaggagggagggggccaaatccaaccaccagggccaagaggatttgactccttgcagcccatccctcggccgcccagaaggggaatcgaggtcccagagggggcgtggcctttaccatggatcctcccccttcccgatctgagtccgtgcagcccagggtgaggcaggaacatgaaacgcgcccgccagccggaaggtcgcagtagccgccggctctggcctcggccgcgccgccttcctcctggggccgcgctgcttcccgagcgggctccctggggccggtggccagaggggacaaagaggccaaggcgcggcctcggtggccgacccagtgccaggcgaccaacagacgtcgtgccctgctgtatccccattttacaggggctgactcaaggatcagatccctttcccaacccagctgtaaagccagtgtcccagccctttcccattccgcgggctgggttcctcacccaagatgcccatcactttgcccccttgttgaatccctacagagaaggtatctacttccttctagatgggccattctagggtgtcttgtctactgttgccatctggcagtcctcaatatctagcttgggccaggcgacctggcttatgtctgtaatcccaacactttggtaagccgaggcaggagggtctcctttttttttttttttttttttttttgagatggagtttcactcttgttgcccaggctggagtgcaatggccccatctcgcctcactgcaaccttcgccttctgggttcaagtaattctcctgcctcagcctcccgagtagctgggattacaggcacctgccaccacccccacctcattttttgtatttttagtagagacagtgtttcataccgtgttggctaggctggtctcgaactcctgacctcaggggatccacccgcctcggcctcccaaagtgctggtttacaggcgtgagccactgtgcctggccaggagggtctcttgaggccaggagttggagaccagcctgggcaacatagtgagaccctcgtctctaaaaaattataataaaaaatatttttaaatccaacccgaagcccttttgcccttctgctgctgctgtttcattcagctcaatgcccttggctttggagactgtacactaagagctcagtcagtggccccaacagcttcctctgaatccttcagctttccagagtcactcttccaggaagtcttccctgtctgctttcctcctcacccccaacccccatttcttctgaggcaatggcagggtaggcagtgagatgctgaagccacccagactccccatccctgtccaaccaggagatctgtctggctcctttgtttcttattaaataaaattctgtcttctattgtttcaaatgacttgatgcatgtctagtttctgaatggtaatatcccctagggcagggaccactgatatctgtctttaattcattaattcattcatccatccctttcttctttcttccctttctccctgtcttcccataggcggggagcacccatcacatgctgggtgtcagggtgacgctggcatgtcaggatcctgtgatgggcccagggcccagcacaaagtcagacaaatctctctcagtgcgtactacgtgtcaagcactgtgcaaggatgggcaaggtagacgttgccccctgtagaccctcacagtgtagggagatccagagcctcagggtatagggagagacagccgcaggatggcgtagatgtgggttgaatgagaacagctctggaggggtgggtgatgtttggacaggtggatgaacaaggtggtgtgttcatctggccccccaggtatgcaagggagaaggggctgatctgactgctagggggctccgggctgactgcagatccaccagccagcattctcagctccggcctctttctctcagccaatgggctgactccacaaattacttcctgacctcctacatgggatagagagggcacagggccaggaacagcgtgctgagcctccacatgtctccccagaattccagcctggtcaccttccaagagcccccgggggtcaacaccacagagctgccatccttccccaagacccagatccttgagtgggcagctgagaggggccccatcacctctgctgctgagctgaatgacccccagagcatcctcctccgactgggccaaggtcagtttccccagcaacctctctgggctcatgatactgctcaggaggaatctgagctcctctggcccacacctcaaacttgggcaccaagagtgcaggaggggacacgctgtgccacagttcacatgccacaagccagtgctgccttgggacagtgatggctcctccaccaaatatcagattgaagcatgtggaatatgccaggttctgacctaaaaccccagcattttcatacgatctattgtgcatctactatgtgccaaagccctatcatgctaggcacttggggacacactcaggccctgccttcctggagctgatactgtgatgagggaggtgacaataaacatgtacatgtacacagataaatctataatttcgggtcttgctgggtggtttcggggctgcagcctaacatgtgtcatgggctcatcccttatgttaacacacggaggcccggggacttgcacagggtcacttggcaggtgagtggtggaagggaagttcgaacctaggtcctctgacgcctctccccctctgcagcaccgtcctgcctgccccaccactatctttggctgtgggtgagggcggggctctgttaggtgcagggctgctgagggaagggactgaggtgcgcgtgtctctgcagcccaggggtcactgtccttctgcatgctggaagccagccaggacatgggccgcacgctcgagtggcggccgcgtactccagccttggtccggggctgccacttggaaggcgtggccggccacaaggaggcgcacatcctgagggtcctgccgggccactcggccgggtatggctctcgccccgcccctgacactagtccccaccccgagagaccacccccctgaccccccccgccccctctccggtcccttataaagccccaccccagtcccagccccagccccgccgcagccctgtgagagcacagtcgctttctcctactctaggctacgccccctatgggccccttccctttgggcacaagcctggccccagtcccatccctatcccataaacccacacctggccaggtaagagtgcagccgccgcccacccgacgccaggcctcgctccccgcctggcctgtccgcttcagtgttccatccgcgtctgtctccccgcaggccccggacggtgacggtgaaggtggaactgagctgcgcacccggggatctcgatgccgtcctcatcctgcagggtcccccctacgtgtcctggctcatcgacgccaaccacaacatgcagatctgggtgagttgtgcgcagctcccgggacacaaaacccaaactcccaacctctggatcagggaagtttcctggaaaggtgaacccccgagctgagctgaaggacaaatcacctatgcccatacgtgagggaaggggccaggcagaagacgcagcaggagtggggacacagcaggaccgaggcctggcataaccctggctggcctgctgtggcacagactgtgtccatggccccctgttctgcctctctccccaccattagaccactggagaatactccttcaagatctttccagagaaaaacattcgtggcttcaagctcccagacacacctcaaggcctcctgggggaggcccggatgctcaatgccagcattgtggcatccttcgtggagctaccgctggccagcattgtctcacttcatgcctccagctgcggtgagcacccttcccctgcccctcccttcccttcccctcccttggatcagtggccacactgttggtgaagcacctctgtgtgagcttgggcaaggtacatcagcctctctgagcctcatttttctcatctgcacatgggaacaatgggagtagctaatcatagaagagcctgagaatcgcttgaacctgggagatggaggttgcagtgagccaagatcgtgccactgcactccagcccgggtaacagagcaaaactccgtctcaaaaaaaaaaaaaaaaaaaaaaaagcctggtgcgggcacacagtgatcacacagtgaccagccgcctggcctgcctctgctaccccacaggtggtaggctgcagacctcacccgcaccgatccagaccactcctcccaaggacacttgtagcccggagctgctcatgtccttgatccagacaaagtgtgccgacgacgccatgaccctggtactaaagaaagagcttgttgcggtaagggaactcctgcccctctggctcaggatgacatggacatctggttcctcccctagcccaagactcttggggtcctagcccaggcaggggggcaagtcacgtccctctgcaagccttagttttcccacttgtataatggaattgataatggtacctaccacgtggtgagaattaaaggcagtctgacaggccaatcacgtggcacagtaagatgtggtacatagtaagtgcttagtaaataatgccagcactaggtagttgtcattattaatcctaaatgctccctgagctggctggtcacttagcagaatacctacacaggccaggcatggtggttcacgcctgtaatctcagcactttgggaggccaagatgggtggatcacttgaggtcaggagtttgagaccagcctggccaacatggtgaaaccctgtctttactaaaatacaaaa

SEQ ID NO: 12228 - DNA, 6000 bp, Homo sapiens
ggctgaggcaggagaatcacttgaacccaggaggcggagcttgcagtgagccgagattgaaccgttgcactccagcctgggtgacagagcgagactttatctcaataaaaaacaaaaaaccaaaaacactaatcaccgtgataggcaaaaggcatttccttatttatttttttgcatcttttaaaatattgtgatatggtgtcatatttgaaagtgataaagcataaaaatatcatgaacctcttgaactcagtccccacttaaagaccagttactgtaacttgcatacctctttgattcctcccccattgttcttgacttttgcttttatttttatttatttatttttgagatggagtctcgcactgtcaccaggctggagtgcagcggcacgatctcggtcactgcaacctccacatcctagggtccagcgattctcctgcctcaacctccagggtagctaggactacaggcatgcaccaccacacctggctaattttgtatttttttagtagagactgggcttcaccatgttggtctggcttgtctcaaactcctgacctcaggtgatccgcctgccttggcctcccaaagtgctgggattacagggctgagccaccgcacccggtctatttttattttattttattttattttatttttttgagacggagtctctctctgtcgcccaggctggagtgcagtggcacgatctgggctcactgcaacctctgcctcccgcctctcaggttcaagcgattctcctgccttagctttccaagtagctgggattaagtagcgtgttccaagtaagcatgtgccaccacgcctggctaatttatttgtatttttagtagagacggggtttcaccatgttagccaggctggtctcgaactcctgacctcaagtgatccgcctgcctcccctcccaaagtgctgggattacaggcatgagccaccgcgcccggcccctattgtgtagtttttacttatcttccaatacctctttttcactccttgtgtctctaagattcatccatgtaattgtagatcattgattttaccctgttacatattattccacagtgtgaaccttccattgtataaaacaattccattctcttgttgatggatatttggggtttttccccatagcgatgctgctatgaacctccttgggcacatctgcaagaatttctccagggcatgtgtactcagctgtggaatgcaaatgtttacaactttgtttccaagacagtttttttttttttttttttttttttttttgatagggagtttagcccttgttgcccaggctggaggctggagtgcaatggcatgatctcggctcactgcaatctctgcctcctgggttcaagtgattctcctgcctcagcctcccaagtagctgggattacatgtgcccgccacaacgcctcgctaatttgtgtatttttagtagagactggaggcggggtggggtggggggttgggggagggggtttcaccatgtggaccaggctggtctctaactcctgacctctggtgatccacccacctcagcctcccaaagtgctgggattacagccactgggcctggctggcagttctttaacttgctttcttcacgtaaatatcctataaatatcctggccatcctttcctgccaagacatactgacctgcatccttcttttttttttttttttttttttttttgagacggagtttcgctcttgttgcccaggctggagtgcaatggcgtgatctcggctcaccgcaacctctgcctcccaggttcaagcgattctcctgcctcagcctcccgagtagctgggattacaggcatgtgccaccacgccaggctaattttgtatctttagtagagacggggtttctccatgttggcctggctggtctcaaactcctgacctcaggtgatgcacctgcctcgacctcccaaagtgttgagattacaggcgtgagcgaaccaccgcgcctggcccgcatccttcattttaacagcctcctcgtgcacttcggcaggctgtgccttaacttaagcagtcccctagcaatggctacttaagttatttttccctatcacgtagagtgatgtcatggatgccctggtaattacaagaaggaacatcttaagttttcccagctctgtgaagttattcttctccctattttccagaggcagggagaagggaagttatgcgctaaggctgcgcagctggcgaatggcagaggttaacttgaatctgagggtgaaccctaagtttgcccaggtgactacagggtgcaaggcagggagctggaggccctctgtggggagcccaggtagaaactccactgagtgcaagcacagcgtgctccggaactcagtttccccatccggggtcatggtggcaataaagagagctagaagtgggcccgatccacactgcagggagccgaaaggctgttgtattttggtggtcaccccgggctgcccagtggggtgaccgaggcgctcaccaggcggcggcacccgggtccgcctcccctttcccttccccgcccgcgccgcccgtgggcggagccacccgcggccccgaggctccgcccacctcccaggcctgggccgggccgtgacggcggcgctaggacccggcgggccgcgggtgcggcgaggcctgggcggcctgaggagcgcggaccccggcgctcggctcccggcgccatgtgagggggctcgggggccgcggggggccgggcgctccccgccggaggtgagcaggcgccgcgcgggagcaggccgcgggggcgggggcggaggcgggggctggggcggagggcgccgggagaggagattgctaatcgccggggatggggatggatgcgggtcccccggcggcacccctagaccccttcccccttggtagccgcgccccgaggttccggtcctcgcgcccagggtctgtcgcggggtccgctgggcctcttgccgccgactaccccgtcagcggtcctgcctctcttttcttcccagctggggttagggctccggacccccggagtgcaggagttggggagggggatgaggcgaggcgcgcgctgggtgagccccccaccaggtggacgcacgggctcagcgtcccgcatcgtcttggatttaggagcccccctcccccttctccctggagccctcctcccacgcgggttcgtgggggcgtcccgatctgcgggaggactcccggggctggaagaaggaaagcccccaaacagagggcagggtgtggcccccaccctcggctcccgctcagctcgcctgcacgtccagccttgggctgagtccatgctcctggcccagcgctcggggctgccgcctccccagcgtgagcaagccgctccccaacaggccggcacccctagacccccgccctggtgcctgtgccgagccacgtcctgggcacacactccatggcctctgacccgttccagccgagagggatcctccagggagacgaagtcaggctcagccctgggcagctccctgtaaacaaggctctggagccggctctgggcggccccgcaaggcgctttgcctctctgaacctcagtctccttatctgtaaaatgggcaacaagagctcctaccatgcattgcctggattcagtgcgtgggtgatgcttagaacgcattcccacacattccttgatattccgggaaagtcgctgcactggggtcaggggaggagtgtttcactgacacactggagaggcgggccttgaacagtgattaaccacaagactaacagctgttggcattgtgggagcactttcttttctttctttctttcttttattttattttatttatttatttttgtttttgtttttgagacggagtctcgctctgtcgccaggctggagtgcagtggcaccatctcggttcactgcaacctccgcctcccgggttcaagcgattctcctgcctcagcctccggagtagctgggacaacaggcgcacgccaccacgcccagctaatttttgtatttttagtagagacggggtttcaccatattggccaggctggtctggatctcttcacctagtgatctgcccacctcggcctcccaaagggctgggattacagacgtgagccaccgcgcccggccaatgtgggagcactttcaagccccgcgtgtcccttgccacatctgcttgaatccttccaacaaccccttgagttaccgactcttattgttcccatttcacagatgaggaaactgaggctcagagaggtcacatggcttgctcgaggccccccagccagtaagtggtgaaaccgggattcgcactggcagctgacatgctgtactgaccatggccttctcagagcaggattgtgacggggcggaccagggggacggtggtcctggctgagggcacagctcgggcaaaggtgggaaagtgggcggcgggcagggggcatccgcaggaaagggtggccacgcgtagtaagatataggcggctggacccctgggcgccttgaatgccaaggtctcagggcagatggggccaccccaggattctggactcctgtcttttgctctaacggtctgtgagggcaagaacaagccgctccctgcttctgatgaggccccgttttctgctctgtaccgcagggcctggactagataggagtctgggcctccctgactggcagtgaggggcagccgctggagaaacccgaagccgagctccggatgaggggcgctcccacggggagggggcggggttggagagggggcggggccatgatctaaccaatcaggagcgaggtgtgtgtgccaagcctcctctggcccgaggttctctggctattcctggtggccgtgtaggagtaaacagcggctaggtcaaagggctcagagaatacaggaactgagaggcccctggagcaggggacggagctgaggagggccccctaagccccagtttcttccctctgcactcctgcccgccctgcccccggcctgtctgctggaggtaggctggacacagtacattttccctttcacaggtggggaaccctggaaaggagctgggttttggttgtgggagaggaagagattggggtgtgcggagcagagctgggccggcctcctcactgccaggtcttccaaaggcccccccagccaccccctgagactgtgattacagccatttgacagatgaggagtcagccctggcagagactgtcgagcctggactagaaccgagcctctcagacttgagtctgtgcccttagcccccgagagatcctgcttgttaatgcactaattcattcagcgatattcctgaatctccgtggctgtggaggcacagggaaactgagtgaggacctgggtgggctgtatcccgcaggcagctcttagcctggggggatgggaggacgtaggggagttcctggtccatgccaggcttggaggatgagtgggagtcaggaggccataggagggagggcgttccaggccaacctgagagagagccagagcagaggagttcgggggcctacaagcggtgttgttttattctgacaccacagggacccaaggcagggtttagagcagggtgtgaatggggctcctactgcgtggaggtcaggtcctccagcaggggagccagctttggccctgccagctgccttggtgtgggaaggcccctgcttagggaggagaatgggcagggctctgccgccaccaggctgtgtgacctcaggcagattcctggcctttctggccctcagtgtctccgtctgcaaaagggatacagtcctgagccttaaagttctgggtgcatagaagaactagtgcggggcagagaaggtgtagcctttggcttgctggacccaaaggaccgaagccataataaccctttctggtggcttgcaggtgtgaacccacatccctgcccccagggccacctgcaggacgccgacacctac

SEQ ID NO: 12229 - DNA, 6000 bp, Homo sapiens
tcctgttgagctcttccttcccagtggttgcttttccccaggttcagatgagataaaggcttgtgtccttgctggggcttcccagctgggccacgatgtgaggccattccttgagagcagtggcacatcgtgtgccacggtggtgtgctttctctcttccatggaatatgggtgattacactgttgctgggcatttagagagcaacggggccatgaggcagaacctggggagggtgtgtggcgtcacctttcccaccacccagtgtgatgcaggttgcgtcacactgtgcacatgggcatcttgtgctggttctctgcattggccctaaaattcacaggggagtatttggggcctttttaaaaataaaaagtgaaacaaggtcttcctcctagtaaagttggaaagcatcttaccaaccattagttcaggtggcctcactctactgcaggatagtagagacactctcaaaaaagtaactgggcgtgtccaggtcacacggtgtgctggctggatggtaccagggcaggatgagatcacagggcctcagaacctccacctgcacttcatctcccaaacccacttggtgattctctgggtatctgtcggtcactgtgatttctcccatcacttccgtggagtcaaaggctgagtaaatgtgtgcagaactgacactgcagggcgcagtgggtttggggagaatggccacctggctttgtaatctctgcctccgttctctgccacatgggagccaatctgcagtgctgacctagtcagggccccacctgacaggctggagggtgacctgaacacccaggggcgtggtaactgagatgggcagcttcagcagtgtctaggactttgaagcaactttaaaaaatgctgaaaaataagaaacacgcatatcttcctttgttccaacagtaggtttagtcagccctaggaggcctgtgcagctgacgttcgctcgcctcccgtgggggtcagcctctcgggtgctctttagactctggcttcccaacatgcgttggtggatgggtcccctgatctttctccgaaggacttgctgtgttacagtatttctttcactttatatctcagttttgcatgggtgataagagaaaagtgcatggggtgaacctgcgtgacatttgtacctggcatccgatagtgcatgttggctacctaacccagccgtcataaatgacctgactcacagcacagcaggaagtcataaatgttttctttccctttgacatttgacagtgatttcacacacttgcgtttcattgctgttgaaacagctgtccatcccatttgttagtgtgttttaatttgctcgagattatgcaggctttgacaaaatcccagcgctttctagccattagcggtaccagcttcatgctgcgctgacggttgctgcacacacagtccccacgtcagatcctgagcttgcaggggagagctccgtcgggctgggaagcgccagccctggtttgcaacagcacacatgcgctgtccagagcctggggcctcctcctgctgctctggagattttcggataactgtaaacgtgatcttactattcagtcaaccatgtggccctctaggtgtggcaccctggctgtcacctaagccaacccttgttctgtcagggtactctgggcgtcactgggcaggctgggaggtccaggcccttggcacctcagccatgtgtgacctgcaggctggggtcaagtcttggcattgcaccatcaggtctgcgaagcctaggggaaccccttcccgctgggtttaatatagccatttgtaaggtgaggggttggaccagagcagcggagatgcctggcaaagtgcagcggtgcctcaggagggaggctgctgctggcatgtcgtgggcagacatgtcgtgcgtcatagcctgcagcacccaggatgacccacggcaaagagtggcctggcctcagatgccagtagtgctgaggtgcagaaacgttggatagatgacctctaagtgccttttcagatgtcattctgtgattccaacttgtaaatgcctttgaccgaaaagagcagctctgtgtcttgtggcagtgccaccttggaagactgtagttgcctgccgaggcactgggggaaatcacggtagcagagtgttagggctgctgccctataggatctgccccagagggcctaacgtcaagtcatgcatctccgggactgatccttggattgttgcatgtgtccagactcacagggtagcgctcaggagcaagcactgagagccccctagtctgccctgggaaggcaccggggctgacaagagctcttgccttccacagcgtctgttcctcacacaccccgcccaaggacgtgcctggcagcggcctggtgctccccgccgcagccacctcacccttgggtttctgtggccctgcagttcctccgtgtcacaaagcagtacctgccccacgtggcgcgcctctgtctgatcagcaccttcctggaggacggcatccgtatgtggttccagtggagcgagcagcgcgactacatcgacaccacctggaactgcggctacctgctggcctcgtccttcgtcttcctcaacttgctgggacagctgagtgagtggctttgcgggtggtcaggattcactgggcgtcttgttccatgatcgttagcagttgggaggctgtgtgtgaactcgggggtctcctggactgctgtcccccctccattcccctcttctccagctcagctgtgccaggccaggagtccggttctgcaagccttggtggggacgcttagtctctagccctgagctcactgctttagagcttgctaaggaaataggacatggtccctgtcagggacccaaagcaggagatgctggagtctggctggcagtccacagtagagcagttaattgcctacctcaggtgggtggctgacttgggagctgattgtgggaaacagcccattctttatgacggcaagggctccactttctggtgtttgtgataagtctagtcagcttaccatgtgtggtccttgcctatcattaattcttccagaagttgtcttttgcttgggtaggtggtttggctgcctctggacctaagggccaggtgaggtagcagtgtatcaagacagtgctccccgccggcacccaccctcaggccccctaacccttgtccttctctccagctggctgcgtcctggtgttgagcaggaacttcgtgcagtacgcctgcttcgggctctttggaatcatagctctgcaggtacacgggccgcgtggtcggggctcccttctctttgctctggtggagcagagcttctgaaaagacatccttgagggttcagtgtcactcccccttcagccccctgcatgtctctgactgcctggagctcctttctcttctggggaagtcgtgagcccaagcagggctgtagaggcaggtcattcggtactgggccatcttttgtcccatttctatgattaccgtgacaagggaagtctcgagcttggctgcagccaggatgctgtcttgttatcacgttgcttcataaagaagaatacttggttattcagaatgaaatgctgggaacagaatatctgaatccacatcagtggtctcagaatcactttgttctctggaacatcatagcacatttcttgagaaatacagaaccacatttttgagcttagatctgtcctcggtctcctacaatggttttgtgtgttttagactccagctgacattggagagacggcctaatgtattatgaagtctgtggaaatgcctttggaaaggctgagactcaagtatctctctcttctttcccctcagacgattgcctacagcattttatgggacttgaagtttttgatgaggtatgtgcattctggttggttttagtatacgctccttctacaggttgagcattgcaaatccaaagtctgaaatgctccaaaatgggaaaaatcttgggcaccaacatgacgctcaaaggaagtgctcattggagcatttcaggttttggattttcagatttgggatgctcagccaataagtatataatgcaaatataccaaaatctgaaacactttgggtcctaagcatttcaggttagggatactcaatctgtatttctaaactcagttaactattggtttgagtagacttctctgggtctaaaccaagcttgtccagcctgtggtccacggggtgaacatggcccaacacaaactcaaaaactttcttaaaacattgagagttttttttgtgatttttaagttttattttttagctcatcacctatcattagcattagtgtattttatgtgtggccaagacagttcttccagggtagcccagggaagccaaaagattggacccccctgtctaaattgtgcctcttagaaacaggttctgaagaggatgttgcagagcccctagaatagtagagactgaagccgtctcttctgacccttatttcacgggtgtggggactccgggtctgagtggaggacagacctgaccacggggacccagctggtcaacactgaagctgtgactaggactcggttgtgtgtgtgttcaggtagcctgtcactgtcgagttgtaaagatacctctgtctcctgagctatgtaaggttttacatgggtgtaactcgagtctgaggtcctgtgcgcatgcctgcctggtcctgcttggcagatcactgggtttggagaaagggaagtaagggccttcttatactggcagcaaggtctccctgcacctggtctcacagacaggccagatcctggtgaggcttagcttccagcccacatatctgttcctcaggaacctggccctgggaggaggcctgttgctgctcctagcagaatcccgttctgaagggaagagcatgtttgcgggcgtccccaccatgcgtgagagctcccccaaacagtacatgcagctcggaggcagggtcttgctggttctgatgttcatgaccctccttcactttgacgccagcttcttttctgtaagtattcctacttgcctgaaccggtctggtttcctgtgaatgctgtccctcccccaccccctccctgctcacccctccctggttgggtattaaccacagcctgggggagctgctgaaatggagcaaacttttttttttttttttttgagacggagtctcgctctgtcccccaggctggagtgcagtgcgtgatctcggctcaccgcaagttccgcctcccgggttcacgccattctcctgcctcagcctcccgagcagctgggactacaggcgcctgccaacacgcctggctaattttttgtatttttagtagagacagggtttcaccgtgttagccaggatggtctcgatctcctgacccctcgtgatctgcctgtctcagcctcccaaattgctgggattacaggcgtgagccaccgtgctcggcggagcaaactttttgatcccattaaaacagaccaaaacatcgtcaatctcttgtgtgtcaagccttctttccagcaaatgaaggccagaacctctgaccttggtggagtgtgcttggcccttggttggccaaggctctccacccgggctccccttactcttctttctttcctcactgttcgtatctttctcaagtaattcctgtgtgtcaggtgtcaggggcaggcctccaggagcttccagagcacacctccggagctgactgagagccctggccgggtagtgtccaggaagagctcctggcgccatggagagaggagagaggatgtttctggcctggatggctgggtgggccaagaagcacttgggaatttagttatggattagagattcatcttggtaaatcacagcctgttactagttgggaacttcagtcttccccaaaccttccacatttcaaagctggtgctttattgcctcctgcctccctttggcttttatctccctacttgcaccagcagccgtct

SEQ ID NO: 12230 - DNA, 6000 bp, Homo sapiens
cttcccactgcagaagtcctactggctgggcagtgggcggacagaagcctgggagtggagctggccgtgggcacgcaccccccgcctcagtgtcatggaggaggaccaggcctgtgccatggagagccggcgctttggtgaggctggcatcagaatggtggctggggtgggcgctgggttcagagtcctgggtggccttggcgccgcccccaccctgctgatccacagccctggtgcagaggagacccgtggcatggaggaggagcccacccacctgcctctggttgtctgcgtggacaaactcaccaaggtctacaaggacgacaagaagctggccctgaacaagctgagcctgaacctctacgagaaccaggtggtctccttcttgggccacaacggggcgggcaagaccaccaccatgtgagtgtcggaggggcagggcggtgggcatctgctgaccagagcaggagtcctagtcagggcagggtggggcccctgcagagggcgtggggtcatgaccccgcccacctacccaggtccatcctgaccggcctgttccctccaacgtcgggttccgccaccatctacgggcacgacatccgcacggagatggatgagatccgcaagaacctgggcatgtgcccgcagcacaatgtgctctttgaccggctcacggtggaggaacacctctggttctactcacggctcaagagcatggctcaggaggagatccgcagagagatggacaagtgggtgggctgggcggggggcggggcaggtgggcggaggccctggggctctgcatagcagcagccccatgccccacctccctgtcccaggatgatcgaggacctggagctctccaacaaacggcactcactggtgcagacattgtcgggtggcatgaagcgcaagctgtccgtggccatcgccttcgtgggcggctctcgcgccatcatcctggacgagcccacggcgggcgtggacccctacgcgcgccgcgccatctgggacctcatcctgaagtacaagccaggtgagtggggtgccgtgtgggcaggggtgcgggcggcgcctcccctgccccctgaccctgggtctggccttgtcctaggccgcaccatccttctgtccacccaccacatggatgaggctgacctgcttggggaccgcattgccatcatctcccatgggaagctcaagtgctgcggctccccgctcttcctcaagggcacctatggcgacgggtaccgcctcacgctggtcaagcggcccgccgagccggggggcccccaaggtctgtgttgaagctgcctgagctggcttcgggccaccttctccccgggacccccacctgagaatccacaatggagaggctgggccctcaccgtcacccgctgggcccaggatgcctgctggggcctggcccgccctctgcaacgcccgtatcttggagaggctgggtcctcagcgtcaccccctgggcccaggatacctgctggggcctggttcttcctctccaatgcccatatcttgacccagttgggttcccattgggggtccctcctcccagcccctgagtgaattccttcctgctcccacgtcccccacagagccagggctggcatccagccccccaggtcgggccccgctgagcagctgctccgagctccaggtgtcccagttcatccgcaagcatgtggcctcctgcctgctggtctcagacacaagcacggagctctcctacatcctgcccagcgaggccgccaagaagggggctttcgagcgcctcttccaggtgtgagggcgcacgggtcggggggcagttgcaggtggtggaggtgggcgcactcctgcctgggcgtccctgccgcagcctccccctccaccgcccctgcagcacctggagcgcagcctggatgcactgcacctcagcagcttcgggctgatggacacgaccctggaggaagtgttcctcaaggtgtcggaggaggatcagtcgctggagaacagtgaggccggtgaggggcctggaccacttgctcagcccaccccacccacaaggccccagctcgggcctgcgctgtcactcctgcctggtgtctgggggcgccaccctggtcctgggtggaagccaggggacgccccggggttagcctgcggtcctaggtgggtggtcctggtggccagaggtcccggacaggtgtatgagcctgggaactggggtcaagaccggggatgggggtcctgggcaggcctaggggccagtagccctgagtgtcccctcggcccttccactgcggcagatgtgaaggagtccaggaaggatgtgctccctggggcggagggcccggcgtctggggagggtcacgctggcaatctggcccggtgctcggagctgacccagtcgcaggcatcgctgcagtcggcgtcatctgtgggctctgcccgtggcgacgagggagctggctacaccgacgtctatggcgactaccgccccctctttgataacccacaggacccagacaatgtcagcctgcaaggtgggggtggcagggtgaggctgggacagcaagggagggggagcagggttgcgggggagcggcatgagggcagccagtagggagagggtagcgtgcaaccacctgctcagcctctacctctctgcacagaggtggaggcagaggccctgtcgagggtcggccagggcagccgcaagctggacggcgggtggctgaaggtgcgccagttccacgggctgctggtcaaacgcttccactgcgcccgccgcaactccaaggcactcttctcccagatcttgctgccagccttcttcgtctgcgtggccatgaccgtggccctgtccgtcccggagattggtaggccaccggctggacaggggtgctgggcttgcctccccccaccgcccgctgggagccctgatgatgcccactcctgagcttcctgactctgggcctcaccccacacctgaggctgggcacgcaccggggttcatccgggagtcctgtctcctcgggtcccagaccccaggcgtggatcccttggggttgggggaaggggaccgaggcttgggggccgctggccagagggcagaacctgctcaggcctccctgctcgccctgccaggtgatctgcccccgctggtcctgtcaccttcccagtaccacaactacacccagccccgtggcaatttcatcccctacgccaacgaggagcgccgcgagtaccggtgaggcctccagcgggggcagccttggtgggtggggcgagtgaaggggcggggacagccttggtgggccaggcgggcgagggggcggggctggcgaggggcggagactggcagccccacctcacactgtcggtgcccgcaggctgcggctatcgcccgacgccagcccccagcagctcgtgagcacgttccggctgccgtcgggggtgggtgccacctgcgtgctcaagtctcccgccaacggctcgctggggcccacgttgaacctgagcagcggggagtcgcgcctgctggcggctcggttcttcgacagcatgtgtctggagtccttcacacaggggctgccactgtccaatttcgtgccacccccaccctcgcccgccccatctgactcgccagcgtccccggatgaggacctgcaggcctggaacgtctccctgccgcccaccgctgggccaggtagtggttcagggggcctgctgggggggcaggggcagtgaggggtccttctcaccgcaccatgctgtgcccacagaaatgtggacgtcggcaccctccctgccgcgcctggtacgggagcccgtccgctgcacctgctctgcgcagggcaccggcttctcctgccccagcagtgtgggcgggcacccgccccagatgcgggtggtcacaggcgacatcctgaccgacatcaccggccacaatgtctctgagtacctgctcttcacctccgaccgcttccgactgcaccggtgagctgggtggggaggctgtgggtgagggtggccggccaccagccacctagtctcaactcctgcccctctagcctcactgcctgcctagcctcaccgcccctcccacctgcctgcccaggtatggggccatcacctttggaaacgtcctgaagtccatcccagcctcatttggcaccagggccccacccatggtgcggaagatcgcggtgcgcagggctgcccaggtgagcgaggctgcgggcctgggccccgctgtgtgtagcgccgcccgaggtctgcagggacccaggtctgaggtcctggggcctttctgtgtcctcttccttctgcaggttttctacaacaacaagggctatcacagcatgcccacctacctcaacagcctcaacaacgccatcctgcgtgccaacctgcccaagagcaagggcaacccggcggcttacggtgagctgacataggcagggcggggcggggcggggaggagctggggccggggcggggaggagctggggcctgaagctgccgcccccgccccgccgtgtgcaggcatcaccgtcaccaaccaccccatgaataagaccagcgccagcctctccctggattacctgtaagtgtggccagtgggggatgaggtggggcaggtgggcactgcagccccggccgtgaggactgagggcttccttgccccaggctgcagggcacggatgtcgtcatcgccatcttcatcatcgtggccatgtccttcgtgccggccagcttcgttgtcttcctcgtggccgagaagtccaccaaggccaagcacctgcagtttgtcagcggctgcaaccccatcatctactggctggcgaactacgtgtgggacatggtgcgcccggcgtggccatggggtgccccggcccttctcatcccccatccccgccctgccccgggtctctcaccagccgcccccacccctgcagctcaactacctggtccccgctacctgctgtgtcatcatcctgtttgtgttcgacctgccggcctacacgtcgcccaccaacttccctgccgtcctctccctcttcctgctctatgggtaagcggaagcggaggggggagcggcctcaggtgggaccggggctgcctggtgaccactgcccgccacctgcccgcaggtggtccatcacgcccatcatgtacccggcctccttctggttcgaggtccccagctccgcctacgtgttcctcattgtcatcaatctcttcatcggcatcaccgccaccgtggccaccttcctgctacagctcttcgagcacgacaaggtggggcggtgacgacatggtgggggtggcggaccctgcggaggctgtgcccctcaccccggccacccctgtgcccctgaccccggccaccccgcaggacctgaaggttgtcaacagttacctgaaaagctgcttcctcattttccccaactacaacctgggccacgggctcatggagatggcctacaacgagtacatcaacgagtactacgccaagattggtgagggggcccgtggggcggggaaggcggtgggggccccgcaaggcccagagcacaggccctgagctgtctccccgcaggccagtttgacaagatgaagtccccgttcgagtgggacattgtcacccgcggactggtggccatggcggttgagggcgtcgtgggcttcctcctgaccatcatgtgccagtacaacttcctgcggcggccacagtgagtggggggcggggtggggcgggggcggggcgggagcagggatgggttcgggggtggggcagggtaggggcgggggtgggggcagggatggggcaggagggggtgaggcaggggacagcagaggggcctgcccacccttcttacatgccacagccagaggatgcgaggctggtggcagggaggggcagtgggggtggcgagctgctggacactgtccaccctgtcccccaaggcgcatgcctgtgtctaccaagcctgt

SEQ ID NO: 12231 - DNA, 6000 bp, Homo sapiens
cacacccctctacctgggagccacagcgggtatgcgcctgctcaagtgagtgtgcctgtgccctggccctgtccccatgatggcctttggctgtgaccccttgcagggcggactccgagcacccctacagcaggctcacagccacctggggagaaggcctcttggagttctctgtgttttgcagcctgaccaatccagaggcctcgaccagtgtgctcatggcagtgactcacacactgacccagtacccctttgacttccggggtgcacgcatcctctcgggccaggaagagggggtgtttggctgggtgactgccaactacctgctggagaacttcatcaaggtgggcccagcagccagccaaagagccagggggcgtgggcgccctcggcccctggttgaccccacactcccctctccacagtacggctgggtgggccggtggttccggccacggaaggggacactgggggccatggacctggggggtgcctctacccagatcacttttgagacaaccagtccagctgaggacagagccagcgaggtccagctgcatctctacggccagcactaccgagtctacacccacagcttcctctgctatggccgtgaccaggtcctccagaggctgctggccagcgccctccaggtgcccctccaccctggctcacctgcactgcactgttccctcctggagcagagcctggacagccactgtgctgtggaaggcttctccaggctgggctttaattggctggaaagacaggtgggagggtcagagcatgagcaaaggcccagtggctgggctgggcctggagaagggagggccagggacggctctcagagggagcctggtcaggggcgttgggatctgtcaagcaggcagtggggagccatggattgcccctgagcacaaaagtgaagttgccagagtgagacctgtgggaggtttgtcaggctggtcctctggagcggtggtggtgccaccctgtcacgctggtgattcccccagacccacggcttccacccctgctggccgaggggcttttccacccaagtgctgctcggggatgtgtaccagtcaccatgcaccatggcccagcggccccagaacttcaacagcagtgccagggtcagcctgtcagggagcagtgacccccacctctgccgagatctggtttctgggctcttcagcttctcctcctgccccttctcccgatgctctttcaatggggtcttccagcccccagtggctgggaactttgtggtgagtaggggcaggcgggtggctgggaactttgtcgtgggtagggacaggcgggtggctgggaactttgtcgtgggtagggacaggcgggtggctgggaactttgtcgtgggtagggacaggcgggtggctgggaactttgtcgtgagtagggataggcgggtggctgggaactttgtcgtgggtaagggcaggcgggtggctgggaactttgtcgtgagtagggacaggcgggtggcagcaggtgctctgagccgctggggttcggtcacagtgtgactgcgccccctacaggccttctctgccttcttctacactgtggactttttgcggacttcgatggggctgcccgtggccaccctgcagcagctggaggcagccgcagtgaatgtctgcaaccagacctgggctcaggtgagccccgctcccactccttcagggctgtgcggaagggctcagcctccgcctccgcatgcctccccagccctgcatggacaggcctctcggagcacccgctgcagtgggggcgatggcaggcattaggctgactccagaggtggcgtggctgtggccggtaggctgtgaacaagtcgggcgggttggagaagcttcgccaggcccgaccctcatcccagatctggagggcagggggaggccggtgcccaggtttctggcttctgccactggttccctccatggtaccacacaagggaagatggaagtgggtctgggcaccgggagtgtgcccaccggagactccaagagaaacgtacgagtcgtcccaggaccggggtggtgagcgaggccccattttgtcctcccagggcctagtctcagacagactggggtgagggaggtggggacaggcggcgagccagcgggcagactcaggcctggagctcgtcctgttcccctggccacacaccaaggtgttgctgcctcctgctccctggtggccatgcctgctgtccctcctcactggccttccaggcatgggcgctggctggggagggatggaagcgtgccctgccgggggtgcccctcggactcggtcttgccattcgtgtccgggcctgtgtggtggtctctggcctcgcacggcccgtgtgtgtctggggaggggtgaagcacgccgccggccccctctccccgtggggccgagacctcctggtggtcgcctgcctgacggtgtcccgcccgcgtcccagctgcaagctcgggtgccagggcaacgggcccgcctggccgactactgcgccggggccatgttcgtgcagcagctgctgagtcgcggctacggcttcgacgagcgcgccttcggcggcgtgatcttccagaagaaggtgggctggggcggggcggggcggggccgaccttgcggggcggggcctctcgggagctgaggccacgcccttccccgcaggccgcggacactgcagtgggctgggcgctcggctacatgctgaacctgaccaacctgatccccgccgacccgccggggctgcgcaagggcacagacttcagctcctgggtcgtcctcctgctgctcttcgcctccgcgctcctggctgcgcttgtcctgctgctgcgtcaggtgcactccgccaagctgccaagcaccatttaggggccgacgggggcagctgccccatccctcccccaacccctgtatccccaccccgtactcccacccctcccacaacccctgtacctcccacccctgtatccccacccctccacccacccctctcccaacctctctccccgcccctgtatcctgcattcctccacccaccctctatcccccaccgctccaccccaccactgtcttctccatccttccaccccaccctcagcgtctctgcccctaaggcagcccaggaaataggaactgagactctggtacccacaggagcctgggtgggcaaagagcgctcaatccagctccttgaacccctccagcccgcttcagcctgggcatcactgcaggccccgtgctcctcctcctcctcctcagggctgggtctccagagagtggggccttggtcctgagaatcagcccttagaggctccttctgtgtagtctgggtctgtactggggagggtcacagcccacgggctggcagccagcccagcacctacttgtaaaaattttgtaataaaaagtttttcctagagacgtgaaaggagagtgtctgtggggtggggcatccttgctgtggcctgtgcccccaccttcccgctgttctagccgcacgggcctgcccttggtcctgagggtggacaccatccctccctactgccttctgctctggagccaggcctggggcactggctgctgccctggtgtgccgtggcagcctagagtagctgcaggatggctggcccgagggaatgttcctgggcccttgagtcttctctggccagcagagttccccaaaaccatcacatccagatctgcgttggtgaccaaggccagactgaaggttgggtcctggtacagtgagcctgggggtgagggtagaggtcagggaggtggcggagagtgggtggcagccagccaggcggcttcctagggggcagtcagtgctggtagagactggcgggagggcaggcccacatcaggaggtggcacaggggtgggagatgagatcaggaccaggacccataggcaggaatcttgcacagaacctggctgtggagctgagccatgcaatggcacagggcaccttgcccttctcacctgggactgagtgtcctgcacctccaaaaggcatcctgcagccccagccaggccctgcagcccctccccaagccagttttctccaggatgggaaggcctggtcttgcccactcgcctcctcaccttcctgggaagtgagcttagacactgtctctatgctcagtgccctggcgaggagggtggtggttcttattctgctcttccctcccctcttcaccatttttttttaaagtcatttgataaacctgagggcagccagccccagctttggagttctgagactggaaggaccaaggggacaccccgggttggaggtctcactcttgttctctgaatgactagtcaaaggaggtttctagtgggatggggtgggcgtgctcttgggaggcaacaggtgaggtgcaaggggggcatcagagatgcccgttgtcagctgggcacagtggctcacgcctgtaatcccagcactttgggaggctgaggctggcgtatcacctgaggtcaggagttcaagaccagctgaggcaacatggtgaaaccccgtctgtactaagaatacaaaaattagcccagcatggtggcacgcgcctgtaatcccagctactcaggaggcagaggcacgagaatcacttgaacccgagaggtggaggttgcagtgggccgaaatggcaccactgcactccaggctaggcgacagagacgctgtctcaaagaaaaaaaaaaaaaaagatgcccattgtcctgagggagctaaagggctgtcacctggggaccctgaacaccttggacagctcccagctccggtcctcagtggctccggatcactcttgccccctggtggcctcactgagcgcggccgccgcggctccagccaaagctgcagtcggggccggggccgttctgtgttcctgtatttgcttttcccgcgagtgggggtgcccctgcctctgtgggcacacctgtgccttcctgtgcacctgcccagctcgtgagcacctgtctgcgtgcgcccggcgctcctgtgtctctgtgcgctcgcgaggctaggcccacacaggtcctctgccccatcgcgggtgcgggtgaggggctcggagtcctaccgggaagaggccagaagggagcgcatcctggagaagcccacccgcggcccaaacccagccggacttctgggaaccgcaccggccccagagaccgcaggtgccgagacaccctgaggccgagagaggtccagcgaggcccggagaggggaccagaactggagcagggggagggggcgcagtctggagccgccctcccgccccctcaggtggagcgcgcaggcgcagtctccgcgtgcgcgcctcgccggcgcctccatcccggatccttgctgcagcgtcagcgccgccgcccgtgcctttcctcttcctcctcctcctccttggcatccgcctcttcttcctcctgcgtcctcccccgctgcctccgctgctcccgacgcggagcccggagcccgcgccgagcccctggcctcgcggtgccatgctgccccggcggcggcgctgaaggatggcgacgccgctgcctccgccctccccgcggcacctgcggctgctgcggctgctgctctccggcctcgtcctcggcgccgccctgcgtggagccgccgccggccacccgggtgagcgagcgcgctgggcgcaggccgcggggcgccccggggccgggatcgccgggcggggaccgggttgccgggcgccgccgccctcgtcctgcccaggcccgcaggccctgcaggcctggtccgctggtggcgggggccccgcctcgcccacgatggaataaacaggcctggccggagggcgcagcgcggagcctccaaaaggccgcgccggatggggcttctgccggttcccagaggcgtaccttacattcatggcttcttccgccgggagcgcgtctggctcaggcctccgcgccgcggccatctggctctgggcgggc

SEQ ID NO: 12232 - DNA, 6000 bp, Homo sapiens
aaagtcactctttgaaatgttaaaaagaagaatctccttggcttccatacagagattgcactggagacattgaagcatggatctactaattaggaagttgtcacattggttctagggattattagaggtgacctggattaattgatgatagtgtgaatagaagagtgatttttttaggaattagattgagtagaacctggtgattgaatatggaatgtaaggtagagtgggagatatcaagagcacctttgaggtttttgcctttaacaaccaagtgaatggccatgccctttataagaagtaaaacaacagaaaaaagggaaggagcagatcgaaggtttttttttttgttttgttttgttttgtttttgtttttgttttttagatggaaaaaagagacttgagtatgctgatgagaaatagctaatagaggccagacgcagtggctcacgcctgtaatcccagcattttgggaggctgaggcaggtggatcacttgaggtcaggagtttgagatcagcctggcaaacatggcgaaaccctgtctctactaaaaatacaaaaattagcgcatgcctgtagtcccagctactcaggaggctgaggcaggagaatcactcgaacctgggaggtggaggttgtagtgagccgagatcacgccactgaacgccagcctgggtaatagagtgagactccatctcaaaaaaaaaaaaaaaaaaagagaaatagctaatagagagggagatttatcctgagaacactggaaggggctggaatcctgaagtcatgtgatggtttgtccttagataggaggagggacatatccactgtaaaaaggcagaaggaataaaggatagctgttaaagagtcataaattatgtagtgagatagtgtacatagtttctatttaatgatctgcattttcattgcactgaagtatgctcatttcggggtgcggagggggcacaaaaaacatgaagggagagcgcatacaaattggaaatagttgtgaaaacatgtgaagaggaaaattaaattgattccagaaatgtagtagggttgttggtgagggatgaaggtataagtgcttctgatctgcctagttgtggaactttttttccccttaacttgtgctcagccaccctaatgcagatccagagaaggcaagtagtacattcctccagagctgggttatgctaggtaggtttaaccaaaaagacaaaagagcagaggggttgagagtattgacaaaacagtaattgaaatgatggatatagcatggaatcagtattggacggagaaagaagtgaagatgggaggatgtacatagaagtaaaagggccagtggaggccaggcgcggtggctcaggcctgtaatccccgcactttcggaggccgaggtgggcggatcacgaggtcaggagatggagaccatcctggctaacacagtgaaaaattagccaggcgtggtggcgggcgcctgtagtcccagcttctcaggaggctgaggcaggagaatggcatgaacccgggaggcagagcttgcagtgagccaagattgactgcactccagcctgggcaatacagtgagacttcatctcaaaaaaaaaaaaaaaaaaaataagggggccagtggattggagatttccatgagccttccctctctgctccctgcacaaaaaacccaaaaaaccctaaaacacttagtagaaatacttaattaaggagaccagataggcagagctaatgggctgggagtgatgtgaaaaagagatttgagaggcaatgttgttttgaatgctggcaaggaaagtcaagggactgtgactgtgtgttgaagttggtgattgaggtaggatggagcataggatcactgaaaatcaaggaatgaaggctgggcatgatggctcatgcctgtaattctagcactttgggaggctgagatgggaggatcacttgaggccaggaattcgagaccagccttgtcaacatagcaagacacccatctcttaaaagaaaagaggctaggtgcagtggctcacgcctgtaatcccagaactttgggaggccaaggcgggctgatcacctgaggtccgttcaagaccagcctggccaacatggtgaaaccgtctctactaaaaatacaaaaattagccagtcgtggtgatgggcacctgtaatcccagctactcaggaggctgaggcaggagaatcacttaaacctgggaggcagaggttgcagtgagccaagatcacattactgcactccagcctgggcgacagagctagactctgtctggaaaaaaaaaaaaaaaggaatgaagaagaatctaaagtgttttcatggtttgtgcttctgggtgtggaagaatgatggtggtaggaattagaaaggaggagaccttgaatcagatgccttggtcttcagtgaatgaaggagtgtccctgaaatcaatagatgtctacgattaatagaggaaattgtggaatagtcagatgcttgaaactttaatgagcagaaattttaaaaacacaatacagaaataatggtcttgcaacattaaagaggaaggacattgactctttggaaattgaccatggactcaagagtatgcagagtatcagagaaatttctacttaaaagttgtagagctggaggttccttataggggatttagatttcagtgaagagtttgatagaagtatttttcgtggtttaattaggcagaaggagctatatatgcagttaccacaggttgagcttccctaatctaaaaatccaaaacctgagatgctgcagaatctgaaactttctgagggctgacattatgccacaagtggaaaattctacacgtaagtacttaacacacactttgtttcatgcacaagatcattgaaaatattgtataacattcccttcagactgtgtgtataatgtatatgtgaaacataaatgaatttcctgtttacttgggtctcatccccaagatatgtgattgtgcacatgcaaatatttcaaaatcttaaaaaaaaaaatccgaaatctgaaacacttttggtcccaagcatttcagataagagatactcaacctatagaagcttctttttaaatatggatatatatatgtatatataaagagaatgtaatatagataagtacaagtttaatgtttcctataatatcgaattccagtttaaaatttgaatttaattatattttgttttcctcaggatttttaaaaagtcgagatcgtgcctatgcaaaattctatacccttttatccaaaacacagatttttattcgtttcattgaagaatgcagttttgtaagtgataaagatactggattagcattttttgatgactgcatagaaaaggtaaaagtttgtacttatactagtgtttagaaaaaaaagtttgccttacctgtgtaattatcattgttattgttagtctagagtgatataaggaaaacagagtagggttgtgtatgtgtgtgtatgtgttaccgattctgggctgaatatatgaataaaattctttgtggtttcaagtttctaccacatatagccaatttttctattctttattcattgatccattgattgaaacagcatctcattctgttacccaggctagggtgcagtggcatgatcatagctcattgcaactttgaacttcttgcctgaagtgattttaccaccttagccttctgagtagctgggactacaggcatgtgctacgcccagctagtttttttaatttttggtagagatgaggtctcactgtattgcccaggctggtctcaaactcctgggctcaagtgatcctcccgccttggcctcccaaatccttgggattgcaggatgagccgccatgcccagccagtaaattttctctttaaatctcactttcgttttacaactattgagttgtaaaactaagaacattttcttgagccttgtgagtttatatttttttaatttaaatgaataagatttagtttaagatttaggttttttaattaaaaaatgtttagttttatgggtaatagaagttctatgttcttttgttttaatgtctttccagattcttttgcctaatatgtttcttttgttctaatggagggtggaaatacgttaaattttaaagctttacccacccatcctaaggaagttaaaattgattcttgacttagttataatttttcctaacttttaatataattcttatttttgctaagtagatcttggggccaattgtttatgcaaactgtatattatataacatttgagattgtatccaaaaaaagttgaatattatgacattaatttttatggccccctcatgattcatatgccttagaagatttaaataattttctcctatcagtgtgatccaaaattccagggatataattaaaactattcaacatttttgtttatttacaaaattgatattccagtatcttccagttatatgagaagtttaatgtcaatcactaataaaggggcttaataataatgaaattttttatttgagaagccagataaccttgtgattggtcatcttttgtcttaaggtttacaaaacaactaatcaaaatagttttctatcctaatagccacaagtaaaaaattatgctttagcctaagagtatgtattcagcctaaaaatatactgtgcatgttttgtatcagctggtactgaaaaggggtagtttttttctaaatcagaatgtaagataaaaatgtctattaaattcatagtggacattttcattaagaatctgttttctttttttctagttgtttcctgataaaggcacagagaaaacagataaggtatgtttttcttagattttaagggttgaaatttcagaattagatcttgtttgtatgcaaattaattggggaaaaataatgattttcaggttgattttgattcagcagaagataccagattgatagaactagatgattcacagaaaagtgagcatactgtatttataatgccgccagagccacctcctgatgatggaaaggacctgtcaccaaagtacaggtagtaggaagttttaaaagagcttaatggcacagcctatcagtttcttttaatttttattagtagatatgtatattagtcttttgtgaaactcattttcagtattagttcagtgaactaatgtagataaatattttatggaaatgccactaggtgttataatttaagaattggatggtattgtcagatgttgatcattgtttaccttagtgtttgtattttaatctttaaaagtttcaattctgaagaagaaaaatgatacttttatgaggctccctgctccctttgggagtttcattttgaaacaaagactgtgaaattcttatgaattagtaatttaccaagaaaacttaaggtagagggccaggaatttattctttattaagataaaggataggatttggatgtgactcttttaagaaattagaatggattttgtagtttttttattgctataaatttaataaacttagaaaatcaaaccaaaatggaaaactaatacatcattctagcaccaatacttgtgtctcttaacaattgtaggtatgtatgtatcatgtggatgtgtgtgtgtatgtattgcatgtatgagttcatcaggtagattctctttgtaatctatgtttgcctttagtggtctgaacattttcccatgccattaaatatttttgtgccttatcatttgtaatgaccacattgtatgcatttattatgatttatttaactagcctcatggatttgtttgtagttctttgctatctatatctttgttattttcttaggctgcatttctaaaagaatttctaaaatagaaagtaaagtaagtacatcccaaaatagagaattaatgtataatatcaagaggactggatcagaatgaggaatgtatctgggattgaatggcttgattaaatactattttgatttcatgttaact

SEQ ID NO: 12233 - DNA, 6000 bp, Homo sapiens
gtgacggagtctgctctgtcgccaggctagagtgcatgggcacaatctcggctcactgcaacctctgcctcctgggttcaagtgattctcctgcctcagcctcccgagtaggtgggactacaggtgcacgccaccaagaccagctaattttttttttttttttttttactagagacggggtttcaccatgttggccaggatggtctcaatttcttgaccttgtgatccgcctgccttggtctcccaaagtgttgggattacaggcgtgagccaccgagcccggccatttttagatttttttttatagcccttttacccctcccacttcttgtgctgtcttggtgtgtgtatgaaaaagagagagagagagagaggaaggagagcaagagtgagagaaaaagagaatatggttacttagccctttttcccaaatctgtttttgcttttggggataggatatggttatggtgaagtactccacacagaccccaccaagtttgcctctcctgcgctacagccactgagcaggtgactgaggcgctgttgatccagggtcatatccttactcgccctagaatgtaagctcaggcagggcagaggccatgcctgacatgtgcatcccaatgctttacacagcctaggtgcctagcacatgctagatgcttggtaaatatttgctgaatgaaagatcaaatgaatgattgcagcaagcaagtcctgtaggcatcctggagcccaaggattctgcagtaggcagctttcacagaggttcttccagtgtagtggctctagctctgggtgaagtaggatcatcaatgtcggcccccagggttcacagctgttctgagccccgcccccaggtggcagggcagcccagtcagtcagtcacgtgctggcggctggccaatcatcgggggcggcgcggggaggggtggtgtggacggagaaagtgaaaggtgaggcacggccctgcagattttccagcggatcccccggtggcctcatgtcgcgcagtggaaccgatcctcagcaacgccagcaggcgtcagaggcggacgccgcagcagcaaccttccgggcaaacggtaactgcaccgcggcagggactcgctggggcgcggagccgagccctccccttccttaggaagctttcgtcccctccgaaggttggaacgctcatcccgagccagaccgacaaggcgtacagtctgcaggcctgtacgagcagcaggccaattggcgctgggaaagtccaatcctgggcctctagctcctgagcgggacagggccgagagggcgctcccgagcttgggcctgctggtgggtgagacccaggagagagggagctagagagctctgaggactgatcttgactgtctgcccccagaccatcagcatatccgctacaacccgctgcaggatgagtgggtgctggtgtcagctcaccgcatgaagcggccctggcagggtcaagtggagccccagcttctgaagacagtgccccgccatgaccctctcaaccctctgtgtcctggggccatccgagccaacggagaggtaagcctgtagagccctgcatctgcaggctgggccacggggagtagttccctcttagaactgtcctccacccacagggatagtgaacctccttctgggtcatatcccaccaagctttttggtcccctagggtgggccttccctactcccttgtagcctgtccagtctttgaagcccaccaggtaactggtggtatggggcagtgagtgcttctagcctatccttgtcggtaggtgaatccccagtacgatagcaccttcctgtttgacaacgacttcccagctctgcagcctgatgcccccagtccaggtaacctggctccaactgctgctggggaggagggtggctagacctcttgagggacttctgctgcagagagtgatactcctttacctcaggacccagtgatcatccccttttccaagcaaagtctgctcgaggagtctggtaactatggatttcccctcttacaactttcaaaccagagttggagactcagcattggggttcggccctgcccgtagcacagccaagccctacctctcggttatcttttctcccgtcaccacccagtaaggtcatgtgcttccacccctggtcggatgtaacgctgccactcatgtcggtccctgagatccgggctgttgttgatgcatgggcctcagtcacagaggagctgggtgcccagtacccttgggtgcaggtttgtgaggtcgccccttcccctggatgggcagggagggggtgatgaagctttggttctggggagtaacatttctgtttccacagggtgtggtcaggagggagttgacttggtgtcttttggctaacagagctccgtatccctatctgatagatctttgaaaacaaaggtgccatgatgggctgttctaacccccacccccactgccaggtaagggtgtcaggggctccagtgggtttcttggctgagtctgagccagcactgtggacatgggaacaggattaatggatgggacagaggaaatatgccaatgatgtggaggcttggaggtaaaggacctgcctgttcttctctgcttttgccccttgacaggtatgggccagcagtttcctgccagatattgcccagcgtgaggagcgatctcagcaggcctataagagtcagcatggagagcccctgctaatggagtacagccgccaggagctactcaggaaggtgggagagagccaagccctgtgtccccaaggagtccctaactttcttatcccatgagagaggtgtgtaaaggagaaagctagaggtgaactagtagagagagacttgctaggaggccttagcaataatccagtaatctaaaggaaagatgatggtgacttagactcgggtggttagtggtagaggtggtgagaagacatcagatcctgggcacattcttttcttctgcttcccttgcctatttgctgaccacactccggctcctatgtcaccttgatgacttcctatccattctgtcttcctaggaacgtctggtcctaaccagtgagcactggttagtactggtccccttctgggcaacatggccctaccagacactgctgctgccccgtcggcatgtgcggcggctacctgagctgacccctgctgagcgtgatggtcagtctcccaagtaggatcctggggctaggcactggatggaggttgctcccagtagggtcagcatctggaccccaggctgagagtcaggctctgattccagatctagcctccatcatgaagaagctcttgaccaagtatgacaacctctttgagacgtcctttccctactccatgggctggcatggtgaggcttttcaagtacctatatttagccccaacaccatttctgggctcctggggctcagcctagtgaactgcaacctcaaaggagcaagccttgaaacagttgctgggggaagtggccagagtagagatgctgggactgagggtggagcagcaaacttggtgaaactacatctccaatgtgctttctaatctcctgccagctcttctcaagcaggggatcctgggagatgtagttttcagatacctggttgggtttgggagtaggtgctaacctggataactgtaaaagggctctctctccccactgtctctcttctttctgtcaggggctcccacaggatcagaggctggggccaactggaaccattggcagctgcacgctcattactaccctccgctcctgcgctctgccactgtccggaaattcatggttggctacgaaatgcttgctcaggctcagagggacctcacccctgagcaggtcaggactcagaacagtctggcgtctccagactctcacatgcagtatgtgcaggcacctgatacttctgttgcccttgtgctccagtcattgcacaaggcagaaaacagctctggcaggaagggactgccaaagttaggagccctagggcctggaaggagagtatggtcctcagatcccccttctctcctgcttcctccagggaacccaacagtcatgaccctgatagtttcccataacaacctgggcattccttgggactcaggagctgctaaactctttcatcccctggtggcttcagcagtccttatcaccagcctcacaatcccacaggcccacccccagtgggcctgtggcattcatatttcatattcatatttcaaaccacaatatccagcaaaatgtctcctgagcacccagaactccataccatcggccgggtgtggtggctcatgccttaatcccagcactttgggaggtcaagatgggaggattgcttgagcccagaagttcgagactagcctgggaaacataggaagccctcgtctctacaaaaaaaatttaaaaagttagccaggtatggtggcatatacttgtggtcccagatacttgggaggctgagataggatcacttgggcccaggagtttgaggctgcagtgagccatcatcatggcatcattgcattccagcctgggcaacagagcaagacctcgtctcaaaaaaaaaaaaaaaatgaagtccatgccaccattcttggcagcccagcccttatcctccttaattgctccctgtcccttttccaggctgcagagagactaagggcacttcctgaggttcattaccacctggggcagaaggacagggagacagcaaccatcgcctgaccacgccgaccacagggccttgaatccttttttgttttcaacagtcttgctgaattaagcagaaagggccttgaatcctggcctggaatttgggcagatatagcattaataaaactgtgcatctcaaacttttatcacatactctaatatcagaggagtgtgaaccttcagagatctagggttaaaagctaaaggcatagctccagctacaacttttctttgtctacagatgtgtaaaatcttgatgcaaaaatctaccccaaatttctgaacaaaattaatattcagtattatatctagcctatagattctcttactcttggtgtaatgacagcattcccagtttaggaaactgttttaaaatcttgtgtcttggttgtggctgaggctttgggaaggccagagccccctttgccaccacccctagggtgtcagctccaagcctgggcctgagggtttgatggggagcgggtgagctggatcctgatcccagtggtcagtggccagatcctgggctgctggccagaaccctggctttgtgagtggctgcagcttggctctgctccagcccacaggggctaaaggggcgggtagggagtgtgtagggagcgtgtacgtggctttgtgtccttggctcctccagactctcacatgtgcgggcaccatatacttctgctgcccttgtgccccaatcattgcacaaacagaaacagctctgacagagaagggactgctagagttaggaaccctagggcctggaaggaaggtatggctctcagagtgacctggggtctattcagtcccctctggacctgtttccctggcaacgctgtgggaacaacagtctatgcaacacaggagacctgatgccactggtgtcctccaaattttaaggcgaaggcaggcattgtgaatgatgcagggatggccagaatggtttttgccttcgttctttccccaggggaaccaagcctgtgggtggggaaatcacactaaggctggacagtgactgaatctggcccaggagaaacttggctgcctgccttccagaccagggtttttcttccctgagatcctggaggggaagtacctggaacttgggagtgttgccctggtctggaagatctgatagacatagtatgcacacatttccctcgagcttcccatgactggggagtagatgagaaccctgagtgggtggctggtttcttgaggcatacatatacccgacacaccttacacctctgatttg

SEQ ID NO: 12234 - DNA, 6000 bp, Homo sapiens; identical to SEQ ID NO: 2586

SEQ ID NO: 12235 - DNA, 6000 bp, Homo sapiens
cttctatttgttcctaaataaataatttacaatgaatagatgggagtttttcatgacccatttttatttcttgtttacagagaaaatgacagagtggtcatggtcaatggcacccccatggaggatgtgcttcattcgtttgcagttcagcagctcagaaaaagtgggaaggtcgctgctattgtaagtactgggtttgctttcagcttgccttaatagcattttggttttttgcccagaagaaaattaccccttgcttttaagcatttgacagaattacataacctagggaccgctgttcttggatcctcagtacttttggaggggtgtgaagatatgtgtaagttatcttcctacttttccttgtgtcttctcctgaggccagtgattctctgatctgagttagtttgccttaggaaccaagttaggcaattattccctaagagaattagctagattcagaatactggtaaaatagtattaatttagaaaaaaactttcagctcaaaaactcacttgtaaaggcccaagcaaggtatattatatcttcatagactaagagtttcattagaagactgtctataatcttcattcatctattccttcattcattcactggctgagaatcaactgtgagctggatgccattaggccctggggccaatctgtgttgcaagatgtgttcactccagtggggcaggtagacacacacagtgagaatggtaataaagtgtgcttaggggcaatgctagtaggcatatacccacatatatggttgtgtgtgtgtgtgtgtattttttttttttttttgagacagagttttgctcttgttgcccaggctggagtgcaatggcacgatcttggctgaccacaatctccgcctcctgggttcaagcgattctcctgcctcagcctcccgagtagctgggattacaggcatgcaccaccacacctgtctaattttgtatttttagtagagacggggtttcaccatgttggtcaggctggtcccgaactcccaacttcaggtgatccgccagccttggcctcccaaagtgctgggattacaggcgtgagccacctcacccggccacatatatggtatttaatgtttttcaactttatattatgaagattttcaaagaaaaaggaaagttgaaagatcagtgtaataaacatttatcttctaaaatattactattctgccatctttacttggtctctgtatgtatataaacactcatgtctttctgggcaaccatgcgaaggaaagttacagacatgacagttcatttctacttacttcacatgcatttcctatgaatgaggacattcatctatataatactattatccgatctaagaaaagtaataattttacagtattatctaaaatccagtccatatctcaagatgtctttttcatttttagagatgggatcttgttgtgtttcccaggctgatcttgatctcctgggttcaagcgatccttccacctcagcctcccaaggtgctgggattacaggtgtgagccaccatacgcagctctcaaaatgtctttgatatatgttttcttccctatccaggatccaaagttcactcattgcatttaatcattatctctttagttccttttaatctagaagggttcctctttccccttgcccctctaccccaccccccactttaaaaatggcattgggccaggttcagtggttcacgccagcactttgggagatggaggcaggcagatcacctgaggtcaggagttcgagaccagcctggccaacatggtgaaaccccgtctctactaaaaatacaaaaattagccaggcatggtggtgtgcgcctgtaatcccagctatcgggagggtgaggcacgagaatcgcttgaacctgggaggcggaggttgcagtgagctgagtacagtccagcctgggcaacagagcgagactttgtcttaataataaattaaataaataaataaataaggcattgacttttcttccttaaaattttaaaaatttatgcataatgcatagttatagggtatgtgtgattaatttaatacattaatatgatttgtaaaattcagatgagattgggcacgttcaggatggtatggctgtagacatgatttgtaaaattcaaatcagtgtatttggaatatccatcaccttaaataattgtcttttctttatggtagaaacgttcagattattttcttccagctattttggaatgtacagtagattcctgtaagctgtagtcaccctaccgatctaacattaggtcttatttcttctatcagaccatatatttgtacccatcaatcaacttctctttatccgcctttgcccccttggcagctatgtatagaatgtcacactttctggatttttgttttttgagttttataacttagtgatttgggcctctgagacttttcaaacttgagtagaagcagattttggagatactattttattattaccttaattcaaggccctgtactcagagcttcacggtcattgtcctattctaaccctgtgagatttttattgtccgtttccggatgaggaacctgaaccttagtgagtcggcagggatacggttttcctgaaaccagaaccagggctcttaaccactgccttctccacattcagttgtgattgtcctgcgtccacactgagtttgttttgacaacaggtggtcaagaggccccggaaggtccaggtggccgcacttcaggccagccctcccctggatcaggatgaccgggcttttgaggtgatggacgagtttgatggcagaagtttccggagtggctacagcgagaggagccggctgaacagccatggggggcgcagccgcagctgggaggacagcccggaaagggggcgtccccatgagcgggcccggagccgggagcgggacctcagccgggaccggagccgtggccggagcctggagcggggcctggaccaagaccatgcgcgcacccgagaccgcagccgtggccggagcctggagcggggcctggaccacgactttgggccatcccgggaccgggaccgtgaccgcagccgcggccggagcattgaccaggactacgagcgagcctatcaccgggcctacgacccagactacgagcgggcctacagcccggagtacaggcgcggggcccgccacgatgcccgctctcggggaccccgaagccgcagccgcgagcacccgcactcacggagccccagccccgagcctagggggcggccggggcccatcggggtcctcctgatgaaaagcagagcgaacgaaggtaggcatgcttgatgtgggaagaaaagcactgttgtgatatgaataacctttgttttcttaatttttttttttcccccgaaagtgttgctctgtcatccaggctggagggaagtggcgtgatctcggctcactgcaacctccacctcccgggttcaagtgattctcctgcctcagcctcctgagtagctgggtctacaggcacccgccaccacgcccagctaattttatgtttttagtggagacaggtttcaacatgttggccaggctggacttgaactcctgacttgaggtgatccgtccacctgaatctctcacagtgctgggattacaggcatgagccaccacgcctggccaggaatagctactttttttttttttttttttgagacggagtcttgagtcttgttctgttgcccaggctggagtgcagtggcgtaatctgggctcactgcaacctccgcctcccaggttcaagcagttttcctgcctcagcctccctagtagctgggatcacaggcgtgcaccaccatgcctggctgatttttttatttttagtagagacggggtttcaccgtgttggccaggctggtcttgaacttctgacctcaggtgatctgcccactgcagcctcccaaagtgctgggattataggcatgagccactgcacctggccagctaacttttttttttttttgagacagagtctcactgtgtcaccctggctggagagtgcagtggcatgatctcggctcactgcaacctctgcctcctgggttcaagtgattctcctgcctcagtctccgaagtaggtgggattataggtgcctgccaccacgcccggctaatttttgtattttcagtagagacaggttggccaggctggtctcaaactcctgacctcaggtgatctgcccaccttggcctcccaaagtgctgggattacaggtgtgagccaccgcatctggccgagctatctcttaattgcacttaaccagcattgtacccagcattgacctaaatgcctaacaccaattcgttcgtttaatcctcagaactacctcatgagggaggactcttgtttctccattttatagacaaggaaactgaggcacaaaaggttcattgatatacacaaagttgtgtcatcattggaagagccaggcttcagaattttggctttaaactaggagaccagtggttctcaaagcagtgcatcacctgggcaccccttagaaatgcagactctcaggcccaacccagtcccaccagctcagaaaccatggggtggagccgggtgcagtggctcacacctgtaatcccagcactatgggaggccgaggtgggcggatgacttgaggtcaggagttggagaccagcctggccaacatgatgaaaccccatctctactaaaaatgcaaaaattaggtgggcgtggtggtgggtgcctgtaatccccacttctctggaggctgaggcaggagaatagcttgaaccccaaggggcagaggttgcagtagcagagatcatgtcactgcactccagcctgggtgacagagcgagactctgtcttgaaaaaaaaaaaaaaaaaaaaaagaaaccatggggtgggccctcagagtctctatgttaataagctctcctagtggccttgctgcatctcaagtggaaaaccacagtggaggacagtactccgcctaatcattgttgagtttctgctctatgcaagggctatgttgaatattcttttacgtagtcctcacaagaaccttgtgtgttaggaggcttcgtttctgttttgttttgttttgttttgttttgttttgttttgagacggagtctcgctctttcgcccagggtggagtgcagtggcgcgatctcggctcactgcaggctccatctcccgggttcacaccattctcctgcctcagcctcccaagtagctgggactgtaggcgcccgccaccacacccggctaattttttgtgttttaagtagagacggggtttcaccgtgttagccaggatggtctcgatctcctgacctcatgatccgcccacctcagcctcccgaagtgctgggattacaggcgtgagcccccatgcttggccaatgagtgcattttttaagaggattgaggaattgttgaaaaatgccagagagatgttatcactcaagcttgtctcactcagccttctgttctgggctgtgaggctgtttgaccactaggggctcgccatccatgaaagtagctttgcccttcccttattccattcttgactatcagcttcctaaaggactagggcatgggccacaacacttctaatctttgtggtaagatctggctgacaagtttaccgtaaatcatttaaaacttattttaaaattgacttcatacctttcctgaattgtggaaagttactttgttttgtaattataagatttttagtttgaacaataataaaaaattttgtgcctgttttaaaacctgctctgttgtggtagtttcctaaaatgtgaacagttattcttaaaataatgtatttttacaagtttattaagtaaaaccagaagagtcttaagtagcattgaaagtatttaaaaatatgcataacttagtaattacaatgtttttgtttttgatagcaattcagagtccataaactcccaaagctatgctg

SEQ ID NO: 12236 - DNA, 6000 bp, Homo sapiens
gacacttgacatcaattgaaataagggccagggcagttgcatcctgagtggatggcaatggtccagtagaaccgtcatctggcaaagttagctgtgtttccaactgtaataattagtgagcctggaggggcttgtggcaggaaaatagcagatagaaacaaagaaagagaagcctggttaagttcctgctgtaaacatgctgggattagtaaactcttggagttcctgtgccataaacccattggaaataagcctttataccagcaggttaatcgtgttattgagtcaacaaatctttttattctggggtcatgctgtctctatcactaagtttctcctgtttttattgacaaagttgacatccttatattaatactcatattgtttcagtgggaaagaatttgagctccaccctcttaaaagctaagaagtttgatttgttaatttggcatgctcattttacatgccatagtgcactgttaaactagctcagcttctgtttgcctggaggcaaaacttttagaaggagactggagacagatatgaaggagaattaatcagtgctactgagtacttcctaaattcttagggcttttgtgggtgattaaatccataaatgatgtttggcatctgtactgagttcttttggaagggcaggagggagaaatgccatggaaattaagctccatagactcttttagcattgttgtaaatgatgacacagattggtggtggtacttacggttctggaggcagatgacactagcacttggcagaccagacaccaggtggaggaagatggagagtctacatggttgggcttagaggcgtcttccaaagttgaacttgaaaatgtctcggagatttctattaccacatggtctattttgccacttatggatctaataaagattcatgcaaattaaacacagtattatgtatactagaaccttcactgatccactgggtttccatgggcaagttcagtgaaagctcactgtcttcttcttgcagaacttatctcatagggttattgtaaaaataaaaaagaatagtttgggtgcaatgctaagtagagaacctggtgcaaagtagattcactgtcatttattgagcaaattatttactcatctttctccttctatgggccaatgaagtatttgaggtcaaggaactgtgttttctttatttttgtaacatttatcacagcgtctactgtttggttggtgcttaacaaatgtaggattacttaatgttagatattatacatcatattatttatatattattatatataatatatacatatactatatgtcttatagatataatatatacatatacaatgtactgcatgttgtatgctatataagttatataatgaatactacatctccatatgtgtcatatatttgctataatacttaaagttaagcaactaattaattattttatattaggattcttagaaaagaatagctgggcttggtggctcacgcctgtaatcccagcactttgggaggccgaggtgggtagattgcttgaggtcaggagtttcagaccagcctgggcaacatggtgaaaccctgccgctactaaaaatacaaaaattagccgcgcgtggtggcacatgcctataatcccagctacttgggaggctgaggcaagagaattgcttgaacctgggaggcagaggttgcagtgagccgagatctcaccactgcactctggcctgggcaacagagcaatactctgtctggaaaaaaaaaaaaaaaaaaaagaaagaagagagaagaatctaactatttgtattgtctagtatttcaccagttaaagttagccagttctctgggccagttgctgagtaactaatcagttcttttagaaaagatttgctaaaattagctggggaaagaaaatcaggatttgggtagataggtattgttgaaactaattccccccacccataaagacaaatattaggttggtgcaaaagtaatcatggtttttgccattgaaagtagtggcattacttttgcatgaacctatatataaaaattcttcaagggtcatttgtattgtacacagatgtttcctccttaaagtaagctgctaacagctgacacagttgtggatggagctgtatgcagaaatccttcgcatttcttttccttgtttcatgtaccatgtaaaatcagttttaagtttaaaactaagttgctcaataatgagatgcccatttcccccaacttctgttctgttattatatattgctctatggtttaaagtgtattccatgttgtgtctcatttttgatgtttatttattatgttcatttgaaagttattgtacttgtatgttaattttcattgatttttcttttgagcatgacttatgttttattttgtgtttcttttaggttttgttttgtttcataagatcccactggatgggtagctgaaataaaggaaaagacagagaaaggggctgtggtgcttgttggttgatgctgccatgtaagctggactcctgggactgctgttggcttatcccgggaagtgctgcttatctggggttttctggtagatgtgggcggtgtttggaggctgtactatatgaagcctgcatatactgtgagctgtgattggggaacaccaatgcagaggtaactctcaggcagctaagcagcacctcaagaaaacatgttaaattaatgcttctcttcttacagtagttcaaatacaaaactgaaatgaaatcccattggattgtacttctcttctgaaaagtgtgctttttgaccctactggacatttattgacttaattgcttctgtttattaaaattgacctgcaaagttaaaaaaaaattaaagttgagaacaggtataagtgcacactgaatagtctaatctacatgtaacacatattttagtgtgattttctatactctaatcagcactgaattcagagggtttgactttttcatctataacacagtgactaaaagagttaagggtatatataccatcactttgggacttggtagtattattaaaaggttatttccttcactgtcaataaaagtccaaatgtttagcttaggtctgagagtcaaacaatgttaaggattgtcttaaagttccttagccagcaaaacaaaacaaaacaaaacaaacaaatgaaaaacgtttaaaaagaagaagaagaaaaaaaacaagaacaagcagcaacagctgttttgttggggctatagatttaagttaggcatagtcaatttcagaataactaagagtggaatatatgcatatggtgaaattataaccttgcccttttttatttgccctctgcgatccacctgctttttagaagtctgccgagtgagaaggccacagtatctcatgctgtttgcattacagaactgcagcttttctactctgaaaaggcctgggagcagaatggctggcctgctgtgagcaggagaggagattctaagaaggatagtcccccctacaacatactgtcatactgctgggttttcatgggtaggaaagcttgtcctgaccccagcagcaaagaggtggcaggtcgctaatgaatatatgctttataatgtccttcttcattgctgagagggcagccttagagctgtggatttctgcatcccccctgagtctgacccatggacacctgtttcattcactttagcatcacagtgacctttgtatgctctgttcagtctgtgtcaggcagtatgcttgtcctgaagagaggtttggctatccccaccccaccccaccccaccctgttccttttttatcaggaggacttcagagccaggcctgcagcattttgtttgaaaacacaatcagctctgacagttagacatgcacacagacgccatagctggattggaaacattgatgttttaaaaatttattttttttggaaatagttgcacaaatgctgcaatttagctttaaggttctatagatttttaactagtccaacacagtcagaaacattgttttgaatcctctgtaaaccaaggcattaatcttaataaaccaggatccatttaggtaccacttgatataaaaaggatatccataatgaatattttatactgcatcctttacattagccactaaatacgttattgcttgatgaagacctttcacagaatcctatggattgcagcatttcacttggctacttcatacccatgccttaaagaggggcagtttctcaaaagcagaaacatgccgccagttctcaagttttcctcctaactccatttgaatgtaagggcagctggcccccaatgtggggaggtccgaacattttctgaattcccattttcttgttcgcggctaaatgacagtttctgtcattacttagattccgatctttcccaaaggtgttgatttacaaagaggccagctaatagcagaaatcatgaccctgaaagagagatgaaattcaagctgtgagccaggcaggagctcagtatggcaaaggttcttgagaatcagccatttggtacaaaaaagatttttaaagcttttatgttataccatggagccatagaaaggctatggattgtttaagaactattttaaagtgttccagacccaaaaaggaaaaataaaaaaaaaggaatatttgtacccaacagctagaaggattgcaaggtagatttttgttttaaaatggagagaagtggacagataaggccatttaatatatcaaagatcagttgacatctcctagggaatgatgaaaacagcaggctattagaaaattatttcatatagttctcgtgttcttttcttttttttaatccctgaagggatgatcagtaacatagcttctcttttctgtactctagaccaccccttttcatcattttgctttttatgtctcccataagaaatgtgctttttagagcttcctaatgcatgtgttgcattattgcagcattagaaaaggagaggtagcatttttgctgaaatcgggcctgtcactctccaataaaggttctggcacttcaatgccaggcaggtctcctaaatgaacagaatgatctgtgtgagccgatgcctgcccttccagaggggccactgtccccagccgcagccaactgtgtcccacaggaatgggagcctaggtttccaaatcttgtgattctttaggagaaacatgaaacctggatttcgtgtgaaatgtcccgattgttaaaaagttggctcaattatttttaaaacattttgtaagccaacaaaagtctgtgggctgccagtttattacttttgtcttaaaacatgatcattgttctctcacggtatccttctgtcttcccgttgcaaattcacttttctttcttcctgacattgccattgagggctttgttaccacaagctaagaaactgagtttaacagcccagttatctgcaacatgtcaattacctttgctcctctcctgtgattcccaccatgctgtgaccctcagctgtctccctttgctgggaattctgcaccaatgtctcccctcaacccattccctggttggtcctactcccgtgtggccagagacatcctagcaaatccttcctcctattatatctgacactaatttcttttcaacagcgctcatgtctcttggcccagtcaggtgctgccaggtttagataggaaagtacatgtcccattttcatgggtgcccttaatgtggtccacgtcctatatcttattatatttactcatggctcaatgggggcctccagagaccctctcaggctgctgagctagactaaggaatgcatccaccgtcatcacatgagacactgactctgtgacgacaaaagtacaaacagtctgaggctaagaaaggttcatctcacaacaggaaaaacaaatctcaacacacattagagataattgattcaggggttttctctcccagtctcccagcagggactgatttcatttctgacccact

SEQ ID NO: 12237 - DNA, 6000 bp, Homo sapiens
cctagaaatgtctctaactggtgtttctcagttcacttagctatcccttggatcaatagctattgcaaagaaacgaggtagcatgattggcctaacctggctcacaaacaagtcctagtggcaggaatgagctaaccatgactggcatttccaccagagccatttacagtgagggtagatgtgtttccccaaaggaaagaagactaggcagatcaaaattgacagatgttcattaaagcttcatggatatttaaactgtgccatcatagatgaattgttttttgtcaaatgaagcagcagtgcacatcgattattgttagaggaagcaataagaacaaaactaagaggacatgaaccagccgggaagatcaggagactgcaagtagtctttgaggttggatcatggtagggggccatggcttgagatgaagctgtgaaatagacaggagcctcactggctatgctagggaacctgctctttgcactgtaggcaatggggagacatccttggttttaggcaagggtcggaggtggtcagatttccattttagaatatcactctggcagcagtgtggagattgagttggagaagccaagaatggatgcagggagactaataaggaaaccactacagtaatccagctggagataagttctgtaatgtgctaaagatgctaatatggaatagtctccatgtccaggtaggagatgaaggaaggagggttaaggcaatactcaaggttatagtggggaagcaaaagatgtggaaactggccagcagaatcaacatgacttggtctttcaagaaagtaagtgtctaggatgacttagatttctgacttaagtagtgtcatttgctgagatgaaacatagaagaaggaacaggtgtgaaggtagagggtgggggattgcttgagatggtgactgcatgtgtttgagtttgggggagtgactatgaatagttggcagttcagtatagggatctgcagctcaaaggagaggtagagttgtagagtggatgagaatgaaggcccgaagagttactggttttgtcctggttaagggaaggagaaatctggaaaccagtgggctatcccggtgaggagcacagctcagacctcagccatcaaacaagtatcagaaactgcaagtgagttccttaatggtgtcctatgcaaacttgttgtcgtttgactcatatctaattctgagcgtaggctggttgcctcttgtccacctagaagtgactttaagaccatcactatgggctgggttcggaggctaacacctataattccagcactttgggagactgaggtgggtggatcacctgaggtcaggaatttgagaccagcctggccaacatggcaaaaccccatctctagtaaaaatacaaatattagccaagcgtggtgacacacacctgtaatcccagctactcgggaggctgacacagggaaattgcttgaactcaggaagcagaggttgcagtgagctgagactgtgacaacagactgagactctgtctcaaaaaaaaaaaaaattcactgtgaaagggagctcagctagtcaaagaatcctgaaatagctgtggatgcacagtgggtccttgtcatggggccaggcccagggtcatcagttagaatgcagttgtaaacatgctaatgctgctgcctggttgtatgtgctaacaactgcttagttccaaattctaacccaataaggagtttcctcaggggaaatgtatgactacagcacaaatgggctcagccttactgctttcccactgttaccccttcctgcaccagcgctcttctggtccgtgtgactaaaagccaaaacaccactttgcctaaccccccagatcctattagttttgagtctcatcaattctgtttcttccatttgtccttctctttccattctgattggtacagctctaagctaggaggcttgttagttcatccatccttactgcacaaccaggtgaatggaacatcctcctaaggcacttaaatgatatttgaatccacaggtcagcaaactaggacccgtgggccaaatctggcccactacctgtgtttgcaaataaagttttattagaacacagccacactcattcatttaaatattgtccaggactgtttttgaactacaatggtagcattcagtagttgcgacagagactgtatgtcccacaaaatctaaaatatttacttttgttttataggaaaagtgtatcagcccctattaatccaccttatgtatgaatgccagattaatgttcctaaaatgccatttcaccatatcattctgtagcttagaaccctgcaatgacattgcattgtccatgcaataaaatctaaacttcatggccctccatggtatagtcctagccaatctgttgagtcattgatctctgttcctaaaggcaagccctacaaccagttagattttcctcctcattgtccctggaatatgcagtgcatttctacccttgttcacctagttccttttgcttggaatgtattgcccatttgtatctacctaaatcctactcattccttttttttttttttttttttgagacagagtctcactctgtcgcccaggctggagtgcagtggtgtgatcttggctcatggcaacctctacccactgggttcaagtgattctcctgccttagcctcccaagtatctgggattacaggcatgtaccaccacacctggccaatttttatatttttagtatagatggggtttcgccatgttggctaggctagtctcaaactcgtgacctcgggtgatccacccacctcagcctcccaaagtgctgggattacaggtatgagccactgtgtgcccggccctaaatcctacccattcttaaaggactaacatgaactctacatccttcatgaccatgtcagttacagtgatcaccaatgagcctgctgcttgagcatgtaaaggtccactgcccatactgcctggtaagttttcttctgctcagagaatggttcaccaatatgatgatgggcaactctggagtgaggactttctgatggaacaaagtcacagctgtgggaaagcctgggaatggtttggaaatgacaagacatgtaatgagaacacatgacactcaattaatatttgtggaaatcttgagtcatcagcctctcatatctatgacatacatcttggttctgtatttaaatgtaggacaactacatatcttgatagccagtgggaatgactgacaaagtccagtaagtctactcttgagagattctagaatgtagagatagcagctggaccaggaagccctagctttatcatgtgccatctctgagatggtggatgtgggctgttcccactgtgcctcacttttcccatccactgtcatatattttatggtcttgcacacactctgggattaagtaacatcaattatgcaccattgattggagttctttggtaaatggtactacattcctaaaatattcatgtgtcttactttgtcagggagattatatccgtgacttagatatcatattctagtggcttaagattatgagctaatattttgtaaggtctgggcattgcacagaaaaccttggttgtaatacacattattattacattgatttgaatagcaatggtacaatcatagccccggaaacatagcgactacataaaataaaagcttccgttaacactgagcacagcagccaggcttccgcattgttgttgtccctaggatttggctgttgtattgtcaaatgccattatgtcttatctaataagtttctccctgcatatgtgagtaaacgaaaatgctccagtatagtaaatgtctcagcaaaccactcctgtacgctttggaaacagaacattaacaaggaaactatcatgagagcagacctttctgttctcatgaatcacattcatatgatgtttattgtccacattggagaagtatagagaagaaaaatatgaagggtacactctaatggaaaggttatagtggaaatgcaaggaaaatatatccctttacaaccagcttctaggcattacctagaagtaaaattatgacaataagactaacagcaaataacattgagcacttactctgtgccaggtattgttctaggccttttacgttacatcatcttatttaatccactccacaactaagtggtttggatgcagttattatctccactttatgtacgagaagaccaagacccagggaggtagaagaacttgtcagaagtcagacaggtagtgagtggtagggctgggagttggacccggacagacagattccagatttcatatttatcgtaacctcagctgccccacccacatgaaatgctaccccaaggctagtggcagcaaatataacccatttcatttgcattgtttggtatgtccaactgggtgatttgtcctacaaaatttgaaacaacgtctgcttatttatgtctgtgattttgatcaaataaatctcacccagaatttcccactgtcttattctatggtatttgcagtttgtaagaacctctgtcttttggattgagacgtttttattctttgtgtccaaattaacactgcacagaacatggttctctgtgtgtgtgtgtgtgtgtgtgtgtgtgtgtgtgtgtgtgtctgtgtgtgtgtgtagaaaccgtcttttcttttggattaaattcttgcagcctggctgagtgaggagaatttctcccactcttcgagcctacagcagacatgttaggagaatgctgctgcttgcaacacacccagagacggtggggcaggtgacactgcgtgtgtgcccggtgtctctggaagtgtctatacagatgtgtgctgctgctgctgctgctttctgccttaaaatttctggagccaacacccacccactcttacagcctctgtctctttattttcaaggaaaaaagaaagaggcagactgaaatagaaggcaagcgacaacagcttgacgagcagatacttctgctgcagcattccaaggtaagcagctgatcccaggaacctattccattattagacatgcagatcacactccggagagctgggcagtgcctgccctgccgtgaaggcgctgccgccaaccaaaccagcctttttcattcaatcaggaaaccatctcttggcttttcttgtgaatttctcaaattcagggcattattacagcattccaatttctgcaagcataagattacagtgtgcatgtggacagggtggagggtttgtgcgtgtgaagtgtggtggctatatatagaaattggatgagaatacttcacagggtgggtgaggcagcatttcaggattgtttctcccatgcataggtgctgggtgtgtttgctcagagaccccaaaagatatatttcacggaacgttctttttattcacttaaaaatattagtatttcctttcttgatatggagaaaagggagattaaacgatgtgatctgataaaagaacaacactgtgtatttcagattattcatttattttatttgtactttaacaattttgaaagtgttctgtgagagcaagcagttggtcaaagatggctttgaaatgatttgactcagacgggtctccatggtaccatctaaaaagagagagagagagagacagcacacaagagctgtttattttttctttaaaacatgatgcacttaagcatcgtaattgattacagctcaggagaaagctctgtcactgtcacaaggaccccactggttgcagaatgttgcttttcacatgttcagagaataatgtgaccacattccaatggccagccgggagttgttgcttgcctttgactgctcctgggctttttggcaggaaaaccttctcctgcttacctcatgttgctgtgacattgcctgcacagagctgcattgctcagaggactgggtgggaaggtggtgctgactttcggggtgatgctcggtatgaatt

SEQ ID NO: 12238 - DNA, 6000 bp, Homo sapiens
cttagcccaaggtccatggacaagggatgagcttcagagcatcagcaaatgccctgatattttcagcaaaatgtgggtttgtgccacctgtgtgtttttcatcagaagtttatgacctcaagaaagtaagaataagtgcttctagcatggactttatgatatcattgttttgcttatttcccaattctaaactacatttcagataggaagagctgttaatttactgacttccaggttagagaggcattaatatgtacttggtgtgcaaaggatcctcagtgaactcagcttaatgaattaactatgatttcactaattaactagctaatgaattaactattagagaatgtgtacccatgtatctgcatagtcatactctgctactttgtagctgatatggtctgagtgtgtgtctcctccaaatctcatgttaacatgtgatccctagtgttggaggtggggcctagtgggaggtattggatcatggaggtggatccctcacgaatggcttagagccatttccttggtgatgagtgagttcttgctctgttagttcatgcgatatctggtggtttaagagtctgggaccgctactctctcttgttccctctctcttgctcccactcttgccatgtgatatactggctccccgtttgctttctaccacaagtgtaagcttcctaagacctcactaggagcagaggccagcatcatgcttcctgtacagtctgtagaactgtgacccaaaataagcctcttttattgataaattacccagtctcaggtattcctttatagcaatgtaaatggactaacaccgttagtgataacatatagttcacaaatagactaatggatgtagatagctatgctatatttaccagtagaatctatattattttaagtaaataaatagattacctgggctaacattcttacttcattaacgaaaataaacaaattggtcttctcagtgtctgttatctgtactggtttcctttcttcaaagggatatcatgaagataaataaagatatagctattaaaatgtttgaaatttcagggaaaattgcaatgtaatgaggatgatgatgaggattagctaattagattattgtttattgagtatctactaagtaccagactctgttctaggcatttaatacactttgtgtttaattttcaaaacaacatttaaagataggtattattgccctcattttataggtaaagaaacctgagacttaggttaagtaatagatccaagttcacaaagctagtaaatgtaaagctggaattttaataaaagtctgtttgactctacagtctgttattttttttctacagttaatatagcagaaaatatatttgtgactcttaataaggcataacccagccctataaaatgaatttttcttattttcctattgcatttgaaaattgtaatagtcagtctactaactttaaaaaacttaggatgtacctaaaactcaatttaacctttatattaaagttaagaaatgcccttgaaaggtttcaggcagggggatgatatgatcagattagtgtctttggaagtttgctctggctgtagggttgagtgggttgctttggatgtgactgggggcaaggaggccgagagaggcttttttaacaatagcaatggggttggagagaagtgaatggccttgatgactatttagaggatagcctggataaatcttgttcattgactggatatgggaggtcaggatggttagaaatcaagacagacacccagatttttgggtgaggccttacatcctttctggtattaggatagggggcaggttattagggagagatttataggtgaaaatgacaagtgcttctgggacatactgggtttgaggtgtttgtgaagatgttacaatgacctttgggaatcggttttgaagtttaagagcatgatctggacgacaaacttagttttggaagtcagcatcatattggtggttaagttaagccataaaagtagatgaaattgctcgaggagggtatgtagagtgagaagtgaagagaatttaggcaagaatcctccagaacaccaagatttaagagacaaatagaaggggtagctagagaggtgtggtactgtgttgtcacagaagactgtttcaagatggaagggatgactctaaatatttaccccaaaaagaatacatttattcacataaagacctgtacatgaatgtttatagcagttttatttcataattgccataaactgaaaacaacaaatattcctcaagtggtgaatggatagacacattgtggtgcatctgtacaattgaaagctgtacttatcaatgaaaaggacctacctacctatatacacaacatggatggatctcaaaagcatttgcaatgtgaaagaaattgaacatgaaaggctacatactgtctgattccatttatatgatattctagaagaagcaaaatcatgagaacagagatgagaccagtggttgccagaggctggagttaggaggagtggattgactatgaagggacttaaaagaactgtttgggggtgatggtcatgtaatatattgactatggtggtagttacatgattgcataatgtatctaaactcataggcctgtacacctacaaagggtgaattccactgcctataaattatacctgaataaacctgacttcaagtaaaaaaatcaaaaacaaaagggagctgttaaaatgttcaacacagctttaaaatgacataagaagaggactgagacatatccatttggcattggggactttacagggagcagtggcagcggcatgggggaggcagaagccagaacgctaagcattgaggagaatggcaaagattactggttgtctgtcccccataccaattttccccttcttacatgggaatggaggtctcaacttttggataggctcatgactatgcagagtaaagacttctttgtctactctccctggaaactgaatgtagccatgtgactgaattctggccaaggagatctaagtgtcctgaggcagcttctgggagcctttcttaagaggcatcaggcgtgcttcctttacctacttttctttcctctttccacatttatgttggctggaatgcagacataagggctagagccagagcagccaacttggaccatgaaacaattttaggaagggagaccacatatgatagagcaatgttttgtaggagcctggatctctttgctctttcaggagttgagctgataaactggcccaggacagcttatctctgaacttttaagacacaaaagcacatctttttcctgtttaagcctcttaattattcacacatgaacttaatcctatatgcaactggaaagggacatggactgggggagggttttatgatctccgaattcacatagaatttctctgtgaagggaaacctggagttgatacagaatttccttccacaaaacagctctttgaatcttcactgggtttgactttgcatctcactctcctgaggaaaacgaggagcagtgaatccactgagaacattttgcacggttctcttcccagccccttgacatatggagcagtctcccatctagagccaccatacagagttgactggcaggaaagccctagccctgtggcttgcatatctgagccctctcccctttcaaccccagtccctcaggaaggctttccctgaacacctacctaggcacatccacttcccttttattctccatcaaagcatttttttaaaaaaacacgtctttattaagacataattcatagaccacaaaattcacccagagtgtataattcaatagctttcagtatgttcagttgcacaatcatcaccaaaaattaattctagaacattcatcacagcatctaattacttaatttttatagcaatattttcagcctgtgacgatatgtttatttttgtctttatctgtgctttgcctttctactttaacccgtgagctcctgcagggcagggactgtgatggctatgcttatgcttggtgctgcgttttcagcacctggcagacaccgactcacagagggacccggctgcaagatagaagaaaagcctgaagctgtcccatctactctgtattgtagcaggtgcaggacacctggatgacaaccaggtccctgctctggaaaccgttaggagtagaggattctcagagggggtggaggcagggtgtgcgtactccaggtggcttattaccgcggggccggggccgtggtaatttgggaaaccatagtcaatatagctattgttttcaaatagcagactagggaaactgaccctggacaatgtcttcctggcaggcgggaacacgcagaatttggagtgaaacggaaaggggcatggggtcgccaaggtggtgaaacgccgcattaaggcgcttcaagatagctggagttttgcttgggaaactcagagggatctcgcccggccggcacaatggcgtttctgaacccatgcccagcccactgggggcagtccttgctgcttgcagaggccagacgcttcttgcaacttctaagcggcgagagctgccaccttgccaatgactcaaccgtttgcctatgccctctgggctgtgccaccagccgcagccgccctgctcccccacccacccttctccccaggctccgcgccgcgccgccagtcccaggggagccgccggcgcacctggcgcctagggcgcacggcactgcgcgctggtgggcacctcacccgacgccagctgccagcgcgctccctccccgaaaccctgaagtggggtgtcttgtctagcgcccagcgaacaacattatccaattgcttcccgttttattcgcaggctgggagctgagagagcctgagcattcactttcaaccctccaggggaggagggggtgcgggtggggaggggagacggctcccagctccacctcgcgcgcggcgcggccagtgcactcggctccgggagaggcgagcagcgccggtgagccccgcagcagcgcacccggccgcggagccccgcgatggagtgagtatccccgagccgcgccgccagctgctctcctctcggcatgttgccatggtgaccgcggcggcaggcagatcccgctcgggtccgcgtccaggatgggtgtttaatttcagccccgtgtgtacgcctggtgtttctatagcagccgccgcggcggcaggaggcaaggggtgggagccccgggtggcgtggtttttgcggctgccccttggctagcagggcctggggggcgagtgaggggagtagatgatgttgctaaggacggaggcatattctaggctttcctatctctgccccaagcttccgcttatcggggagttggccgcaatagccatgacttccgattcctaaccatgtcagcattattggactgcagttaaaaaaagagggagggggtcactgcggatcggaagcaaacgcggttcagtgtgaagcgtgtaatggaaggatgagttagtgggtaatatgagccagggctgcaatgtcctggctactagaaaccatcagaagacccaaaagaattgatttgttcctggggtattggagaaataagacaaacatattggcggcagcccggagtggaattacaacgtttggcaccgtgaatacggcatggatgggtggggaagacaagagaggcattaaccagaaaagacattaaataaagggctccggttgtgggtctggtctaggattcctctcttctctgtgtttgcatccctacattgctttttggacactctctcgagctgctgccacagcaggaccactctgacaggcgacagccagccactccaaggaagggtcatttttggagccagctattagatcccgctcacttggtcagcttctcctcttccgttctcttcccacactactccttgacattgaggccgtctgaaatcatatttcaagttagaga

SEQ ID NO: 12239 - DNA, 6000 bp, Homo sapiens
tgggactacaggcacatgccaccacacccaactaatttttgtattttttgtagagacagggttttgccatgttgcccaggctagcacttttttcttttacaaggtttcaggaagagtagatagagttcaagatgggagcctgtgaaagtgaggccaaaccaagggaaagggttcctagagtcctgtcctcatcttacagacgaggagactgggtccacagggggctttctgcgtgtcagcagctcaaggccacgcagctggttcctggcagagctgggagggagatccaggcagtgcagctttagagaccgtgcccctaaccactagccttgctgcctctgttcaaactgcaacaaagtgaactgagcctcagaatctcctgaagggggctggttaaaatctatgtcttccctgtctcctgtggctctgaccctggactctgatttaggggcctgaggaggcccaggaatctgtacttttaataaggccctggagtctaagcagctgctgctgtccctctacactaagccgcttgccagtgtggagctcatgattggcctgtggtttcccagtgattcacccgggactgactctgcctctgtggatccggctataacagcatcgtcatccacacctgtgatccgctccagtgtcctccctcccaccctatcctctttgccttttcatcctgttgtccgctgttgtccctgggctctggtcttactgtcccatccccagactggtccttgtttgtttcctttatttaaggtgcactcttcatctttctcaggaaatatgggccagctattggctgaacatccttcgggggctaagcatgactatcctaattgcacagaggctttttctcatacattccttcctctccccaatttcttcccatattttgttccaaagtggccatatcagtttcttctgctgtttgcatatcttcctgaaatgttaaaacaaccgaacgacagcacagccctcatctctgtctagtattgcacaagaaagtgggctgttctctgtgttgtagcatctgttttcctcttgccaaatgagggcctggtaagaagacccaggatccagtcctgatgctgccaccaactcacagtgtgaccctgggcatgtcacagctgccccttggacttccagtgctgccctgagaagctgcattgagagcagttaggagcacagaatctgaaaccagcccacccaggcaaaattctagctagcaacttggcaagttacttaaactctgtctgccttagtagtctcatctatgaaatggagctaagaataataattcccctcttgaaattgagtgagttaagacatataacatttttagaagagtgcctggcacagaataatcagtgtcatttccctcccagcatgaaaaaagagggttgctctaaattagcacttcctagaggatagtctatgagattctttcccacagggcactcagcaagagaaaaaggggaggagagagttctgggtacaggcttctggcagtgcagaaagctattaaaccttattttgtctaattccagtctctctcaaactcccttgaccatagaatccatttttcccagtacctcctagcatcctgtacttctcccatggaacacttctgagaaacacccctccagctttgacatgtatgggaaaaaaaggcactggggttattgagcccttactgtgtgtcactttgtgtggatggctttgcagagttttcccccagctcccctcggaggaaactgaggccagagagaggccctggttaacaaatgtgttttgttccaaatcctggactcagactactattctttactatctcctttggtcctaactgttgagagggggaggattggagacgactagaacatgcaaggcctgtggtttagggctgtcgtctgcaagcagaagtttgtggctctggtttccaggaggctacaggacacccacatggcacagcttcctgacaaaatggcagctaatcaaatctgcctacctttccacccccacactgacgtttgcctccaccggaactccttttctgtaagaactgatggcccccacagccttcacaagtacccacagtctcactccatatcttcctcccttgaacagaaactgagagtaacccgcttataaggaggtccggcaaatccttttccctcttcatactcattttcctcacctggaaatgagagggggtggagagggactcaagttgggccagatcagcatttttcaaactgagtttcatcagagctcatatttctctcccctctccaccctgagccccgtgttttacataatggaattagaagaaagattttaattggctggtgttccctggtgaagaaagctgaaagccatgggactaaaaactctgaggatacctctagtgctgagattcaaggattctaatatttggccattgtcttagaaggcaaaggcttccactagctgattacaactcagccaggatctccttagctgggtaacactgacagtgtttgcagaactgcttgtgctagctgagggcttacctggggaccagagggggccttcacttccctgagagggtgaactaactgatagatctgttgggccctcatctttccaaacagtcattaagcctggtgtgggcgtctgaactcaccatccagctcccactgtaccctcctttcttggagattgggaggaagcaccgtgtcctggaatgtccagggctttggaatccagctagactcaggtttgaatcccagctctgccaacttactagctttgtgaccaccagtaaattacttctctaagtctagtttccctaactttccttcctgtaaaatggacctaattgtccctgtcacacagaggactgttgtgacaatgaaatgagatgatgtagaaaaagcccttgatgccaccctgaacacaaggtggagcaagcaccctctgaaaaggcatctgacaggcactgcatggtcactgcttttacctgcagtctttcctgtaaggctgtgaactcaccaaggtcagagacattaacctacttccataatgcttggcacacaaactgggctcagcaaatgtatagtgaatgagtaggcagatgtggagtacagtgaagacagctgcctctgggcccctccacgataaacactgtgggatctgtctagactgaacaggacaaagaggactccaggcttccatcacacgggagcctgttctggagctgcagcagaatggctagggtcccgggggggtaagaagaggcagttgcacttggaaggcatggaggggacatccccacatagtctgaggacactgtcacatcccgagccagttggtccagtgaggatggacactcccacacctctattctcatatggagcatggccagctcaattatagctctgctgctgaccctcttgggcaagtctcagctctttatggcctcagttggccctgatgacttctgatggcccttccagcacttccagtgaccccatttttctgggctcccagaggaggtgctggagagcattaaggaccgtaacttccactgccctgtgcccctatgatgcagattcctttctctttcagatgcatttcatcttctcagatacagcggtgcttctgtttgatttctggagtgtccacagtcctgctggtaagaattggggacctcagacttgtagcttggaaagccttgtagtactaggcaagggagaatctgggttctcttgattctctgtgggcatttaagtgaggctgattcctctggcataaacactgagcaggaacttcacagttataattccatttgtaaccactccccttcagatcgcaaagggctccattatcttactgatcctcacaaaggccgagaggcagggaggcagcttttccctctgttacagggcaagaaactaaagcccagagacaggaagagagactcgtgcagggtcacacagtaagtacgcatcagagccactactagatcaaggcctccgggtgtcacctggcacctcccttatccagggctcattgttctgcaccagttcagaagcccacagcagctgctggagatgagacaccaatttgaaaggaaagaatattcctttgatttgaaaaggcagagtttgtcactaattcatgaagaagttatttttcaacttaaataactgcatcttaaaaagagactggaaacagcccaaatgcccattattgcgggtgcagattaaataaattatggtcagccctacaatgggttactatttcttgttatctattgctgaataaacagtggcttaaaacaagtcattttatcattctctctcaaggttctgtgagttgactggacccaggtgagtggtccttactgaaggtctctcatgcagtatagtcaaacagtggctggaagtagggtcatttggaagagttcctcactctcatgccaagtggctgatactggttgttagctaggacctcagctggagttgttggctgaacacctacatgtggcatctcctatggcctgggcttcctcgtggcagagtggctagattccaagatcgagtgtcgcaagagaacaaggtagaagtacgtgggattttcaagacctagccttggaaatcagataaaattacttctacctttattggctgaagcagtcacgaaggtcttcctaggctaaaggagagggaacaaacatggaccccaccacttgatggcaggagtgttgacatcataagaaggggatgtggggtgggatacattggagtggctgtctttggaaaatgtaatctatcacagatacgatgaagccactggggaaaaggtaaatctgtgtgaactgaggtaaaactggatgataaagtcaaatgcaaaacagtatgcgtagataggatgctgtcatttggacaaacagaggctgatatatacattgagtaacagaggttgctctggggaggagaattggggtgaagagagattggggtgggaagaaaactgatctttctctttttttgaaatggagtctctgtcgcccaggctggaatgcagtggcgcgatcttggctcactgcaatctccacctcccaggttcaagcaattctcttgcctcagcctaccgagtagctgggactacaggcaggcaccacaatgcccagctaatttttctgtatttttagtagagacagggtttcaccacgttggccaggctggtctcaaactcctgacctcaagtgatccacccacctcgacctcccaaagtgctgggattacaggcatgagctaccacacccggcctgaattttcattgtattcttttttgcactgtttgaagtttcaccatgtacatgaaattacctataattttatgttttaaaaacctgcatctgtcagatgatttcctcctgggagcctgtgggaaaaaaaacccaactttttccttttcctacgctccacacacttctgtgaccagatgtgtaggctttccctcagtgacaacttttctgataccagctgggtgtcctacaactcagttcaaatctgacactaaccagagttagtgcagatcccacaagttaagggtacagtcccacaaggctgccccctgcttcaggcaccaattgcaagtcccagcttgtctcccgtacttctggccaactggctatatgtcagggttcccataacgcctttgttgggatcaattatttgatagaatggttcacaacactcaaggaaacacttaaaaagagtacaaatgggccaggtgtggtggctcatgcctgtaatcccagcactttgggaggccgaggcgagtggatcacctgaggttaggagttcaagaccagcctgaccaacatggtcaaaccccgtctctactaaaaatacaaaaaaattagccaggcgtggtggggggtgtctgtaatcccagctacttgggaggctgaggcaagataattgcttgaatcctgag

SEQ ID NO: 12240 - DNA, 6000 bp, Homo sapiens
tagtagagacaggttttctccatgttggtgaggctggtctcgaactcccgacctcatgtgatccacccgcctcggcctcccaaagtgctgagattacaggcgtgagccactgtgcctggccacttggctaatttttgtatattttctagagacagggtcttactttgtttcccaggctggtctgaaactcctgacttcaagcaatcctcccgcctcagcctcccaaagtgctgggattacaggtgagagccaccatacctggcctagttttagaatcttaaacagtatactttgatttctatcctcccagcctttgagctgtggtcctcatgcattttactgttacacacgttataaacccacagtgtattgttttatttttgctttaaatagtcacttatcttttaaagatacttaaataggctgggagcagtggctcatgcctgtaatcccaacactttgggaggccgaggtgggtggatcatctgaggtcaggagttcaagaccagcctggccaacatggtgaaaccccatctctactaaaaatacaaaaattagctgggtatggtggcgggtgcctgtaatcccagctacttgggagtctgaggcaggagaattgcttgaacccggaaggcagaggttacagtgagctgggatcgcaccattgcagccagcctcagcctcccaaagtgctgggattacaggcgtgagccaccgcgcccggcccccagtcattcttttattttattgtattttattttttgagacggagtctcactctgtcgcccagtctggagtgcggtgcagtgacgcagtctcggcttactgcaacctccgccttttgggttcaagcgattctcctgcctcagcctcctgagtagctggaactacaagcatgagccaccatgcctggccagaacccagtcattcttatctgtatgtaatgggtcttgttttctctgtctgcttttaagatttcctctttatcactggtgttccgaaatttagttgtgatgtgccagagttcgttttttcgatgtttcttgtgcttagggtttgttgagcatcttagatttgtagatctgtagcttttaataaatttggagaaatatttggccattatttctttaaactattttttcagccccctccttcatggactccagctatgggtgttaacctgtttgggtcatcccaccgctcaccagtgctctgtttgttttgtttcctctgtgttttattttaggaagcttctattgctgtgtcttcaagtttattaatattttcttctgcagtgtctgatctgttaaaatcatttttcatctgagacattgtagtttttacctagagtttgaggtggagctttttaatctgcggagtctctacttgacacacttgatctttccttactttcttgtgcataggaagtacaattatgataattttgaatgtccctgtgtactaagtctatcatacatgtcatttctgctcagtctttattgatttctgtcctcattatgggtcaccttttcctgcttctttgtagttcctattcgttttttactggattttaccctcttgggtgctggttattagtgtattcctatgaatattcttgagctttatcttggagtagtttgacccttgcagggcttgctttgttgggcggaacaaggacagcatttagcctagggctggctttgcctcactgtagaggcaaaaccctctgagcactctttctgaacctccctgtattctgaggttttccactctggctgacaggaacgggaactattcctagccctgtaatcctttgggatggttctttccccatgctcaggtaggttcctcccacccatgcgctgtgactccctggggacccttgggggagctcactccctgtgcagctctctcctctccggcgctttgtctggcacactctagctgccctggcctggcctccccagcctctcagccccatctcttgaacatcaggaggctgctgggttccacctggcttctctgctctgcacctagactggaagctccaggcaggaagctggggcaatgggaggcgctcctggcttcgtttgtatacattgtatacatttctcaggaatcagtgtccttagcctgttgtccagcggctgggaaagattgttttctatgttttgtttgcacttgtagttataggcaggaaggtgacttagtccctgttactcctatctttgccggaagcccttgaactcataactcagttctgtggtaggaggaagtgcattaaatcaaaaagcggtaatctactaaataagggatttctcttatgtgtgtagatgggaggccaaaacatcactatctcctccatctggccagactttctgtgcctaaaaacagggctcacattcattaaaggatttatttatttatttttgaggcagggtctcactctgtcagccaggctgcagcctccacttcccaggctcaggtgattctcccacctcagcctcccgtgtagctgggactacaggtgcgcaccaccatgctcagctaatttttgatttttttgtagagacagagtcacattatgttggccatgccggtctcaaactctgggctcaaaagacctgccttggcctcccaaaagtgctgggattacagacgtgaaccaccactcctggccaaaggatttttatttacttagggtttttggctgtggactggctcttctttagtattaaaatgatctagttgcatgaatcgcaatcattttgtagataataataataaaatagctaatagctccatgtactgtcctaagaactttatatattctctaatttagtctttaaccaattctatgaagtactaactccattttgcacataaggctagtgaagcacagagagctgaagtatcttagccaagattacacagctaataagtgatggccaggattggaatttggggtctggctccagtgactgtgcatttaatcaacatgcaaaactgcttctggacaagttctgtttatctagtgagagggcaactgatacaggctccttcagctttcagaacaagccttaggaccccatctcaaccatcttactttctctccagattgtcttttttttttttttttttgagacaggatctccctgtcacccaggttggactgcagtggcacgatgatggctcactgcagccttgaccacccatgctcaagtgatcctcccacctctcagcctcctgagtagctgggactacaacaggcaccacgatgcctggctattttttttttactttttgaagaggcaggtttctccacattgtccaggctggtctcagactcgtcggctcaggcagttggcccacctccatctcccaaagtactggaattacaggtgtaagccactgcgctcggccttctttttcaatgattgttttatttacatgtgtatgtgtgtatgcctgggtcatacatgcttatggttcagtttcgcaagatataagaggatgttcggtgaaaacacgtctctcatctgcctttctcctctcaaagccccaagtgtcctccccgccccacaccctctcttcaatttaattatctttccagaggccgtcttcacaaataaaagctaggaataaatggcagcacacaatcccctttcttctatactttgtcatttaacaagttggtttttttttgttttttgtttttgagatgaaatttcgctcttgtcacccaggctggagtgcaatggtgcaatcttggctcactgcaacctccgcctcctgggttcaagtgattctcctgcctcagcctcccaagtagctgggattacaggcgcctgccaccatgcccggctaatttttctatttttagtagagacggggtttcaccatgttggccaggctggtcttgaactccgcctgccttggcctcccaaagtgctgggattataggcatgagccaccacatccggccttgtgtttgtatttttaaaataatggttgtggggccatgcgcggtggctcgctcctgtaatcccagcactttgggaggccaaggtggatggatcacttgaggtcaggagtttgagaccagcctggtcaacatggtgaaaccccgtctctactaaaaatacaaacattagataggcatggtggcaggtgcctgtaatcccaggtacttgggaggctgaggcaggagaattcgcttgaacctgggaggtggaggttgcgttgagccaagagcgacccactgcgctccagcctggatgacagagcgagactccatctcaatcaatcaatcaatcaataaaggttgtgaacactatcagagggtcacctcagcgaggaatgacagtagccagtgcatttatctgttagtaaactaagaaacaaatgaccatagattaattcctttttatttatgaccttttactcagttcggtctacagacttaatctgtgcctggtcctaggggtagaaaggtctgtgacttggtccctgcccccaggcagctcatcttctggagggagacgcagcagaagtagctgctgtgatgtggcatgtgctctgctggagaaaactggatcttgaaacaaggaaaaatgtttctagaatgctcttaggacatgctgccaaggactcttgatggtgttgcacttgatggtgaatgccttctggaagcaacccgagtggagggcagggagttacttttgctacggagccagctcagagtggattctgtaagctgagcctcatctggagcttgagtccgcacctccctgcagaattgccgggcttcatgcaggcaatcagctgcctgtgattggagggctggtgctggtagggataatgaacttggtagtgtcggcagaggtgattggccgggctctgctgcagtgagaatgcagactggatgctcgggtcctcggcttgggtgatgagcgaggacagctgaataactgggagctcgaagttgcttgctgcctccgggagtggtctgcttggctgtcgcgttttccttttctttttttttttttttaaaaaaaagccaaacgtttgctcaccatcacctgcagaagtgagtttttattgaagaagctccagctgctttctccttattgccggcagcctggcaagcctcccttagagtgagctacttctcaggccgggcacgacagcagtgctagcacatttgaaaaagcaggaaaccgcccctgcatgcagagcttccagcctgagaaccccaggcccgtcctcccagcagctgtgtagccagagagcgttggtactgtggtcacatccctcaaaagtgaacagtcgccatcagaggcgtttggaggagaccgtgatgttgcagatgctgtggcatttcctagctagctttttccccagggctgggtgccacggctccagagagggggacgatcgtgaagtcagaggcaccccagcccctgcctggagagaccagatggcaagctttttggggaaacaggacggaagggctgaggccacggaaaaaagacccaccattttgctggtggttggacctgcagagcagtttcctaaggtaatgttggcctcaagaggacctcctagtttagggcctggtctgggatcattttcctggggaaaaaacgagtgtggggaggaagggagaactcacaacgttagttcggggttcagggagaagtggtaggcaatgaggaagcccacaaatgcaatctaaaatctttctgtggcccctgtgaaagctgcattacccactgcgagcaccccagtgtggctgttgagggaaggaaggttgcaatagacttgccttaggatttgttagtttggctgaagaaagccatttgaaagtgaggggcagcctgtgaaagtgtgccttagcttatccgaacagctcaggaagggcgaagctaaaggggcgagagagtgtgcctcgaccgtggaacccagttgcttggagctgtgggggtggtcttggcatcc

SEQ ID NO: 12241 - DNA, 6000 bp, Homo sapiens
ccaagcatagtggtgtgtggctgtaatcccagctactcaggagactgaagcaggagaattgcttgaaccaccccccaacccctggccaaaaaaaaaaaagaaatttattgctaatagttctggggggttgggaggtccaaggtcaaggcgtcagcagatttggtgtctggtaagggcccgttcctcatacctggggccttctagctgtgtcttcatgtggcagaaggggttgacaagctccccaggcctcttttttctttttgagacggagtctcgctctgttgccaggctagagtacagtggcatgatcttggctcactgcaacctctgcctcctgggttcaagcgattctcttgcctcagcctcctgagtagctgggactacaggcacgcgacaccacacccagctgatttttgtatttttagtaaagatggggtttcactatgttggccaggatggtcttgatctcttgacctcatgatccacccccctcagcctcccaaagtgttgggattacaggcgtgagccaccgcatccggcccccaggcctcttttataagggcactagccgcattcaggtggggcagcccacccaatcaactcccaaaggccccgcctgtttttttttttgttttttgttttttgtttttttttttttgagacagaagtctcgctccgtcgcccaggctggagtgcagtggcgcgatctcggctcgctacaagctccgcctcctgggttcacgccattctcctgcctcagcctcctgagtagctgggactacaggcgcccgccaccacgcccggctatttttttctattttttagtagagacagggtttcgccgtgttagccaggatggtcttgatctcctgacctcgtgatccgcccgcctccgcctcccaaagtgctgggattacaagcgcgagccaccgcgccgtgccggccccgcttcttaataccctgacattaacattaggttttcaacatgtgagttttgagggtcacggacattctgaccatagcacccttggaccaataggacaggcagaggctgtggaatgactctggggtgggtgaagtagggaacactgctttgctttagaaagggaatccctcttctggggctgggagtggcttcccgcaggggactaccgtgcaagggagaagaaatctggcatctctccagaatgcttctcattgcagggccgctggcctagaaatggcctcaaatggaagctgccacccgatcctggtggaggctttgagctaggctagagatcaggactccagggttcagtgcgcacgtgctgcccctgcactaggtaagttccttcctctatggaccttcagccctccccttgcagtggagatagtgtgcacagccctggctcccctccctgaccctgggaaaaggctgaagggagaccccgtgctgttcctaggaaaggagatcttcccagcggtgggagggtgaagggggagcctccctctcctccagtcctgtcttcccagccccagggcggagctcttcctgtgtgtaagcctccacgcgggaaaagctgccagtgcattcattctctcgaggaatccctgcaaaccctcccagatgggtggcgttatcagcccgattttacccgagaggctcctgagggaaagggacctgtctgaggttggtgacagacacccagttcgatcccatctgtggtgccgccaggccgctcccttttctgctcctctcccgagaggctgcagagttctttccctcccagcagggtcctaaggaccccggcggtgctccaggggagccaacatcccctgctttggaggacggacgggtcgggtcgcagtgagcagctccgtggtgtcccctagttctacactcagaccaagagagggctgtgagggctgtgctctttttttttttttctttttgagacggagtctcggtctgtcatccaggctgtagtgcagtggcgcgatctcggctcactgcaacctccgcctcccgggttcaagcgattctcctgcctcagcctcccaagtagctgggagtacaggcacccgccacgacgcccggctaatttttgtatttttagtacagatgggatttcaccatcttggccaggctggtcttgaactgatctcaggtgatcctcccgcctcggtctcccaaagtgccgggattacaggcgtgagctaccacgcccggcctggctgtgctctcttaaagggccgaagcaatgcgggtgctggcgaccgacgcaaggaggtgacgcacaggggacttaaggagcggaccgccgcgggaggacgcgcccagctcagggggactccctctgcgccccccacgctgggtctccggcccacgcgtggcccggctggtctgcggagctagcgccagggccgccagagggcgcccggggcggaggatggggcgggagccggggaagcccgggaggtggtggccgagtgggcgccgcccctctgggtctgcggctcaggtcgaagagtcggctgcgtgggccggggaatccggattccgggggttcaacgcccaggggttccatgagcccctactgttctcggacgcccggccggccccgacgcactcgtcctagcacccctcccctgtccggtcctccggcccctccgccgtcgcccctccggggtccagccgggcggggctgctccagggtcgcggctggcgcgggtccccgggccctggccctccggtgccccgggccaaggagagaaaacttgagcatccacgcacaggggtggggagcaggatcccactctgagggtgcactgccccgccctctccgggtctgcctcggccccgcccgggccccaggccccgccccctcccctcggccggcccgagagctccgggggccgctgcagccgcccaagcgcccgccatgcgcgctgcccgcgccgcgccgctgctccagctgctgctcctgctggggccgtggctggaggctgcgggcgttgcggagtcgccgctgcccgccgtggtccttgccatcctggcccgcaatgccgaacactcgctgccccactacctgggcgctctggagcggctggactacccccgggccaggatggccctctggtgagagacccgggcattggcaccgagtgggcacctaacccccagcttcgcagatggcccccgcccccggcggccctgtctgctcgctccctgcccagacaccacctagacaggcccctcccctcacagacggccctgccagcccgagccgccagagaggaccccgagccccctgctgggagacgacagacctctgaggccacaggccgacgcgggacacccacccctccttctggtcccctactccttcctcttggggccttccctgggtgtaggttgggcccagccagcccttttcaccccagccttcagggcccagctcaaccccagtgggacctgtggttggctggatttgaagaggagcagacaggaacctctgaagtccactggggcccaacgtggcagggatcgaccacgctggaggcttccgggcacaggttgggggtgccatcagcactgggctccgggctgtgcaggggagtcagaccggcccccccaccgcccccgtgctggggccagctctcttggtagatcttggtagaggggcgggatcctgtcagccaagggcagtcccccttcctggagcctctcccctctggcatctctgtacccccagggcactgggatcgaaggccacaacccctggtctgtagacaccagaacagggaggagtccctggctgaggttgggggtaaactgagaaaaatgacaagccaccctcttcaacacaccacagttgggctgggggggtggagccctggcctggggaggccgcccacaattaccacagtttgggagtttgttagttcccacccctgtaagacttgacacgtagtcttcatttctggggaattggcttaaaggggcagcatcacccaaaacctgggcacttggctaaacccccacctctgttatgggggccccttccccaggagaggggaggctgtgccccatgacagcagagcttggacccatctgcattcttagggacgcttagagcatggtttggtccttattacaacctgggggtggaggaaagcagcagctcttctgtctagtccccattcagagagggacaggggctggcctgtggtcacacagccacaggtcacataggtaggtatctgcccacctaacgaaggtaaccagggaatgcaccaggtgtgatccttaaagtcgaggtacttttcatctttcaaaatgcattcgttggccaggtgtggtggctcacgcctgtaatttcagcactttgggaggccgaagtgggcagatcacctgaggtgaggagttcaagaccagcctggctaacatggtgaaaccccatctctactaaacaaacaaaaattagccgggcatggtggtgcacacctgtaatcccaggtactcaggaggctgaggcaggagaatcacttgaacccgggaggcggaggttgcagtgagtcgagatcataccactgcactacagcctgggcgacagagcaagattccatctcaaaaaaaatgcattattcttctcttatctttgtccatgacataagcaggacagcttaagttatagagggaggacgtgaagcccagagaaagatgggacttgcctgaggtcacacagcaggtcacagaactgtggtggggacctggctgtgctgcctccagcctctctgctgtagcacacctacccttcactgttccaaggagagctcgacctcaaaggtgttagtgctttggggtcaaggctgccttggggttcaatcctgtggctgtgccccctcagccttttttcttcccgtccccaggtgtgccacggaccacaatgtggacaacaccacagagatgctgcaggagtggctggcggctgtgggcgatgactatgctgctgtggtctggaggcctgagggcgagcccaggtggtgatctgaggggaagggtgctggggaagatggagaacagctgcagcccagagaggaaaagggacagcccagagccacagcctccaagccagggctctgtccactgccctgcagagagggaggggcatgtaccccatgggaacatctcacctctatcccctcaggttctacccagatgaagagggtcccaagcactggaccaaagaaaggcaccagtttctgatggagctgaagcaggaagccctcacctttgccaggaactggggggccgactatatcctggtgaggaagtctggctagaatcgggcttctgaaaggcggtagtatccgtccctgatagaaatctgggtataggctgggtgcagtggctcacgcctataatcctagcactttgggaggccaaggcaggtggatcacctgaggtcagaagttcgagaccagcctggccaacatggtgataccccatctctactaaaaatacaataattagctgggcgtggtcgcaggcgcctgtaattccagctgcttgggaggctgaggcatgagaatggcatgaacctgggaggtagaggttgcactgagctgaaatcatgccactgcattccagcctgggtgacaagagtgaaactcagtctcaaaaaaaaaaaaaaaagaaaaagaaatctgaatgtgactgacccacccgaaggctggatccttcggcaggctatctgggccagagcccagaccagatgttcagattggatccctatgttaaaagctcagactaggtactaagcctggacccctcagatagatcccgttgtatacactttactgagcctcgatttctgggctagagcccagggtataaattgagcctggatctctgaactagagctcagagtaggtgtttggatccattttctaagccagatcccagataaaggtcttagatcagtaactcaggtataatctctggacccagtccctgag

SEQ ID NO: 12242 - DNA, 6000 bp, Homo sapiens
ccagttactgagacaacacacatcgtggcacctctagagaaagggtacagaactggggataccatgcccaggaagaccagtctagtgcatgaataaccacagaagaccaaaccttggacttggatcaaatagtcccagctccaccataaactagctatgggaccttggtcatgccaggccgcagcctcttgggggctcagcttcctcatctgtacaatgaaggtgacaagaatccacagagaatatactgtgggtcctggctcacagccacttgtcaatgacaacaagctattaacttttttttttttttgagacagtcttgctctatcgcccaggctggagtgcagtggcacaatctcggctcactgcaacctctgcctcccagtttcaagcgattcttgtacctcagcctccagagtagctgggaccacaggcacgtgccaccacacccagctaatttttgtatttttgatagagatggggttttaccacgttgcccaggttggtctcgaactcctgagctcaagcgatagtcccacctcagccttccaaattactgggattataggcatgaaccaccacacccagtcaacaagctattaacatttaaacctaccaggctttccataaaattagtaaccaagcaaaatgaaaaatctcttattatataatgaatccaaattttttttgatagaaaaaaaacagaattccctgaagacaaatgtttggtgacaatttgttgagccaatgttttcctggagagaacagcctgtctgaggagatctaacaattgcgtcactcagacacagtccccctgggcttaggaattggcagaggagagagaaatgacttctggagtccagacggcaggtttacaggctggaggggttggtggaagacctgagtgacacaaacagtaggtatctcaccacttattcctcctggcacaggacccagattcaaaaaccacaatctcactcccatacattaaaggaacacacaacagataggcagatagcctcgcgggagccttggaggaggtggcatcagctttacaggtggggaaactgaggcttagagaggggaaatgacttactcgaagtcccagaaaagcaccaggaggcccccagctgcaagctggggaatgagggcataggatgagcattttaaaaattatgccgggaggccgggcgcggtggctcacgcctgtaatcccagcactttgggaggccgaggtgggcggatcacaaggtcaggagatagagaccatcctggctaacacggtgaaaccccgtctctactaaaaatacaaaaaattagccaggcgtggtggcgggtgcctgtagtcccagctacttgggaggctgaggcaggagaatggagtgaacccgggaggtggagcttgcagtgagccgagattgcaccactgcactccagcctgggcgacagagtgagactccgtctcaaaaaaaaaaaaaggaattatgcagggaactggcagtgccatccaggagtgggatgtggccccaggtctgttctggcaggagttacagtgactgcctcatggctgtgaaggctcctgcattcctttatcgcccccacctggattataaaatcaggcgccctactctttggagcttggagaggttagtgtggcgttctggtggttggcacctaatggaggcattctccgggaggaaagattcctgctgaagccagactgaatgggtctaacttgtatattctccaatcctgttggtcaccctcagtttcttagtggacaccaaggccaagtccagggtaggagcccatctctccttgagtctccagcctcatcatttctccttctggacatcctagtttccagtcacattgaaagtcccttccttggagaagccccttctgactccacccaggctaagccacatgtcccctcccaggtggtcccaagacctgggcttccgccctcaaagtactcagcacgggggcgctcaactccaaggacaggaactatgtgcttgacctgttctccaccagatcctcagcctctggcagctcacccagcacagagtaggtcccccaggcattagcacagatgatcctgggaagctaagggagaggcctgggagcccagcagccttcctagggagggagggagacctgtaggaacccccttctggcaactttcttaatctctctgtgcctcacttatctgtaaaatgagacttatctgcgtgtaaaatacaaagtataatacgtgggaacattcactgtctacaactgtggttctggttgttcattttacaggcggggacatggaggcccacggagtacctggcaggcccacagtccacaggttggaaagaggtgcccaagccctggactttaagcctgggctctgaccttcaacgtttgcttttcacaccacacatcatgtcaataaatagttactggatgcctgttgtgtgccaggccccaagacgggtgttgcgtgactgacaacagaaaaagcatctcagtggcgagggataagctagatcatgggcattagtgtaaatctcccagggttcaaattccagcttctccacttcctggctatgatttttttttttttttagacggagtcttgctctgttgcccaggctgaagtgcagtggcccaatctcagctcactgcaagctctgcctcccaggttcatgccattctcctgcctcagcctcccgagtagctgggaccacaggcgctcgccaccacacccggctaatttttttgtatttttagtagagacggggtttcaccgtgttagccaggatggtctcgatctactgacctcgtgatccgcccgcctcagcctcccaaagtgctgggattacaggtgtgaaccaccgcgcccggccctggctatgatattgctaagtttcctaacctctctaaggttcttttctcttctattaaaagggaaaaataagacctcccaacagaagtgaaactaggcattggcttaacacgtgatggatgggagccacgactatcttcatcatcttatttttaattatctatctgtgcacatggtagtaaatttctcgccctggcccaggtacccaagaccccaattctgtcggagacaaccgcaattaacaacttcttgtgcatcttatcagacagctggcgcgcacacccgcagatacgcccaccctcaggcgtccttctacgcaaagatggatagcacccatcaacgctgttttttctttttttagacggagtctcgctctgtcgcccaggctggagtgcagcggcgcgatctcggctcactgcaagctccacctcccgagttcatgccattctcctgcctcagcctccagagtagctgggactacaggcgcccaccaccacgcccggctgatttttttgtatttttagtagagatgaggtttcaccaagttagccaggatggtctcgatctcctgacctcgtgatccgcccgcctcggcctcccaaagtgctgggattacagacgtgagccaccgcaaccggcccaacgctgtttttactgttgtttccttttttaacctaaggtatcttagaagtcaccctacattagtgcatattaaacattgttcgtcttaatggctgcacagtattccactgtatggattattttttaatttggttgccggtactgttatcagccagggaatttgcgaggacccagcgggatttatggagctgcagagttggagtctggggacccaattccaaccccagatctgtccagaattctgttgtctcgggtatcatctccaccggcgcggtcgtgggagggggatttgggtgcagacaggaccagccccagtgtccgagcgagaatcagcgagcagcacgcgcagttgattcccgcgggcggctcaatcattctgtgcagccactccgttatacttagtagcatcaaactcattaagcactctagcacaaccaagctcggaaccgttagccgaccctcccagcctcggcacctgaccttggggaagtggcgctccgacacagctactcaccctcacctgggccgcttcacccctcgttcccaagtacaccccgtaggttgcagcagtccctgtccctttaagggggccgagcccggctccgctacttccgccccgaagcagcagggcgctagcgcggaggcgagagcgggagaaagcgccgctagaattctcctcataaagatggcgacgccctggccgccgcgttcgcgcccggcggtgacgtcacttccggggcggaggaggctgagtggtgcagtgagggacaaacaaaaggaggcgccggagcagcgctgcggccggcggcgggacggagcggccggggcctggggctgcctgccgggcggccgggcgcggcgagcccaggtgagtggacggggtggggaaaggggcgcgagctgtcacctctcgaaacccacttacacacgccctcggccagctgcccggcccggggcgcccggggcatctggggctctgtctccgggccggccccctggggacctcccgcggtgttcggcctacctctgggctccccagtgcccggagtctccggggcaccaccttctcgccggctccgcggcgcgcgagccccctcccaggcacccctgtgcctccttgtgcttcagaaaccaggagtttccgcctcggctcccccatgtccccttgtcatcccctgggtccccccagatcctcacccctccacacacactctcccgttcctagaggttccacctctgggctctctccttgccatttctttttcaaagatttccttagctgtcttctcctgagttcctggtccccttctcttcccttgcacccctccttcctatcgttccgatgggggcagtgccctgacttgggggcaggatccccggctaggctcttggggcctttctgggatgggatatttgggaagaccggtccggaatctaagaacccagaccctgtcccagtcctgtgcattcaggtgggcccgagggcgaggcgagatccagtgaggtccaggcctggtgcagccctaggtgagctggatacccagcaaactgagctcccaggctgaaggggcatagctggggtcatggagttcatgatgattctgctgctttcgctgactgcttcttccccttgatctggaccggggtgaaccgaggtctgccggttctcagctgttgcgattgttgccttttttgggaaggagggatgggtcgggggttgtctggtagccgcctcctgatggagacttggctggaagggtgggcggttcctgggtgagccacacttccactgactcctcttcccctgccctacctcaggaagccttttgagaatgaggtgtggagggagagcacctggtaagaggaagggaactgggggagcccgaagttcccaaggacctcttccacctcttctgttagtagtactcttaacccctgccaaactgtattctgccctttggagcagacaacctggcagacagacaggctgtaagaagcgggaggagatcggctgttgctgatacttcctgtggaggggatgtgggagtgggagtttgttcagagagactgggcagtgctgattgctcagtctcactggtgttgcttccatgaaggtcaagtcttcctctggctcatgaagtgaggcaaggacagatgacctgtgctggaggaggctgttgtggacatgccagggatgagtgactgggtggctggtctctgcttccttgttttcctggtctcagggctttggcatggggtctgatgccctctgcgttctagggaccatagggtacagagcagggggtgcagggccgggcgtggtggctcacgcctgtaatcccagcacgttgggaggctgaagcgggcagatcacgaggtcaggagttcgagaccagcctggccaacatagtgaaaccttgtctctactaaaaatacaaaaaattagccaggcatggggctgc

SEQ ID NO: 12243 - DNA, 6000 bp, Homo sapiens
ttcagatcagcagttcacagcatcgctttgggccgtccctaaagtggttccattccagctagtggttttaggtatacaagttgtcttcggggagtttaaaccctgccgcggggatttccctaccatacaaaatggctctcctgagtggtgctgaaaagaaagtctcccccacttgcttctggtgatgcttcgggggcctaagagtcaaagaaagaacatgagtgtatcgtaaataactttactccatgcactgaaggatgtggtttttgacagtgcagtgggactcagaaatggggagccagccatttaccaacaatttggctgtcaacttgagtccttgaacccctgcccagcctccttcccagccccaaatatgcacacacaggtttccgttcccaggccactcagcctcagcatcttgtcccacagatgcacagactgagtcagctctgagtggcagcaggtgaggggtgttgacggacccaggggtgctttgttccatcagcaatacaaaggatgatgaaacaggagattctcccaggggctgcagcagtcttggtgagaggtggctaagaacgtttccgaggccaagtccaggctccacagggcaggccccatcagtaatgcccgggagcctcctgtgcagaggccgggtgtcgtctggatgcaaagaactttgtttggaatctggcagcaccaaatccttggctgtaagcaaatggtgccacctggggcattttccacattcccagctggaccctgggattgactctttgatgtttctcatcatgatgtcacctttgaattcatgtcaggatcaatgactgattccacagaaaccgggctgcctttcccaattagttacggtgagtttcctcacctgggaagtaggaaatgattatgtttgtggggtccctgaaaaacgtgcattcagcccagagggtgacgtgtctgctgaattgtcttgtccctgttcttcaaagtaccactcccagaattggcctcttttccattcggcaactaagggaatacagagctgtggcttcccttggcctggctgtggccaggctgagacgatatccatgaaagaggcgtggaacctgccagggagagtgcggagggtgcatgaagggtctggggggatgggggccgtggacaagtcagctctctggatggacaaggaactaggactgaagagctggacacgaggccaactgctgaatggaggaaacgtcccccagcaacagccatgggtctgtgggatgctctccccagggcaagtagctccccatcactgtcactgggggacttgaagagctgacactgagggaaagggggaaggacgatacctcggaggaagttgaatctcctgggtcggcagctcaggccagccgtgctcacaaaccccaagcacagtggctcatgatggcaacggtgtgcatagggcacaggctgcctgggggcacctctggctcacatgtcctgtcattcgagggccctgggcaagggaggggccctctctggatctgttttcctcatgacagaggcagagagacagggtgtgactgagacatttggctctgaaagctgctcagtcgtggcccttagccgttctccctcccggggccaaaatcgcaggtcacacagccacgcctgatgcaggtggtgtttgggagactgtcagcttatgggaggtgctgccaggcacagggagccgggccaggatggaaatcctctccagggaagggggtgaggagcagttacgcctccacccatgtgtgaacccagaggcctcagaggaggggagtacagggaacacttggctcagaagacccatgctggtcttctgtggctgccgagagggagtgcccaggggacctgtggctcctcccattctgcctggcttgaggccaggtcctttccttgctcctggaatgttccagcacagaaagggaatgaaaaagctacatacaacgtagaaaaaggagaggtggctccatgtgggacctctctctgtgtctcttctctctctgtgtcactctatctttcttctctctctctcttctctctctgtctctcatctctctctctgtctctcctctctccgtctcttctctctctcctctctgtctctattatctctcctctctgtctctcttctgtctctcctctctgtctctattatctctcctctctgtctctcttctctctgtctctcctctctctgtttctcctctcttctctctcctctctctctgtctctctctccatttctttgtcttcctctctgtctcctctctgtttctttgtctttctgtctctctgcctttgtctctctctctctctcttcttctccccttctccctccctttcttcctcccctccccttgtttcccttcaagatatttgccaatagcctgaggagagtatgcgtatttttaaacagcaaccgggcatccaaactttgtcccttgagggcatcctttgccaaggagcatcgggaagtggcccagagacctgcttccctccaagcagccactcctggctctgggacctgagtaggtttgcatcctgcggacctcactgttctgactgtgggtgtcagtggtcgtctgactgtgggtgttggtgtcgtctgtgccctatcagctcaccatgtggctgtcctagggcttctcgaggtgattccccaatagcccacgtgtgtccgcctcttgtaaggtctatagcaagctgggcaggagcaccctctcacacttgcgtcttctgagctctgaagccgggagatgcagagggggtgtgcttgtttttatgtgtgttgatgaatttgtacagagtccaccaaggtcaaggcctgtagggggctggcatgaggatagagacgtggctgttctaacctgtcatgacagggagggtggtgcaggctcgtgccaggactcagaaaggggtgggcaacctcctgtccttcccacgagcgtggaaggcaagggcccatgaaatgtcttctggcggcctctgtggctcgtggaactgtgcggacagccagggctgctgtggccatgcaactcatgccacttctggggctcgtgagatttaactatggccatgacatttataagacgaggatgccaccatgtgtatgggcttagccctggaaataggctgtcaccatatgaccttggacaggtcttatcatctttctaggcctgagattcctcatctatacagtggagtcaatgccaccacaccatgcacttcagtaaggattgggtgccaggcatggcaaagccccagtgccaccaggggcgcagcacctgccccatcagcatccgtatgattgttcagagctgcaggtgtgatgagccctggctttaagagaagtcgtgaagaaattgggattgaaagtcctctttaggaacacttggtattgcctggcgccatggatcccctaatccaaatgccttcattcttcaacgatccatactttccttctggaatgctccatggccttctaaatccaattacacttactcaagccttatctgacgaccctttcaaaaccattatgcccactgaatcacagattttagaaactggacaggacagtttggagcaggtgcaggttggagccgctcaggtgcaggttggagccgctcaggtgcaggttagagcagtccaagtgcaggttaatcttttacttcgttaaataaataaatgtctatggcttctgagatggcctgacagttttgtggattggattgggttgcatttgaatttgttcccgcagaacaagtggtccttgtccttccgcagcgggaagcggcgtgagtgatctggacagacacggcttgtggccttgaatcggtgttaaacatgcatggccagaggaggggggcgaagccagcccaaccggacttgtgtctccgcctgggcccagtctgtgagccgggcctgcagtcccagcttacactgggagatggcgcccttccccaacagttggaatttcctggcatccgacccagcccggctgcctgagattacagcattaatcagaaaagcagatctgaggggctcatttaactagcgggtctcacacccagcactcaggccaggatcatcttggctgcagctgaagtctcttcagccgaggactgcgcacacagagagaaaagccccaggaaggcgttgttcctctcaggcgggcgccagggaggcgcgctccttccggcccggcgtccgtctttcaaatcccatccaggaagggagattaattttcgcccaggcagagaagagtgtagtgagtgatctggaggattctttccttcccaaatggctgggaaagcttaatggaaggccccggaggaagtggctttcatctccgattagaagccttctgtaaatgcaaaagccctattaacgtgtttgacccagtcaggcctgcgcttcaggtgggactgacacgcgtgagtcctgctgcggtcgccgcagagggccgggaagaggggcagcgtgcgccacttgccctgcctctgtgcctgggcgccatgactcgagcgccacccctgagtcagtaaggacaccccccaacccacacccctccaccacagaccccagtccccgccccacacacccacctccccaacaccaggttcatgggcgtggtcccttcagctcctgaggtccaggcctgagccccagaccttatgcagctcctgccgggtgtgcgccctcccagggccctcactgcgcaccgcgggccacggcagaccaccccagcccccgccttgctgtgcaggtgtcaggagtgccggttggctcccttcctcccaagcaaggccttagggcaccgcggctgccctgggatcgcaggggcgcctttagctctccaccgatgccccgacgcccccctggcgctggaggccctcgcgagtctggctgcttttcggagcctgccctgcctgctgggtttcaggcgacggcccaggctggctgggaccctcgaatcaccgcggaaaagggctccagtaggcaggacggcgccgtctctctgccggcaacctttgccccaaagcggaccctctgcggggatcggagagggatgccccggcgtgaggatgggagaagccccgggacgggagggccgcgggccgtgcccccagctggagtccccgcgccgccgccgggtattttatgatctgggggtggtggtgtgtccgtctcctcatgtcaccctgatcccaactcctgggcggactggagtttgcagacctcgctgccagcagccagggggcggcggggagccgagcgagaggaaaaatccacccatttcctgggcggattgcgtcggtcccgcccggccgagccccgcctcccggccgcggcccccgcgcgcagcccgcgcagcgctcagagccggacggcgcttcccggtggcggcggaggagcccggagggacgcagccgggcaaggcagggcgcagggcgggcggcgcgaggcgcagggcgcggcgggcagaggccacctggccaccttccctggcgcccggggaaggcgcggcgatggccggggcgcgcggggcggcggcggcggcgggcgggcggcggcgggccgagggggcgcggggacacagccaggcgcccctgcccgccgcggtgcccgccgcctgaaggccgcctgggcgcgggagccggtgccagctcggagcgggcgctggaggcagctcgaggcgcgatgtcggtgccgctgctcaagatcggggtcgtgctgagcaccatggccatgatcactaactggatgtcccagacgctgccctcgctggtgggcctcaacaccaccaagctctcggcggccggcggcgggacgctggaccgcagcaccggcgtaagtgcgcccgccggccgccttggcgcggctcctcctcctcctcctcctccccctcctcggtccggagccccgggctgggcgggcgccgcgcgggacccgagtcgcccagggaggcgg

SEQ ID NO: 12244 - DNA, 6000 bp, Homo sapiens
gagcggtgatcgagcctgagcagggcaccgagctcccttcaagaagagcagaagtgcccaccaagcctcccctgccaccggccaggacacagggcacaccaggtgaggccacacctgcaccccttcctccccgggcgctcaggggctggtggctgatgggtgcaggcttcgtctcagccatggtgggtggcgcccccgccctggtgtgcaccttgcccttcagcatccccctgttgtctgagtcctcacaggctctgcaaccttggtgacaccatgtggctcttggcctgctgtccctgagcacatggctgcagaagaaggtgtgtctgagaggtttgtgtctgggccaggctgccccacgggatccctggagactgctgcccgtgctgtgtcccctgtctcggcctggccagtcccaggcagctctgggggccacttcattctcagcaccgtttgttgggggcctcccaggtgcgggccttcggccaagctcagtgcatgacctgaggcctctttcaacctcatgacaccctctgacacgataagccactcaccctcccgttctccagactgaaaagcagggctgaggacagccacccccagagtcgtttgcttgtctgtgggggctcatggcaggtcgctgagtctggagccctgctctcatcatgccccccaggtgtctctgaggtggggagggagcccagagccaggactcccagccccgggcctgtgagggatgtgtagcaatctctgcggcatcaatgagggcagaggcagaggcagaggcatagacatgccatgagcacaaggaggcctcagaacctttcctgagaggacgtgtggtttggtgccgttacacacgtgtcaatccacacattagtcaatgttggccgggcgtggtggctcacacttgtaatcccagcactttgggaggctgaggtagaaggatctcttgagtccaggagttcaagaccagcctggacaacacagtgaggccccatctctacaaaaaaaaaagaaatttatatatatgtgtatatttgagacagagtcttgctttgtcacttcactgcaacgtctgccttctgggttcaagcaagtctcctgcctcagcctccctagtagctgggattataggcacccgccaccacacctggctaatttttgtatttttagtagagacggggtttcgcgatgttggcgaggctggtctcaaacttctgacctcaggtgatctgcccacctcggcctcccagagtactgggattacaggcgggagccaccgtgcccagccaaaaaaatttaaaaaaagggaacgaagggactgtagcgcgtgtgcacagtgcgattcccgtggagcacctgaagcccacgtggcagaaggagcgtgtttgagtcgaggatgttcatcgcgaggtctgcacccgtccgtgtttcacattctgagttggcaccacactcacccacgtctccacaggctgtgctcactgtgctgtcccagcgcccttggggcagccacccttgtccctttggccagaggccaccgaggcccaaggagggtgtgcctgcccaggcgccaggtggaggtgcatgggccccagtcaggtggtcgggtgacaggtgccatcctgtgcagtctccagaggtctcaggcccttggcaggctgtgttctccctgggggctgctgcagcctctgtggccctggcctttgctgtgcccaccaccgcccttcccgtcgtcccaaacccaccgtcatctttgccccatgggggtcacagcagtgctctgcctgagggtgtccatctgtgccgacgccaggaccacgtccgccatggcctgtgctctctcccccctactagtgcatctgaactatcgccagaagggcgtgattgacgtcttcctgcatgcatggaaaggataccgcaagtttgcatggggccatgacgagctgaagcctgtgtccaggtccttcagtgagtggtttggcctcggtctcacactgatcgacgcgctggacaccatgtggatcttgggtctgaggaaaggtacctggtgctttctggggaggggctgagccctccgtgtgggcctcgtgtgctgaggcagagtgtgggttgcacacggggtgaaagctgctgtttgcatctgaccatgggttttcccttctcctgggtgcgggagtggacgtgttggctgtggtcagttcctgttcttgtccagccacccaaggcacacacagggccgctgtccccagacctctgcaggagttgagtgtggactctttgggggacgtccaagggacattcccaggctgtgcttctcttgcagctgggggtggtgggatgagtgactgtggggccccgctggtcccagatctcagcagcatccttcatagaccagcacatccactttgaattgggagtatgtgtcttcggttatttaagcgataatttaaacatttgcctaattttttgaataggttgaagaccaccagtaaacgacgtgtgtaatttttttgggtcgtagcctttggttgtgacccattggtggccatagcaactgcactgctgactccgttttattaacaaatgttgacgacttcaagatttacccccttgagataggaggtgatattgaagccctgcaggggaacgataacgccccagacatgggtttggttttttgtttttgtttttttgtttttgagatggagtctttcactgtctcctgggctggagtgcaatggcgcaatctcggctcattgcaaccttggcctcctggtttcaaacgtgggttttttggagacagagtctagtggtgtggcccaggctggagtgcagtggcacgatctcagttcactgcagccttcgcctcccgggttcaagctattctcatgcctcaccctccccagtagttgggaccacaggcatgcgccaccatactcagctaatttttgtgtttttagtagagatggggttttcccatgttgtccaggctggtctctaactcctgggctcaagcaatccacttgcctcagcctcccaaagtgctgggattacaggcatgagccaccacgcccagccaaatgtattttgaagatggatagataataggaaaacgttggagccatccatttgtctctgcatcctttactgttttatgtcatagaatttgaggaagccaggaagtgggtgtcgaagaagttacactttgaaaaggacgtggacgtcaacctgtttgagagcacgatccgcatcctgggggggctcctgagtgcctaccacctgtctggggacagcctcttcctgaggaaagctgtaagtgtcttggggtgtcctgcagggagatggtggactcgcattcaagcagttacccctttagtggacttgtggggacgtgactgtcttcctgtttcctcttcaaatgcactggagtctgtttctgagctcatattcgtgagctgatgaagccactttgatcaccactggccttgtagagacattcactcagtgcagagtgatgcccgtttccttgctgctgtgttgaccccagagagccttcagtgtctccactgaactgcatgaaagggtgtagacgaggcctctgggtgacctgaacgttggttctctactctgctcatataccaggaggattttggaaatcggctaatgcctgccttcagaacaccatccaagattccttactcggatgtgaacatcggtactggagttgcccacccgccacggtggacctccgacagcactgtggccgaggtgaccagcattcagctggagttccgggagctctcccgtctcacaggggataagaagtttcaggtaagggggcaggctttctggctggatgcgcctcccctggagctaccttttgctcatcacagcaggtactgtgtgtgtgtgtgtatgtgcatgtgtgttttcaggttttttactgtgataaaacacacaaaacgcaccaccttaaccatttccaggcgtggtcggtggtgttacattcacgctgttgcaggcgtgcaggtcggtggtgttacacacattcacactgttgcaggcgtgcaggtcggtggtgttacacacatttgggctgttgcaggcgtacaggtcagtggtgttacacacatgctgttgcaggagtacaggtcggtggtgttacacacattcatgctgttgcaggcgtgcaggttggtgctgttacacacatgctgttgcaggagtacaggtcggtggtgttacatgctgttgcaggcgtgcaggtcggtggtgttacattcacgctgttgcaggcgtgcaggtcggtgctgttacacacattcctgctgttgcaggagtacaggtcggtggtgttacacgtgctgttgcaggtgtgcaggtcggtggtggtacacacattcatgctgttgcaggagtataggtcggtggtgttacacacattcactgttgcaggcgtgcaggtcggtggtgttacacattcacgctgttgcaggcgtgcaggtcggtggtgttacattcacgctgttgcagacgtgcaggtcagtgctgttacacacgctgttgcaggcgtgcaggttggtggtgttacattcacactgttgcaggcgtgcaggtcggtggtgttacacacattcattctgttgcaggcgtgcaggtcagtgttacacacattcacgctgttgcaggcgtgcaggtcggtggtgttacacacattcacgctgttgcagatgtgcaggtcggtgctgttacattcacgctgttgcaagcgtgcaggtcggtggtgttacattcacgctgttgctggcgtgcaggtcggtggtgttacacacattcacactgttgcagacatgcaggtcggtgctgttacacacattcatgctgttgcaggcgtgcaggtcggtggtgttacattcacacttgcaggcgtgcaggtcggtggtgttacacacattcatgctgttgcaggcgtgcaggtcggtggtgttacacacattcacactgttgcaggcgtgcaggtcggtggtgttacattcatgctgttgcaggcgtgcaggtcagtggtgttacacacattcacgctgttgcaggcatgcaggtcggtggtgttacacacattcacgcttttgcaggcgtgcaggtcggtggtcttacattcatactgttgcaggcgtgcaggtcggtggtgttacattcacactgttgcaggcgtgcaggttggtgttacacacattcacacttgcaggcgtgcaggtcggtggtgttacacacatgctgttgcaggcgtgcaggtcggtggtgttacattcacactgttgcaggcgtgcaggtcggtggtacacacattcacactgttgcaggcgtgcaggtcggtggtgttacacacattcatggtgttgcaggcgtgcaggtcggtgttacacacatgctgttgcaggcgtgcaggtcggtggtacattcatgctgttgcaggcgtgcaggtcggtggtgttacacattttcacgctgttgcagacgtgcaggtcagtggtgttacattcatgctgttgcaggcgtgcaggtcggtggtgttacattcacgctggtgcaggcatgcaggtcggtggtgttacacacaacgctgttgcaggcgtgcaggtcagtggtacacacattcacgctattgcaggcgtgcaggccggtggtgttacattcacgctgttgcaggcgtgcaggttggtgttacacacattcacacttgcaggcgtgcgggtcggtggtgttacacacattcatgctgttgcaggcgtgcaggtcggtgttacacacattcacacttgcaggcgtgcaggtcggtggtgttacacacattcacactgttgcaggcgtgcaggtccgtggtgttacacacatgctgttgcaggcgtgcaggtcggtggtgttacattcacactgttgcaggtgtgcaggttggtgttacacacattcacactgttgcaggcttgcaggtcggtg

SEQ ID NO: 12245 - DNA, 6000 bp, Homo sapiens
ttgtttttttaatgcttaattctttccttttctgttcccgttttcagagtaatgatttggttctctaactttctcctagagtaaccagtgaaatttttaaaattatgaactcatagattataatgtgatttgttgtagttctttgcagttattattctttttgtcactcagatttccctacatttagctgataggcacctcatcatcttggattttttttttttaatatagcctagtagttccgacaacttccttgcttctggtatggcaagatgttgactaattttctacatttcccatacaaagcctataatctgccattttctaagggactctaggccctagtttgtctttttttaaagaaaattttaatacagtatttagacacaaataacagtatagaaagctgaaaaaatagtacaaatccttcaacattcatattggtttgaatatgaatatacttattacagaaaagtgttacaatggtaagttgaagaaaaagagttggataggtgtcactttatgtgatcgcttgaaaccgtgatttgttaaggcttttaggcaagtgcgctctttgttgttccatttcaaattatattacatgcatcgtattgccctctgaactgttagtttctccaaccacccatgtacagatatacagaagctgatatacaattcagttaattggaattcagcaaaattattgtttcataagatctttgtggtatgagaaataagaaaccggggagttataaattttttgaaattgtattttagattcatatacatggttgagttctatctgcatgtccctgctgatgaaagacagagagccgggtgcagtggctcacatctataatcccagcacgttgggaggccgaggcgagcggatcacaaggtcaggagttcaagatcagcctgaccaatatggtgaagccctgcctctactaaaaatagaaaaattagccaggcgtggtggcgcacacctgtaatcccagccactcaggaggctgaggcaggagaatcgcttgaactgaggaggcggaggtagcagagagctgagattgtgccactgcactccagcctgcttgacagagagtgagactctgtctcaagaaagaaggagcagaacatataaaaatcaaagggttggcttctgctgaggctattggacaaatgctggataatgtgtgatggaagtaaggtaaaacgtggtacttttaatatcactgaacctccttgctctttttttttttcagagtacttagcaagccttactatagattaatggaaactccttataatattcttttatcctgtttatttttggtttaattattttcttaagaatccatttccaatttttgtacctaaatttaaattccaccttactgataggcagctagcatttcccttttggcaatgttgctgtgtaataaacaagataaggaatggagattagctggaatgaacatttagaatacgtttcatcttcacacctctgacctcctttgggcacaacccatttaaggataaatatgtatgtttatacctgcattcgtttctagagtgctagatcctatcactgttgctagtccaggagtaacatttgaaggttcatttgaaaaaatttggtcttcttatgcacttcagctgagtaggaggaaaagccaaatcacttcttccctgagtgagcattcataggtctccatctctgtgatcacacggagtcattatgtagcagttggctctgatacgcttgcacagacacaaattgagtccgacaggactgatgtctcctggactttgctgtcatttgaaatgctggcatgaggatgggagcagtgaaagcgggaggaggggaatggggaggggagagctgattcctttagcacttttccaatgaacttttgagatttttaacatctgatagctgtgaactgcttgataagttgattttcagaggcgattgataacaatagctgatttggaacagctggccagcttctggattcaagaagttttccactgtaccacttgcttcttcatgccaacccactgtttaaaaaaaaaaaaaggagactatctaatagaatggtagagtgattcctctcctttttagttttatctttcctgcattcaaaccgcttatgaatactaataaaaaaggtaatatctttaaaacaatttttgttctcatgcttaagctgagtttcagaaatgacatactatggtatctgcattataattctttttaaagtacaagttattttagtggattaggttattgctggatatctctagtatttcctgtcaaaaattttgtatatgtttcaaatatttcagttttaaaaattaaaggtatgcagtttcattttgcaaatgaatactgatagtcattttcagatattttctgcagtaatagaggatgcagtaggatgtgatctactctctttatttttaaatttttcattaagagtgtactctgcataagaggctgtgctagatttattgagggttctataggtacaattatttaacacgtgaagaattatacttcaaatgattgcttggagccagtcattgcctcccttcctaattcccaccagtaccaccattactcttaagtcctgtgtcacttctcacctgaaactcttgctgtggcctaatagcattctctaaatcatccctgatccagttgtcagttaatctttccaaagcctggttccatggttcctctgctctaaaacattaaatggctctttttgtagtttgctgaataaaggccatttgacttagatcgccatccaaggctctctgtgacctatttttttttaaagtctgaatcttcttttttttttttttttttgagacgaagtctcacttgtcacccagactggagtgcagtggcaggaccttggctcaccaaaacctctgtctcctgggttcaagtgattctcctgcctcagcgtcccgagtagctgggattacaggtatgcaccaccacgcctggctaatttttttgtgtttttagtagagacggagtttcaccatgttggccaggctggtcttgaactcctggcctcaagtgatcctcctgcctcggcttccgaaagtggtggaattacaggcgtaagccactgcgcctgactctgaaccattttcttttgcttcatcttctggttttcctaatagaagatggtttcccatgacttcaaccagaaggttctcaaagtgtggtctctggactggcagcatcagcatcacccaggaacatgtagaaatgcaaatttatgcaaatatgtgacccagtcctgtaatcctagcactttggtaggccaagagtggtggctcatccctgtaatcctagcactttgggaggctgaggcaggcagatcacttgatgccaggagtttgagaccagcttggttaacatggtgaaaccttgcctctactaaaagtacaaaaattacccaggcatggtggtgggcacctgtaatctcagctacttgggtggctgagacaggagaaccacttgaacctgggaagcagcgtttgcagtgagccgtgattgtaccactgcactacagcctgggtgacagagtgagactgtctcaaaaaaaaaaacagaaaaaaaaaaacaaaaaaaaaccaaattattgaattattggatccccaccacagacctactgacccacgaactctgatggtagtactcacgcatctgttctaagaaggcttccagggggccccgtgcatgctgacctttgggaggccctattccaaccaaaccaggaaactcaggttttccaaagttcctttcccactgccctgcctttgcatagaattcctggaatgccttttcgtcatcttgttaaaatcctggttaaacttcaaggcctagtttgagacactatttccatgatgtcagtcttgatcctatcttttatagcattatctggttttccttcctggcgctaatcacttattaaattgtactaatcatctggtgtacctgctttattttccctactaatctggaaacaaaaataatagaacctgactcatctttctgccttgagacaccttgtgctgtcactcttgatgccttgcacacagtaggtgctctaaaaatagtttgtggctttttgattttacagagaagactgaggaaattaaacccttgcccaggaggcatataaaaatcctgttaaatgaaagaggctcatgctaactattgttttgacttattgatgccaaactagacttgaacattgatgtgtcttcagggaagaagccaaatatgctagtgtaaaaaattctaacctctgctatttacctggagaagttgaattagccctgtcatttcaactgatgccaaaaaagcagcttccattattgtgtcagtaatagacttttatcctgcatggaggaacttctcttaaatctttctcatagcactggtgtgcttctttgcactgatgtatttacgtaatgtttcataagaagtgacagttccttttttaggtctttgcccaaaaggtggcataagcaaagaatgaaagtcaaggtggttggctttaggagagcctaaaattgggaatgcgagagctcccacgtaacacaaacccggatagtctaagactcctacattttacaaaccaagttatttccttcctaatacaaacaaagtatgacagttacaatttattgtgtatttacaatggattgtgtctgtcatggtgattgtgatggaaccaggggggaaagagtaagaaatctaagcacttttgtgttttcttccttttcttttctcttcctccccgctttcaggctctgaaagtgttccagctgaaatttcagatcggacagactcgctgcggctccggaggcagtgattccaagctgctcgcgcacgctgctgccaagctgcaggatggtgcacgtagccaggctgctgctgctgctcctcactttcttcctccgcacggatgctgagagtaagccattctccccttctctagggggctgtgaccataatgagtggttttgtttgcagttggcaccaggctcagggcctctgaatacatttcctttggaagtaaatcctgagacactgcgggatcctccttggctaccagccagcctttgaaagagattattgacgtgacttcctcaccatttcctctccgttttaatgccccttttcttgtgcatctaactgctcctcctgtttatttatttttttatacctcttatcagcctggtagcaaagatattatgagaccaaggatataactcaaactgaggttaaccagttggtggtgccaataagtaaacattgttcagacccactcaaaatttctttatttttgtggatcattccgtgtttagaaaaatgcacaatgtcacaatgagcctaattaaacttccaagccccttgtagctgtcatagcagctgttctaatgtactgtttccgacagctgtcgtcgagtacagtattgaaacaaatcaagcagaactgacaactttgtggctggatgaagggtctggaagtatgaggagaattctgtggactagagacaccaaagcttggattactggactcaatttatgaaactgctattgtggtccattaacttgacaattaatgagaagatcacatcttcctaattaggaaatcattaggtctaccttgtttacctgcatttattttcccatctgtcctgtggctttttggaagagatagtattggagaaaggcatgtctcggccttgtactccctgacatgtgtggttccttggtagtggtttagttcatacatgagttagccattttctttgggaatcacctagtatgagtaaaatgtgtgacatctgcagtcattaacatttctctccactatttcagtgagattaaatttgactcatgttaaggatgtttccaagacaagtatcctgtgtcatcttggcccctttctattaattgcattttgacag

SEQ ID NO: 12246 - DNA, 6000 bp, Homo sapiens; identical to SEQ ID NO: 2595

SEQ ID NO: 12247 - DNA, 6000 bp, Homo sapiens
aaaaaccgcccagcagtccaaagtaatttgtgttcctaaaaatggaatatggaaagttaatttgcttgtttgatgtggtcgttgagaaaaatacataaaagctttgatgtttattatgtgagcaaccaatataaatacagtttagttgaaaggaacactattaaggtattgtttccaggcagaatttcagaaatgtaattaattcagcaaataggttttttaaaaaagacatccaaaggttataaaattatttagaagtattttaggtctgaagctgtaatagttgacttaagcaattaactcttcaaaggtgaatgatgaatatgtggttaattcatacttttgtccatttctagcttacaaaacactacacagcaaaataatgatctgctagactgctaacccgagcatccagcttccacaatgcctgtgcaggcagctcaatggacagaatttctgtcctgtccaatctgctataatgaatttgatgagaatgtgcacaaacccatcagtttaggttgttcacacactgtttgcaagacctgcttgaataaacttcatcgaaaagcttgtccttttgaccagactgccatcaacacagatattgatgtacttcctgtcaacttcgcacttctccagttagttggagcccaggtaagcattcaagattttactataggttggtgcaaaaataatcactatttttgccattattttaacggcttgtccagcctgcaggctacatgtggcccaggacatctttgaatgcggcccaacacaaattcataaacttccttaaaacattgtgagattttttttgtgatttatgtttatgtttttagctcatcagctatcgttagtgttagtgtatcttatgtggccttttttttttttttttttttttttttagacagagtctcactctgtcacccaggctggtgtgcagtggcgtgatctgggctcactgcaacctccacctcctgggttcaagcgattctcctgcttcagcctcccaagtagctgggactataggcccacatcaccatacccagctaattttttttgtatttttagtagagacggggtttcactatgttggccaggctggtctggagctcctgacgtcaggtgatccgcccacctcagcctcccagggtgctaggactacaggtgtgagccactgcacccagccatcttatgtggctttaatggcaaaaactgcaattacttttgcagcaacctaataatttgttacatgaaatagttattgaactttattcagtaataggtatatagtatgtttagtgatcattaaggtgtaaaaaataaatttcaatgtacctgattttcatgattgtattctgcgaaagattttctttagataatgtcatatccttatacaaaaccttagattacattatagttacatattcaattctgtggctaaaatttatgtatataagtgatattggtggataagaaatatttttatataagcatatatatttattcaccaggtgatatgaaaagaaatgtaatcaaagctttgaccagaaacaggtttttttgttgttgttgttacttttttttacttcacttgactttttatataatagtgtaaatgaaacaataaggtctatgtagggatgtatatatggaaaaccaaaaaccaatgtgtcagtaataaattctccatgatttcttctgaacatgtgttgtatcaagcttgtctggctttcaggccacatgcagcccaggacagctttgaatgcagcccaacacaaattcgtaaagttttttttttttttttttaactcatcagctattgttagtgttagtgtatcttatgtgtggcccaagacaattcttccagtatggcccacggaagccaaaagacacctctgagctatgtgatgctttagttgaacattaggggggaaaaaaaaaagaacatgtgctatagaattcatgtttgtaattattttattgaatcaaagcaagactctagatttgaaataacatatttaatgagggtctactttgcattaggtttgacagaaagtattcagcatttattattactaattcttaccataggttttcaggtagttattatccccattttacaagttaggaagagatgaaattctgtacatcatgtgctacatattaaagccagaaaggaattatttttctgatttaatagaaaatccaataaaccaaaatacttcattcattcctttagtatcttgatatttgaagtcctccttgtaaagcacaaaatctcttttcagtgtttataatcaagttacacactatgaaatcaaggtgcatctacaattgatagtgtatcttaatttaattgccagtatatttttgttaatggagtataaaatgttgcctcttgcaaacaacattttagatttgataaaatatcatagactttttgtaagaatactagctaccaccagacacagtggcttacacctgtaatctcagcactttgggaggctgaagtgggcaggctgcttgaggccaggagttcgagactagcctggacaacatggcgaaaccccatctctacaaaaaataaaaaaattagtcaggcatggtggtgtgtgactgtagtcccacctacttgggaggctgagatggtgagatgggaggttcacttgagcccaggaggtcgaggctgcagagagccaagatcgtgccactgcactccagcctgggtgatgggagtgagaccctgtctcaaaaaaaaaaaaaaaacctagctaccatttatttagcatctgctataggtcaacaggtattgtgttaatatcatttgtaaatgttatctcagttggttcttaaattgcctacaggtctttacagtgtgaattctgttatctcttttactactgttcttattctgcttaagctacactggcttcttagccagttctcagatataccaagtatattgccaagtgatggcttttgtagttactgttacctttgcctagaacgttcagtctgtctccattttcttttttgttgttgttgttgagatggaatctctcactgtcacccagactggagtgcagtggcgcaatctcggctcactgcaacctccacctcccaggttcaagtgattctcctgcctcagcctcccaagtagctggggttgcaggtgcgtgccaccatgcccagataatttttgtatttttagtagagatggggtctcgccatattggccaggctggtctcgaactcctgacctcaagtgatctgcccaccttggcctcccaaagtgctgggattataggcgtgagcaaccgtgcccagcctctctcttcatgttctttattcattcatatctcacagttctcaagggagccaatcctgaccaccctaattaaatttgtaacccctcgctagtatttccagtcccccttatctttgctctataatttcacctcttggaacactacaaatttattatgtttttaatttattgattggctacctcttctcctctccactagaatgtgagctccacaaaggcaaaacattttgtctgttttgctcattgatatatccctggtacctataactgtgtccagtgcatggtaagcactccataaatataattatttgttgaattgcattgaactttttttttttttgagacggagtcttgctctgtcgcccaggctggagtgcagtggcgcgatctcggctcactgcaagctctgcctcccaggttcacggcattctcctgcctcagcctctggagtaactgggactacaggtgcccgccaccacgcccggctaattttttgtatttttagtagatacagggtttcaccgtgttagccaggatggtctcgatctcctgacctcgtgatccgcctgcctcggcctcccaaagtgcgggattccaagtgtgagccaccgcacctggcctgtattgaacttttatagcggcactacaaaatacagattttcatcttcattttgcagatatggaaattatgacttggagcagttaagtaatttactcaaggtcattcatagaagtagcagagctgcaatttttacccaagttttgacctttgaatgagaacactctgtcttaataatgcttatcttaagtaaataatatagtaaaaaggtgataagtgctttggggaaaaaaaaacaactgtgtctttttttctccactctttaattttgaaattctttcagacttacaaaaaagttgcaaaaaatactattcagagaacttgtataactttccacagcttaacctaatgttaacatccaacaccaagaaattagcatcgatacaatactgttaactttctgcttcttttcttccttcattaatccacacagctcctgctgttaagtatgttattttttgctgttgctgttattgttgttattttgagatggagtctcactctgtcacccagactggagtgcactggtgcgatctcagctcactgcaacctcagcctcccgggttcaagagattctcctgcctcagcctcctgagtagctagaatcacaggcatccaccaccacacctggctaatttttgtagtttttagtagagatggagtttcaccatgttggccaggctggtctcaaactcctaacttaagttaatctgctggcttggcctcccaaagtgctgggattacgggcatgagccaccatgcccggccttatttttggtttgtggaaagcagtttggctaggtgtttgactttaattttacttaaatggctttcatgtattatctatgcatgataattttatactcaccaagattattatcaagtacataaataatagttgcatgagctggatgaatgtatttctgcaatattcctttttttttttttttaaggtaccagatcatcagtcaattaagttaagtaatctaggtgagaataaacactatgaggttgcaaagaaatgcgttgaggatttggcactctacttaaaaccactaagtggaggtaaaggtaagttcataaaatgcatttttactgataagtaggacttggtagtacatttactttgaatgacttgatgtggataccctattaagttatggaaaaggagtttgcttgagaaatgccttgaaaaatgtatagactgagaaaattatgttgtcctattttctgaaaataaccaatattgttattaagaattcaagctagagccgggcgcggtggctcacccctgtaatcccagcactttgggaggccagcgcgggcggatcacaagatcagaagatcgagactatcctggctaacacggtgaaaccccgtctctactaaaaatacaaaaaattagccgggcgtcttggcaggcacctgtagttccagctattccggaggctgaggcaggagaatggcgtgaacccgggaggcagagcttgcagtgagccgagatggtgccactgcactccagcctggggcgacagagcaagactgtctcaaaaaaaaaagaattcaagctgggtgtggtggcttcatgcctgtaatctgagcactttataaggctaaggtgggtagatttcttgagcccaggagtttgagaccagcctgggcaacaaggcgaaagcccatctctactaaaaatacaaaaaattagctgggcatggtgacacacgcctgtagtcccagctactgaggagaccggtgtaggagaatcacatgagcccaggaagttgaggctgcagtgagctgtgatcgtgccactgcactcaacctgggcaatgggagtgagaccttgtctcaaaaaaaaaaaaaaaatttaccagagtcactgcatcttgaaatttgtacattatttgaattcactgtgtaatagtgctgtaacagaatattagttttgataagtcctattaagacagcttcatgtatgcatgtattcattcagtcattcattaaattttattgagcacttaacagtgattaaggtcactgccatcat

SEQ ID NO: 12248 - DNA, 6000 bp, Homo sapiens
accagttcctgagcaacccccacttagcaggagccggcctagcgctgtgcaggtgtaatttactggcctgcttgccgactccatgggaagctgttatgatgaccctcatccccatgttacagatgagaacactgaggatggaaaggcagctggcaggtggaagaatcaggacctgaacctttggcatctgtcaaatcgctgtgcttttcacctctactgtaggctgcagtgcaggaacttgaccctgcaggcatcgtagaaccaggggggagcccggggccaaggcatgctgagacctcctggtggctgggggcagtggctgggctggatgctgggaaacctgtgaggctgtaattgggcctgaaaagggtaaagagtggcccgggggtactgaacaagacggggcaggcattgcagcaagaaggacccttgttgaaacgtatcttccttgggaggctgagatgggtggattgcttgagcccaggagtttgagaccagcctgcgcaatacggcgaaaccccgtctctacaaaaaatacaaaaattagctgagtgtggtggtccacttgtagttactcaggaggctgaggcatgagaatcgcttgaacctgggacggggaggttatagtgagccgagatcgagacactgtactctggcctgggtgacagagtgagactctatctcagaaaagaaaagggggggtggcagcgggaagaaaagtatctgtcctagtatgatgaaataatattcacagcttctgtgtctggggcacctacttagtaccaggcactcaacaggggttaccccatcaaactgacacactcagcctgtgaatgcctgctgcttgctggagccagactgtctgggtttaaatccaggccgtgacacttagtagctgggtcacctcgggcagctggtcttcagtttctttaaccgccctggtcttcagtttcctggagtgtgcatgggtgtaatagcgccgcccacctcacaaggctgctgtgaggatcaaatgagttcactcgtgtaaagctgcctaggctcccagtaagcatgatgggagcatctgcagtgattattggtggtctgcaaatggggaaactgaggctcagagaggttaggcttctgctcaaggtgaccagcattttaagaggcagagctgggatttgatccaggccatctggctccagagctgtttttcttgatcatcctccaaggtgctgaaggtagccctctggaaatctgggaggtgctgtgtgcacatgggtggcgagggtggagaggggacagtggtgggaggtggcttctgggtctctcacttggggttccagtcacccaggcccccagcggctcctcctctgacccagtcccgggaggccctggcgtttcccttggtgccaggggattgttttcaacttggtctgggcccgcctcaggctccgggagacaggcccaggcgtcacactccctcctgtctccccattctcgtctgcggggtgggggcggccaggattcgaaaaggccccaaaataaatggacctcttatctgatctccccgccaggcctgttatctgatcattacataatggccaggcttgtggcctctcccgctggctgacggcatggaggaggcggccccaggcggccccagcaatccgggaggaactggggttcctggaagtctggggagggggcagggaaagtcccaaagggaaggagggaggcgctgcgataatctgcaggccagacactgggtcatgttgggagacgcgggtccgaggcccggcctggtcaaccatgtgctgtgagactttgacctgtcccgtccctccagacctcagtctccccatctgagtaggaggggcttaagctaggtaacagccaaggaacctgcgctcaccgatgaggaaaggagagggtggggagaacatgggggctggtgggtcagagggactggagacaggagatggcaccagcccttgattttgttggggtgagggagatcccagtgacctctccatcccagaggaccgtcacctggaggccaccccatcccgccacttcaccccaccccttagaacagtcaattctacagtgactgaagtcagtcaaataattgtaattaagagaaagctgccggccaggcatgctggctcactcatggtggctcacacctgtaatcctagcactttgggaggctgaggcgggaggactgcttgagctcaggagtttgagaccagcctgagcaacatagtgagacccagtctctactgaaaatttaaaaaattagccaggcgtggtggcgcacaactgtagtcccaactacttgggaggctgaggcaggaggatcgcttgaacccagcagctcaaggctgcagtgagctgttatcacaccactgcactccagcccaggagacagagggcaaccttgtctgaaaaataaacaaatagaaatttaagaaagaattgccatgtgcccagtctcatggagtcctcccagccacctctgtggatcatgtgggctctgttgtcattttatagaccaggtattgaagccccaagaggtgaaatcattcaccagagccacatagctggtaagcattgggcctgagaggcaaaccaggtcagcctggctccagggagcttgcttttaaccaaaatgccactatgtccaggcactccagagtccctgggacatgtaggatagggtcagagagacgacatataaggcctgggcccccgtggcagccagaagtcctcatccagatcttctccttcccaagacagagctgggaatggcgttgccatggcaaggggtgaccatctcacttcctttgctgacttctggggcccagagcccaacgtgctgtgggaaggtgaggaaggaggccggtgaggctccagacagcccagggttcagaagaagcctccctgccccctcctctgagccggccttggctggacatgaagccagtctctccgcgcccatctttgatctccaagaaaacaggaagtgagcgcgacaagatggagacacaaacttccaaacagtctccccttctgtcctccttccctcctccggagcccccttcccccggcacattcctcaggacgaggtgtaggagcctcatttccttttccgaccctgctgggtcagggtgaaattccattcctttccctcaggacctgtgtttccgggctctgcggtctgctctggcagcctccaaacctgggccgccttctcggctcgccctgtcccttggggctagggaactctcaaccccttcagaccattcctcccaccaccttgaggcaagagaggggaagctttgtctcctgagctcagctcctgccttacctggagggagacttgggttcacacctaggccctgccatgaagttagggttgccagatacatcaaatgaaaatcagccgggtgtggtggctcatgcctgtaatcccaacactttgggaggccgaggtgggaggatctcttgagtccaggagttcaataccagcttgagcaacatggtgaaacctcatctctataaaaatgcaaaaattagctggatgtggtggtgcatgcctatagttccagctactcaggaggccgaggtgggaggatcacttgagcctgggaggttgaggctgaggctgcagtgagctatgattttgccactgcactccagcctgagcaacagagcagagtctgtctcaaaaaaataaaaaataggccaggcgcagtggctcatgcctgtaatcctagcactttgggaggccaaggcaggcggatcacctgaggttgggagttcaagacgagcctgaccaacatggagaagccccatctttactaaaaatacaaaaaattagccaggcatggtggtgcatgcctgtaatcctagctgctcgggaggctgaggcaggagaatcacttgaacccaggaggcagaggttgcagtaagtcgagatcacactgttgcactccagcctgggcaacaagagcaaaactccgtctcaaaaaaataaaataaaataaataataaaaaataatttttaaaaataaataaaaaataaaaatataggaggctggccgggcacggtggctcacgcctgtaatcccagcactttgggaggccgaagtgggcagatcacctgaggccaggagttcgagaccaacctgagcaacatggagaaaccccatcgctactaaaaatacaaaattagctgggtgtggtggtgcatgcctataatcccagctacttgggaggctgaggcaggagaatcatttgaacccaggaggcggaggttgcggtgagccaagatcacaccattgcactccagcctgggcaagaagagcaaaactccatctcaaaaaaaaaaaaaaaaaaaaaaaaaaaaaaaaatatatatatatatatatatgtatgtggatgtgtgggtgtatatatgtatatctatatatgtatatatgtatgtatatatgtagatctatgtatatgtgtgtgtatgtatatatacacacacacatatatacatggggcccagtgaaatccgaatttcagataaacaatgaaaatttagtataagtacgttccatgcaatatttgcaatatactaatacttaaaaaaatgcactcattgtttatctgaaatttaaatttagctgggtgtccttctattcatcgaccctatacgtagtagcgctgtgaccttgggcaggagacgtttcctctcctagccttggttttttttaatccatggaacgaatataatgatatccacctcataaggtggctgtgatgatgcaggaaagccgttagctcatgtcaagtccctaggagacgtttggaaagtaggagtcattgtcatcaccttattctcacctggcctctttccggatgtttctccaacaggtcttgcagaaacagtccattgtgaccttcagcctgtgggccccgagaggggcgaggtgacatataccactagccaggtctcgaagggctgcgtggctcaggcccccaatgccatccttgaagtccatgtcctcttcctggagttcccaacggtgagtgtcccatggcagggtcgggtgggggctcagaggaagctccaaggcagatggggtgaggggtgccttccttgtggctgtccctggggcagtggctgagtcctcgttaggccccctgccaagagagtgatgtgggcatctcacagggcccataagaggtggcatttctaggggcagggtctggatcagggcagtcttttgggtgccaccagaagactcaggtgggaagagctgagtagagaagagccagatgggtgggggggaccaggtgagtgttgcttatgcacctccaatgatggagacctcacagaatctcagaagaatgcagctcctctctagggagcttggactttgaaaagtgcttcttgggccagccacagtggctcacgcctgtaattccagcactttaggaggccgaggcgggtagatcacgaggtcaggagatcgagaccattctggccaacatggtgaaaccccatctctactaaaaatacaaaaattagttgggcgtggtggtgagcgcctgtaatcccagctacttgggaggctgaggcaggagaattgcttgaaccagtgagttggaggttgcagtgagcttgagattgtgccactgcactctggcctggtgacagagtgagactctgtctcaaaaaaataaaaaataaaaaaataaaaataaaataaaaatacaaaaattagctaggcatagtggcgcatgcctgtaatcccagctgtacttgggaggctgaggcaggagaatcgcttgaacccaggaggtggaggttgcagtgagccaacattgcaccactgcactccagcctgggtgacagagtgagaccctgtctcaaaaaaaaaaaaaaaaaaagaaaagaaaaagagaagtgcttttcagttgagcccagatctttctccctggaatgtcccctgctga

SEQ ID NO: 12249 - DNA, 6000 bp, Homo sapiens
cagaagggagccctgcagggctaccgggatgctgtctgcagtgggcaggctgctgcgcgtgccaggcgcttctctgggctgtctgctgagctccggaaccagctggacgtggccaaggtctcccagcaggtgaggccctgcctgcccactgcccgctgcgctgcttgctgcctgagttgaaggaggggctgggaccgcttggagagctcagggctcctgggcccaggctgtgcgtgggatgctgcctgtgggtgggtatccaatggcaccatggctggtgccccactcctgctcaccatcccagctcctgtcctgggctcccgttacccaggctgcagactccctcccagcacccctagcttgtgtctccctgctgctgtctccctgctccactcctgacctatcacccacctgcagtccatctcaccccgcactgcccacgtgcctgtttcccctcagctgggcctggatgcccccaacggctcggactcctcgccacaggcgccacccccacggaggctgcaggcgcttctgggggacctgctggatgcccagaaggttctgcaggatgtggatgtcctgtcggccctggccctgctactgccccagggtgcctgcactggccggacccccggacccccagccagtggtgcgggtggggcggccaatggcactggggcaggggcagtcatgggccccaacgccaccgctgaggagggcgcaccctctgctgcagcactggccaccccggacacgctgcagggccagtgctcagccttcgtacagctctgggccggcctgcagcccatcttgtgtggcaacaaccggtaggtgggcggcaggggaatgggggtgaggaggacagccaggggcagggcgtgagccctgaatctaggctctggctctggaggtctcatttggcgccctgccctgtgccccgaagtcctgccccatcccgatgcccctcccactctcgcggccctgccccctaacggcctggcccggccccctgtcccctaccccagcaccattgaacccgaggcgctgcggcggggcaacatgagctccctgggcttcacgagcaaggagcagcggaacctgggcctcctcgtgcacctcatgaccagcaaccccaaaatcctgtacgcgcctgcgggctctgaggtcgaccgcgtcatcctcaaggtgcacgggtctgggacgctccatgtttgacaggcagagtgggagggggtctctgcaggcctgggacccctgggcagagggtgtcggcagaattgacacgggaggggtacggggtgcagcttcggatgggacacaggctctgcaggtgggggaccagggggtcgcttttcctttcgggagctccaggggctgctgtgggaaggcactggagagtctgctctggcagggtcctccggctgggggtggccggtccagggcagtgctggtggaggaggggtgtgtccagagaccttccagagtgtctcgtgggcgggcagctgggcagtttgggttctgggtgaggggtcctgtctggaacaagcagaggccagggctggacattggcctgggaggggagggcctgtggacgaggccaatcctgggtgtagagggggtccctaggatgagggtgggacagatgagggtggagcattgggtgcttaagggacacatggagacaggtccagcaaaggagctggtgggcacagctgggcagttgggggtccggaggccgtgctgccctgggagtggagggcaaagcaggtttcacctgagcgccgcagaaaggagtggagagcccgggcgtgggactcacgcttgaaatcccagcactttgggaagccatggtgggaggatcgcttgagctcaggagtttgagacaagcccgagcaacatagcggaagcccgtctctaccaaaaatacaaaattagccaggcgtggtggtgggcacctgtaatcccagctacttggagggctgaggcgggaggatcccttgagcctgggaggtggaggctgcagtgagctgggactgcaccactgcactccagcgtgggtgactgagaccctgtctcaggaaaaaaaaaaaaaaaaaggtggggagggttagttgttggcaatggaccagccactggggaggtgagtggggtgagagcccccaagtcggtgggggtccgtccagaaactccatgcccctgcctcaccccctgcaggccaacgagacttttgcttttgtgggcaacgtgactcactatgcccaggtctggctcaacatctcggcggagatccgcagcttcctggagcagggcaggctgcagcaacacctgcgctggctgcagcaggtgccaagggtgcccgcgagggaggcggctgtgggtggtgtggggagcccctctctgcccggctcggcaggcgcaggtccccctctgagccgcccctccaccccaagtatgtagcagagctgcggctgcaccccgaggcactgaacctgtcactggatgagctgccgccggccctgagacaggacaacttctcgctgcccagtggcatggccctcctgcagcagctggataccattgacaacgcggcctgcggctggatccagttcatgtccaaggtgagcggtggggcctccgagccaacccacgacaccccctgcctcgcacatgcccacggcgggctccagcgatgcccctcccgctaggtgagcgtggacatcttcaagggcttccacgacgaggagagcattgtcaactacaccctcaaccaggcctaccaggacaacgtcactgtttttgccagtgagctgccctccccgccccgccccagccccccacagacctcttcctccccagcccagccccacccgtccccctgtgccctcccactccttggccgcgccctggccttcccccctcacccgccacttcccctccccacccctgccccttccaaacggccccaacccacaacccgccccctccctgcacctccccacttctgcccacctttcccctggggcccccaccccagccctgtcccacctttccctggaccctcctgtccccgcccccacaccttggccccgcccccgtgccttgctttcccccccaccacgccttggtcccgcccctgcatcttggccccgccccaacctcccggccccaggtgtgatcttccagacccggaaggacggctcgctcccgcctcacgtgcactacaagatccgccagaactccagcttcaccgagaaaaccaacgagatccgccgcgcctactggcggcctgggcccaatactggcggccgcttctacttcctctacggcttcgtctggatccagggtgaggagcaggcccggaagaccggctggaggattcatgggggaggacaggtgtgaggacgagagggcctgcccggcacctgatggctgcccccacccacagacatgatggagcgcgccatcatcgacacttttgtggggcacgatgtggtggagccaggcagctacgtgcagatgttcccctacccctgctacacacgcgatgagtgagtgctgggcgcccggggctggggctggggctggggctgagtggcgcctgagcgcggcctccccgcagcttcctgtttgtcattgagcacatgatgccgctgtgcatggtgatctcctgggtctactccgtggccatgaccatccagcacatcgtggcggagaaggagcaccggctcaaggaggtgcgcgggccgggactctccctggaggcgcgggctggcagggaggggcggcgtcctccccggggcctgccccaagcccctggcccacccgcaggtgatgaagaccatgggcctgaacaacgcggtgcactgggtggcctggttcatcaccggctttgtgcagctgtccatctccgtgacagcactcaccgccatcctgaagtacggccaggtgcttatgcacagccacgtggtcatcatctggctcttcctggcagtctacgcggtggccaccatcatgttctggtgagcgcgggccatggtaggagggacctggggcaggcacttgcccagcaagctcaccccacatcctctcagagccccctggaccctggcacgggcctgcccaggaggccgggcgtgcgggtggatgacggtgcgcgtggcccctgcccacccagcttcctggtgtctgtgctgtactccaaggccaagctggcctcggcctgcggtggcatcatctacttcctgagctacgtgccctacatgtacgtggcgatccgagaggaggtggcgcatgataagatcacggccttcgagaagtgcatcgcggtgagggtcgcgggcaggcgggcggctggggtgccgggccaccccacgtgctgacaccactgccttctcagtccctcatgtccacgacggcctttggtctgggctctaagtacttcgcgctgtatgaggtggccggcgtgggcatccagtggcacaccttcagccagtccccggtggagggggacgacttcaacttgctcctggctgtcaccatgctgatggtggacgccgtggtctatggcatcctcacgtggtacattgaggctgtgcacccaggtactggccagcccttggagggcaggggagaggcaggggtccccagccagggttggggaccagcagtctgtgtccactcctggatgcagcacgggtggctccctgggtgggcacgtggcccacgtggtggatggtcaccccaggccctaggtcagcctcccctcccctccccgacccccaggcatgtacgggctgccccggccctggtacttcccactgcagaagtcctactggctgggcagtgggcggacagaagcctgggagtggagctggccgtgggcacgcaccccccgcctcagtgtcatggaggaggaccaggcctgtgccatggagagccggcgctttggtgaggctggcatcagaatggtggctggggtgggcgctgggttcagagtcctgggtggccttggcgccgcccccaccctgctgatccacagccctggtgcagaggagacccgtggcatggaggaggagcccacccacctgcctctggttgtctgcgtggacaaactcaccaaggtctacaaggacgacaagaagctggccctgaacaagctgagcctgaacctctacgagaaccaggtggtctccttcttgggccacaacggggcgggcaagaccaccaccatgtgagtgtcggaggggcagggcggtgggcatctgctgaccagagcaggagtcctagtcagggcagggtggggcccctgcagagggcgtggggtcatgaccccgcccacctacccaggtccatcctgaccggcctgttccctccaacgtcgggttccgccaccatctacgggcacgacatccgcacggagatggatgagatccgcaagaacctgggcatgtgcccgcagcacaatgtgctctttgaccggctcacggtggaggaacacctctggttctactcacggctcaagagcatggctcaggaggagatccgcagagagatggacaagtgggtgggctgggcggggggcggggcaggtgggcggaggccctggggctctgcatagcagcagccccatgccccacctccctgtcccaggatgatcgaggacctggagctctccaacaaacggcactcactggtgcagacattgtcgggtggcatgaagcgcaagctgtccgtggccatcgccttcgtgggcggctctcgcgccatcatcctggacgagcccacggcgggcgtggacccctacgcgcgccgcgccatctgggacctcatcctgaagtacaagccaggtgagtggggtgccgtgtgggcaggggtgcgggcggcgcctcccctgccccctgaccctgggtctggccttgtcctaggccgcaccatccttctgtccacccaccacatggatgaggctgacctgcttggggaccgcattgccatcatctccca

SEQ ID NO: 12250 - DNA, 6000 bp, Homo sapiens
tttattataaagaattggctcacataattatggagactggcaagtgccaagatctgcagtgaaaatgggcaagatagagactcaggagagccagtgatttagttctagtctcagtctgaaggcctgagaaccaggagagccaatggtgtagttccagtaccaagtcagggaaaagagctgatgtcgccttttgaaggccatcaggcaggaagagtagtttcctcctaattttttatttatttatttatttatttatttatttattattatttttttgagacggagtctggctttgtcgctgaggctggagtgcagtggagcaatcttggctcactgcaagctctgcctcccaggttcaccccattctcctgcctcagcctcccgagtagctgggactacaggcgcccaccaccacgcccggctaattttttgtatttttagtagagacggggtttcactgtgttagccaggatggtctcgatctcctgaccttgtgatccacccaccttggcctcccaaagtgctgggattataggcatgagccaccacgcccagcctagtttcctcttaattgagaaggggtctgattgtcattctcttcaggccctcaactgattggatgaggcccactcgcattggggagggcgatcttctttgctcagtctacccatttatacgtgactgtcattcaaaaacaccctcagagaaaggcatagaataaagtctgaccaaatacctggttatttcatggcccagtcaagttgaaataaaattaaccattgcagcaagccgtgaagctggttatttgtccttgttcctgttggagctgtgactcccataggacttgtgcactgaatggaaggaaggtaaaggggagatcagagataggagaagctgtgttgagtgtctagtactgtaacttgtactaagctgaatgcaacaaacgatgcttttgtctttcagtgtatagagacatcctggcttgtggcagaggggattcgttttttataagaagccactttgaatgtgagaaggaaactccacagagcctggccttcaccagaggggaggtcttccgagtggtagacacactgtatgacggcaagctgggcaactggctggctgtgaggattgggaacgagttggagaaaggcttaatccccaacaagagcaggtaacagagatcgcattctcacataccccttttaatccttccccctgcagaaaactagagaccgccccccttcccccgtaaaaggaaaccccacatgatgagttcattacttgtcaccatctatttcttgtttatggagagtggcctgaactgtaaatagccaccagccagtttattgtgagtaaatttagcatcatgtggttggttgctgaatgtggctgtttgaacaacttcctaaggagcatccactgccttgtaccgtatacaagagatatactgaatggccgtagcacaccagcacacctcttagagacaaggtacccttgtccggtgcccagtctccatccttggagaggtttatgcaccccagtgaacacttggtgtttggctgacagtgcaggaacctagaaaagaggcctgtatttgagcaggagttccaggtgtgtgtactgtgtacctgcatatcagaatgggccaaatttcacatgtttattgctgagccacttctgggagatttcacagagacccagcctttttctgctcccatttggaagtgaaggtccccacatttcccaccctctgaaacttcttcattgtcaagcggaatcttctctgagctcagaagtaaaattgactggatttgattaatgaaatgcatgttagctgcgttttctggctttagagatttacttcccgtggtttcttctcagagctgaacaaatggccagtgttcaaaatgcccagagagacaacgctggggaccgggcagatttctggagaatgcgtggccagaggtctggggtgaagaagaacctgaggaaaagtcgggaagacctcacagctgttgtgtctgtcagcaccaagttcccagcttatgagagggttttgctgcgagaaggtgaggaagtcacatggggcctggaaatgaactgactgggctctgagcctgttcacctttattttcagactgtatggtcaagttctaacttatgtatgtcagttatgccaaaggcagtttatagagttgaaatcaaattctaacaaggagcatgatttataaaaagctgtttcagttcctaaattgaggcttatttctgcaacttaaaaaatgttttaataccactgttcaagagtttcggtatattggctgggcactgtaccttatgcctataatcgtagcactttgggaggccaaggtgggaggatcacttgagctcagaagttcaagactagcctgggcaatatagtaagacctcatctctgcaaaaaataaaaaaagtttccatatattatcaatgggaaagtttgtgtttaaaaatggtgaggagctaggcagtgtagtcccagctactcaggaggcttgagcctaggagtttgagtttagtctgggcaacatagtgagatcttgtctcttaaaaaaaaatctaggttagcatgtggttgaatgaaaagaaaaaaattgttttaaatggtgaggatagtgaaggcatattcttcagaacagagccaagctgaattggggagaaaccacagtttctttcgtttagttatgttatcaaaagcccatacaatacttttactgcttatcataacagctaggcaagtgtgtatgctttaatggcctttcttgtcatttcagctggtttcaagagacctgtggtcttattcggccccatagctgatatagcaatggaaaaattggctaatgagttacctgactggtttcaaactgctagtaagtctgtcagtgtttttttttcccccaaatttttattttgaaaaatttctaacagaggagttggaagaatcatgaacacccacgtacccttcacctggaatcaccagttgctgacattttgtcacgcattttctctcacccactgcctgcaccatagacacacatacacacacacatacacatactctttgaaaaatttctgcagaatcatttataacactttatccctgaatacttgtgtgaatctcctaagaacaaggactttctcccacataactgcaataccattatcacagccaagaaaggtaacattgatgtggtgtgattttgtatatagtccattttccacgttttcttaattgtcctagttatgtgcttcatagcttttttttaaattcagaatacaaccaaggaccattcatgacatttgatttttatgtctttttgtgatttttatgtctttccagtcccctcttttttctaaataactttgttacactgatattttgaagaatccaagctagttgtctcctagaatgcttcctgttggactggcctaaccgtttcttcatgattagatttccactaagcaggttatgtgggtccttcccactgaatcttgttaggagacacttaatgtcaggtgtgccatcattgcttgatgctaggtgggagtatttggttgtcactgttttctaaacaattatttagcttcctgtttttgcttttgcagaaacggaaccaaaagatgcaggatctgagaaatccactggagtggtccggttaaataccgtgaggcaaattattgaacaggtgagaaaattcatccacagaccgtgttttcagaaagaattagattatggtttgctgcagtcacttttaggatagtatctgtacttttaatcattaaatgttaataataaaaaattggccgggcacagtggcttacacctgtaatcccaacactttgagaggctgaggcgggtggatcacctgaggtcaggagttcgagaccagcctggccaacatggtgaaaccctgtctctactaaaaatataaaaaattagccgggcacagtggcaggtacctgtagtcccagccactcaggaggctgaggcaggagaatcgcttgaactcaggaggcggagtttgcagtgagcggagattgcaccattgcactccagcctgggcgacgagtgaaactccatctcaaaaaaatatatatataatgtaaatgcaaaccgtttcactgtgtggaaaccagtcactgttggcagtgagcggagattgcaccattgcactccagcctgggcgacaagagtgaaactccatctcaaaaaaatatatatataatgtaaatgcaaaccatttcactgtgtggaaaccagtcactgttactgttctctggcagtaacatactgtttttttttccagagttcccagcattataccaaataatgtgttaattcattttatcagaagttctaacacattggtaatattgaagtgggcattaggtagaaggaaatgtgttctgcttcttgatttaaatttacaagataggtggctcatgcctgtaatcccagcactttgggaggcagaggcgggcggatcacctgaagtcaggagtttgggaccagcctggccaacatggtgaaaccctgtctctactaaaaatacaaaaattagctggccatggtggtggcgggcacctgtaatcccagctactcaggaggctgagacaggataattgcttgaacccgggaggcggaggtcgcagtgagccaagtttgtgccactgcactccagcctgggcaacagagcaagaatctatcccaaataagtaaacaaacaaacaaacaagatatatctcatacagcctttacttattaaaacaaagtatttgatgctatattactttatatatccatttctctaacttttccccttttgtaaacaggataagcatgcactactggatgtgactccgaaagctgtggacctgttgaattacacccagtggttcccaattgtgatttttttcaacccagactccagacaaggtgtcaaaaccatgagacaaaggttaaatccaacgtccaacaaaagttctcgaaagttatttgatcaagccaacaagcttaaaaaaacgtgtgcacacctttttacaggtaagtgaaatgtaaatgtagtccctttgctaaaaaatgagaaataaagaattgaagagtagaagaaataattaattaatctgaatggagaatttgaaattgtgttcatgactccttgaaaaatagttaatcctataaaatgggatattaggccaatggcatttatatattgaactttgtaattttgtctatttgaaaatgaccataaagatccatgatgtggtaataattagctattttgatgaagttcatattttcctgtgagactataaggctagtgattgagccaggccaaacacctatgtctctctagagattgtgtcattgttctctactcaccatcaatacatgcattaacttacaaagcgaaaggaacttggtttcattatttaaaaatattcctgtccagcatggtggataacacttgtaatcctcccactttgggaggccaaggcaggaggatcacttgagcccaggggttggagaccagcctgagcaacatggtgagatcctgtctctactaaaaggcctagcatggtggtgcatgcctatggctgaggttggaggatcgcttgagccaggaattcaaagctgcagtgagctgtgatggcactgctgcactcctgcctggtgactgagtgagaccctgtctcttcaaagaaaaaaaaaaaaatctagaaacttggacactctgaatattggatgatttaaagatttattatttctctttgttaggtgtgataataatattgtgatttttttaaaaacaaagttctttgaggaatgcatactaaataaaatatttatggttgacctaatataatgttgagaatttgcctaaatagtctgcagtgaggggagtagatgggattatagacaggacaagactggccaagacttggtagttgttagttgtt

SEQ ID NO: 12251 - DNA, 6000 bp, Homo sapiens
tttcaatgcattgtataccagtgaaacccattctttttttttttttttttttttttaaagaaggagtcttgctgttgtcgcccaggctggagtgcaatggcgccatcttggctcactgcaacctctgcctcccgggttccagcaattctcctgcctcagcctcccaagtagctgagattacaggcaggcgccaccacaccaggtgaatttttgtgtttttagtagagacggggtttcaccatgttggccaggctggtctcaaactcccaacctcgggtgatccaacagccttagcttcccaaagtgctgggattacaggtgtgagccactgcacccggccaaaacccattcttaattcacgttccaaaagaagagacctatgtgggcacattttacaacttcctggtggattatttttcatgtgggtgagcactttatactcagtgtgaagagagaagatgcacgcctaggaggaaggacggtaccctgtgtaggtaggggtttggatgagtggagatcttaatatagaattaagctgggagtggacacacacattcatgatttgtgagacaccagagtggtaggttctttcttatcaactgactagccttagttcatgctttagctcctggttgtaatgccaggactgtgtgactgatcaaacacactaggatacttcagtgatgacttccttgggctgacggcaaagagtagcctcaggtgaggggccaggatcactgtcaccctcagatctcatgtgtgttattttttgtttttgttttttttttttttttttttgagacggagtcttgctctgtcacccaggctggagtgcagtggcacaatctctgctcactgcaagctctgcctcccgggttcatgccattctcctgcctcagcctccccagtagttgggactacaggtgcccgccaccgcctggctaatttttagtattttttttagtggagacggggtttcactgtgttagccaggatggtctcgatctcctgacctcatgatccacccacctcggcctcccaaagtgctgggattacaggcgtgagccaccgcacctggccagatctcatgttttatccaactctcaacccaacacttgccttcctcggcaggaaacacacactgaaagtctcattgacttcctccggtttgtagaggtcttggctgtttttatgaaagttgatgtttattttacattcattttatttattaaacacatcttgaggcccaagcatcggatactctttaaataaatttaaacagtaaacaaattcgcagagtgagtcggctgccagggttatggctctgagtttcctaccccaaaatctcatgacactgatcattggaaactcttttatagaatcaaattacatgtttggaacatgtcagtaaattattattttttttagtcacaaatatatctttttattgtctggttggtctaaatctgaagatggtatgtcactagaatggttcaagatgaaatctgacatattccttgttacctaatttttgtttgttctcatcgtggaggtatgcggttatttagatcatatgtaaacaatctcagtagagttttttttatcaataaaatgtctttcctataaagacgtattgaattcagttaatattcagagttttgtatgccacataatttcaaaatatccatgatgctctttagttttaaggcatattttttccctactgggtttatagttttaaattttatttaatcttacatatcctcctattaattgttcaaaagatcagggtttctataagatatataacttggctccaaatcaacatatgaaaagtaagcttttgggtgaaaaagacattaaaaatacacaatatatttatgctacccctcccagcaaagaaaaaattatagacaaggttagaggaaaaactcagctatcactctaagtgaaagagagagagatctggatgtaagtaaagcttatataatgatcaaataaaattatattttgaaaaacaaatctctatttgaatactgtgttcctaaaatgtaacattttaaattcatgtttaatgtttttgattcctttcagcaattttacccgaaacaaactgacgagtttgtctaggaaacatttccgtcaccttgacttgtctgaactgtaagtaatgattttgtgtggcatttggggaaatgttttcaaaggaaggggtaattaagtatttttcttttaatgagtgatgttgcagatctatttttataccaaattctcaaaaaatgatttctcaagtttcagtctctcagtcttttattccttcaaggtttattatctctcatttttaaaattcagtaattaaaaaaaatagaaatctcagtagtgacatatcatttctgattcatttaaatgttgattttacataaataatttctggtacagggaaaaaagagaaaaagaagggggctttgtgtgaaaacggctgtatgctttatatctcacagctctggtttggttcctgttggatccaggccctaaagtcaagcaaacccattcaaggaggaaataaaaatgggcaaaactctgctcacttttgtccatcttaaggataggggacattggaggagaggtagttgttctctctccccacccatctttgtgagattttcttccagatctgttattgcattcaatatttatttttaagtcccattttcttctgttgtaaaatgatagaaaacgtattgaaaggtgttgatgactaacagccaggatttccaagtgagctccattccttgcattgtccccattaaacaaatatgaactgttgctattcttatggtaaggcacctcaaagcatcctaatgcagaggctttgtggggcagatgtgggcccaggaagaggcctttgaagattaggcaatggcatttgcttaaactctatcttgcctgaattgtggagtctttttatgaagatccatccttattcacaaggaaattgtgcagattggaagatgtcactgctggagagacaacaagttaataggtgtaatgggtgttatatggtgaaagtcttggcaattgagaattatttggaataaagtgaattcaggacgttgaagcactaatgcttctaacacaggaataggcatgacaaactaaaggaagatacatgagatagggtaaagtacttggtgtaaaaattttgggcaacattgtgtaaaattttcttgctggattaaaaattagagtttcaatttcaaatttatgtctcaatattcttcttgaagcatatttaatcaattaattcaacaaatgttaattgtgtacctattacaaatcaaaatgatatggcacagggccatggggataaagggagaaaagtttctatgttcctggattctgttatccagtgggagaagtagaaacctaaagataaaagtgtaatgtgctgtcataatcatcgagcttgcatagtaagctggagaaagaagccagctgtgcaccagtgttgtgttgtcatatgaacattgctgtattcataattgaagcattcctttccttctttatcccttctgctgagttaatgatatcttcttttagaaagactctttagttttgcatgtactcagagctccaggaagcattttggattagtggggtttaaactggtggtgggtcttttctgcattctattccatatctcataacatcaaatcccattttggtgttggagggatacttggaggcgatcaagcagacacaaattaaatgagtctaccatgaccacattttcccctaagaaactcctggaaaagtctccagggatccctgagattcttagaacccaaccagaaaaccacaggagtaaatgatgttgcaaagcccaggtcctgtcttcacggaaatcttaagtattgtggttaatgccaggcagagtctatgtaacgattttaaatggcctcatttaaaggctcattaccataaatggaattcatcttaaataggccactgagtattacaaataagcatttaaagatttttttttccttgtggtttttattttcctcttgactacttcctcttttacccattgcaggccacaggagtccaggcagcatggctgaggtctgaatggcggtggctttccacccacagtggtctaacgcagctcaatctgcagctcagttgccttgccctcagaatagcttgctctgtgtgtgtgtgtgtgtgtgtgtgtgtgtgtgtgtgtgtgtgtgaaggaggtctacagcttcctttcaggttctctctctcacctttactccagctatcttgaatcaatgaaactgactgtgattgtataatgcagaaagctaggggtgccagccttctggcattcacaatttagtcttagctttgtacttacagtctcattttaaattgagatgaaattgttctgccccctgctgaagtttgagcttagaaagtggtaacacttgagcctttagcctggtcagaaataagtatgttagcattcctgaaaacttcttgttggcatccttttaataactctataataaccatgataaatttgtcatggcaccttattttccccatgttatgagatgttcttttctatcctatattttggctatttctgtctctatcttgtttcccctgttattctgtaaggtcttctatcattctccagtgctgtctgcatataggagatgctccgtaagtatcagataaatgaaggaataataagtactgtcatgctatgaaagtggtatgacttccaagcattgctggctagaaagaattcataatgttgtagtattttacaagcactaatgtagctaaaatggaaaaaggaacttgatctgttgtcatttttgttccctgtaggatcctggtgggcaatccatttacatgctcctgtgacattatgtggatcaagactctccaagaggctaaatccagtccagacactcaggatttgtactgcctgaatgaaagcagcaagaatattcccctggcaaacctgcagatacccaattgtggtaatttatttttaaatcaatgtgttctagttgctattaattattctcattgccttggtgcggtagtctgggaaaattaccactacctggattgtatatagtattctgttgatgtctccagtgactcagacaacatttatgtgcagtgtggagtaatctttgcaagtagaatattaattcagagtggatggctgtaaagtgcatagagaaaaagtacactgcttattctttttgtttgtttgttcatttgcttatttgttcatatttgtttttccatctatccatccatccatttatccacccatccatctgtgcaaaaactatctgctaaaagtgtggcacttctctggccacatatacccttggatggcacccaggccaaggatctcagggtgatgaaagtgtcctggcagcacaagcaaatccaattcaatccagcacattcccttaaacttgtcttactgccagaggtctgtgtctcttgatggggtgccccaagtctgccatgccacgtgcttctccccatgtctggatttaagatctcctactttaccgtcatcccctattcctcttcccagcgttttcatctccaacatttaaaagggcaccgaatggcaaaatcagagctcatgtgagtgctagtgagttataaggaaggaatagcaaagtgttctgcttaggattttactagtcttcagtgatgtacctctacaatacccacacatgcatgttactaccccattgacatttgaatcggttagtcaaccagttaacaagttcacaaacaattatgtttgatcttctggcctagtggctggtgacacagcagaaagccatgtagcacctggttcttgtgcacaaggaatctgtgtattaatcacaaacaaccgattctttgttttcggaagacgctattatttgaggtctattttttatttaagaaaaatggagctgctgc

SEQ ID NO: 12252 - DNA, 6000 bp, Homo sapiens
tataaacccacagtgtattgttttatttttgctttaaatagtcacttatcttttaaagatacttaaataggctgggagcagtggctcatgcctgtaatcccaacactttgggaggccgaggtgggtggatcatctgaggtcaggagttcaagaccagcctggccaacatggtgaaaccccatctctactaaaaatacaaaaattagctgggtatggtggcgggtgcctgtaatcccagctacttgggagtctgaggcaggagaattgcttgaacccggaaggcagaggttacagtgagctgggatcgcaccattgcagccagcctcagcctcccaaagtgctgggattacaggcgtgagccaccgcgcccggcccccagtcattcttttattttattgtattttattttttgagacggagtctcactctgtcgcccagtctggagtgcggtgcagtgacgcagtctcggcttactgcaacctccgccttttgggttcaagcgattctcctgcctcagcctcctgagtagctggaactacaagcatgagccaccatgcctggccagaacccagtcattcttatctgtatgtaatgggtcttgttttctctgtctgcttttaagatttcctctttatcactggtgttccgaaatttagttgtgatgtgccagagttcgttttttcgatgtttcttgtgcttagggtttgttgagcatcttagatttgtagatctgtagcttttaataaatttggagaaatatttggccattatttctttaaactattttttcagccccctccttcatggactccagctatgggtgttaacctgtttgggtcatcccaccgctcaccagtgctctgtttgttttgtttcctctgtgttttattttaggaagcttctattgctgtgtcttcaagtttattaatattttcttctgcagtgtctgatctgttaaaatcatttttcatctgagacattgtagtttttacctagagtttgaggtggagctttttaatctgcggagtctctacttgacacacttgatctttccttactttcttgtgcataggaagtacaattatgataattttgaatgtccctgtgtactaagtctatcatacatgtcatttctgctcagtctttattgatttctgtcctcattatgggtcaccttttcctgcttctttgtagttcctattcgttttttactggattttaccctcttgggtgctggttattagtgtattcctatgaatattcttgagctttatcttggagtagtttgacccttgcagggcttgctttgttgggcggaacaaggacagcatttagcctagggctggctttgcctcactgtagaggcaaaaccctctgagcactctttctgaacctccctgtattctgaggttttccactctggctgacaggaacgggaactattcctagccctgtaatcctttgggatggttctttccccatgctcaggtaggttcctcccacccatgcgctgtgactccctggggacccttgggggagctcactccctgtgcagctctctcctctccggcgctttgtctggcacactctagctgccctggcctggcctccccagcctctcagccccatctcttgaacatcaggaggctgctgggttccacctggcttctctgctctgcacctagactggaagctccaggcaggaagctggggcaatgggaggcgctcctggcttcgtttgtatacattgtatacatttctcaggaatcagtgtccttagcctgttgtccagcggctgggaaagattgttttctatgttttgtttgcacttgtagttataggcaggaaggtgacttagtccctgttactcctatctttgccggaagcccttgaactcataactcagttctgtggtaggaggaagtgcattaaatcaaaaagcggtaatctactaaataagggatttctcttatgtgtgtagatgggaggccaaaacatcactatctcctccatctggccagactttctgtgcctaaaaacagggctcacattcattaaaggatttatttatttatttttgaggcagggtctcactctgtcagccaggctgcagcctccacttcccaggctcaggtgattctcccacctcagcctcccgtgtagctgggactacaggtgcgcaccaccatgctcagctaatttttgatttttttgtagagacagagtcacattatgttggccatgccggtctcaaactctgggctcaaaagacctgccttggcctcccaaaagtgctgggattacagacgtgaaccaccactcctggccaaaggatttttatttacttagggtttttggctgtggactggctcttctttagtattaaaatgatctagttgcatgaatcgcaatcattttgtagataataataataaaatagctaatagctccatgtactgtcctaagaactttatatattctctaatttagtctttaaccaattctatgaagtactaactccattttgcacataaggctagtgaagcacagagagctgaagtatcttagccaagattacacagctaataagtgatggccaggattggaatttggggtctggctccagtgactgtgcatttaatcaacatgcaaaactgcttctggacaagttctgtttatctagtgagagggcaactgatacaggctccttcagctttcagaacaagccttaggaccccatctcaaccatcttactttctctccagattgtcttttttttttttttttttgagacaggatctccctgtcacccaggttggactgcagtggcacgatgatggctcactgcagccttgaccacccatgctcaagtgatcctcccacctctcagcctcctgagtagctgggactacaacaggcaccacgatgcctggctattttttttttactttttgaagaggcaggtttctccacattgtccaggctggtctcagactcgtcggctcaggcagttggcccacctccatctcccaaagtactggaattacaggtgtaagccactgcgctcggccttctttttcaatgattgttttatttacatgtgtatgtgtgtatgcctgggtcatacatgcttatggttcagtttcgcaagatataagaggatgttcggtgaaaacacgtctctcatctgcctttctcctctcaaagccccaagtgtcctccccgccccacaccctctcttcaatttaattatctttccagaggccgtcttcacaaataaaagctaggaataaatggcagcacacaatcccctttcttctatactttgtcatttaacaagttggtttttttttgttttttgtttttgagatgaaatttcgctcttgtcacccaggctggagtgcaatggtgcaatcttggctcactgcaacctccgcctcctgggttcaagtgattctcctgcctcagcctcccaagtagctgggattacaggcgcctgccaccatgcccggctaatttttctatttttagtagagacggggtttcaccatgttggccaggctggtcttgaactccgcctgccttggcctcccaaagtgctgggattataggcatgagccaccacatccggccttgtgtttgtatttttaaaataatggttgtggggccatgcgcggtggctcgctcctgtaatcccagcactttgggaggccaaggtggatggatcacttgaggtcaggagtttgagaccagcctggtcaacatggtgaaaccccgtctctactaaaaatacaaacattagataggcatggtggcaggtgcctgtaatcccaggtacttgggaggctgaggcaggagaattcgcttgaacctgggaggtggaggttgcgttgagccaagagcgacccactgcgctccagcctggatgacagagcgagactccatctcaatcaatcaatcaatcaataaaggttgtgaacactatcagagggtcacctcagcgaggaatgacagtagccagtgcatttatctgttagtaaactaagaaacaaatgaccatagattaattcctttttatttatgaccttttactcagttcggtctacagacttaatctgtgcctggtcctaggggtagaaaggtctgtgacttggtccctgcccccaggcagctcatcttctggagggagacgcagcagaagtagctgctgtgatgtggcatgtgctctgctggagaaaactggatcttgaaacaaggaaaaatgtttctagaatgctcttaggacatgctgccaaggactcttgatggtgttgcacttgatggtgaatgccttctggaagcaacccgagtggagggcagggagttacttttgctacggagccagctcagagtggattctgtaagctgagcctcatctggagcttgagtccgcacctccctgcagaattgccgggcttcatgcaggcaatcagctgcctgtgattggagggctggtgctggtagggataatgaacttggtagtgtcggcagaggtgattggccgggctctgctgcagtgagaatgcagactggatgctcgggtcctcggcttgggtgatgagcgaggacagctgaataactgggagctcgaagttgcttgctgcctccgggagtggtctgcttggctgtcgcgttttccttttctttttttttttttttaaaaaaaagccaaacgtttgctcaccatcacctgcagaagtgagtttttattgaagaagctccagctgctttctccttattgccggcagcctggcaagcctcccttagagtgagctacttctcaggccgggcacgacagcagtgctagcacatttgaaaaagcaggaaaccgcccctgcatgcagagcttccagcctgagaaccccaggcccgtcctcccagcagctgtgtagccagagagcgttggtactgtggtcacatccctcaaaagtgaacagtcgccatcagaggcgtttggaggagaccgtgatgttgcagatgctgtggcatttcctagctagctttttccccagggctgggtgccacggctccagagagggggacgatcgtgaagtcagaggcaccccagcccctgcctggagagaccagatggcaagctttttggggaaacaggacggaagggctgaggccacggaaaaaagacccaccattttgctggtggttggacctgcagagcagtttcctaaggtaatgttggcctcaagaggacctcctagtttagggcctggtctgggatcattttcctggggaaaaaacgagtgtggggaggaagggagaactcacaacgttagttcggggttcagggagaagtggtaggcaatgaggaagcccacaaatgcaatctaaaatctttctgtggcccctgtgaaagctgcattacccactgcgagcaccccagtgtggctgttgagggaaggaaggttgcaatagacttgccttaggatttgttagtttggctgaagaaagccatttgaaagtgaggggcagcctgtgaaagtgtgccttagcttatccgaacagctcaggaagggcgaagctaaaggggcgagagagtgtgcctcgaccgtggaacccagttgcttggagctgtgggggtggtcttggcatcctgaaggtcacagtccccttgcctgggtccgacccatctctcctttgggtctgggaggaagagtgaaggcatgagactgggtccgaggagaggctggagtcatgaggcgcagaggctggtgcccctctggaaatgactgcggccgctgcgggtctgccaactgtggggtctttcatccttcctgagcccagagcgtgagttaccatcctcacaagagccaaggtaagtggtagtatccccatttcgtagatgaagaaactgaggtgcagaatggttacattatttgcccagggttaaacaactaaagagaggtggagctgagatttcacccccaaatccttgtcctgtgctgc

SEQ ID NO: 12253 - DNA, 6000 bp, Homo sapiens
acctcaggtgatccacttgcctcagcctcccaaagtgctgggattacaggtgtgagccactgccccggcctttttttgtatttttaatagagacagggtttcactgtgtttcctaggctggtctcgaactcctggcctcaagtgatctgcccacctcagcctcccgaagtcctgggattacaggcatgagccaccgtgcctcaatgactagaagcatttgaaatgccctgaggggagtgggcaggggacacagggaaacaggattcttgggctgggtgagagcccaagtgagggtagagaccctgagtttgcagttgccccaacctgccccaaaacaagatggctattgggttttccaggcaggtgtgatgggaaaactctgaggcaagaaagttagtaacaggctggactcctggggagggtgggaggacttgggggaagaggaggacttgaggccagggaagaatcaggaagccccctgtcttagtccgtttgggctgctataacaacatatcttagactgcataatgtataaacaacagaaatttatcagccgggtgcagtggctcacacctgtaatcccagcattttgggaggctgaggcagctggatcacctgaggtcaggaattcgagaccagcctgaccaacgtagtgaaaacccatctctactaaaaatacaaaaaattagccaagcatagtggtgtgtggctgtaatcccagctactcaggagactgaagcaggagaattgcttgaaccaccccccaacccctggccaaaaaaaaaaaagaaatttattgctaatagttctggggggttgggaggtccaaggtcaaggcgtcagcagatttggtgtctggtaagggcccgttcctcatacctggggccttctagctgtgtcttcatgtggcagaaggggttgacaagctccccaggcctcttttttctttttgagacggagtctcgctctgttgccaggctagagtacagtggcatgatcttggctcactgcaacctctgcctcctgggttcaagcgattctcttgcctcagcctcctgagtagctgggactacaggcacgcgacaccacacccagctgatttttgtatttttagtaaagatggggtttcactatgttggccaggatggtcttgatctcttgacctcatgatccacccccctcagcctcccaaagtgttgggattacaggcgtgagccaccgcatccggcccccaggcctcttttataagggcactagccgcattcaggtggggcagcccacccaatcaactcccaaaggccccgcctgtttttttttttgttttttgttttttgtttttttttttttgagacagaagtctcgctccgtcgcccaggctggagtgcagtggcgcgatctcggctcgctacaagctccgcctcctgggttcacgccattctcctgcctcagcctcctgagtagctgggactacaggcgcccgccaccacgcccggctatttttttctattttttagtagagacagggtttcgccgtgttagccaggatggtcttgatctcctgacctcgtgatccgcccgcctccgcctcccaaagtgctgggattacaagcgcgagccaccgcgccgtgccggccccgcttcttaataccctgacattaacattaggttttcaacatgtgagttttgagggtcacggacattctgaccatagcacccttggaccaataggacaggcagaggctgtggaatgactctggggtgggtgaagtagggaacactgctttgctttagaaagggaatccctcttctggggctgggagtggcttcccgcaggggactaccgtgcaagggagaagaaatctggcatctctccagaatgcttctcattgcagggccgctggcctagaaatggcctcaaatggaagctgccacccgatcctggtggaggctttgagctaggctagagatcaggactccagggttcagtgcgcacgtgctgcccctgcactaggtaagttccttcctctatggaccttcagccctccccttgcagtggagatagtgtgcacagccctggctcccctccctgaccctgggaaaaggctgaagggagaccccgtgctgttcctaggaaaggagatcttcccagcggtgggagggtgaagggggagcctccctctcctccagtcctgtcttcccagccccagggcggagctcttcctgtgtgtaagcctccacgcgggaaaagctgccagtgcattcattctctcgaggaatccctgcaaaccctcccagatgggtggcgttatcagcccgattttacccgagaggctcctgagggaaagggacctgtctgaggttggtgacagacacccagttcgatcccatctgtggtgccgccaggccgctcccttttctgctcctctcccgagaggctgcagagttctttccctcccagcagggtcctaaggaccccggcggtgctccaggggagccaacatcccctgctttggaggacggacgggtcgggtcgcagtgagcagctccgtggtgtcccctagttctacactcagaccaagagagggctgtgagggctgtgctctttttttttttttctttttgagacggagtctcggtctgtcatccaggctgtagtgcagtggcgcgatctcggctcactgcaacctccgcctcccgggttcaagcgattctcctgcctcagcctcccaagtagctgggagtacaggcacccgccacgacgcccggctaatttttgtatttttagtacagatgggatttcaccatcttggccaggctggtcttgaactgatctcaggtgatcctcccgcctcggtctcccaaagtgccgggattacaggcgtgagctaccacgcccggcctggctgtgctctcttaaagggccgaagcaatgcgggtgctggcgaccgacgcaaggaggtgacgcacaggggacttaaggagcggaccgccgcgggaggacgcgcccagctcagggggactccctctgcgccccccacgctgggtctccggcccacgcgtggcccggctggtctgcggagctagcgccagggccgccagagggcgcccggggcggaggatggggcgggagccggggaagcccgggaggtggtggccgagtgggcgccgcccctctgggtctgcggctcaggtcgaagagtcggctgcgtgggccggggaatccggattccgggggttcaacgcccaggggttccatgagcccctactgttctcggacgcccggccggccccgacgcactcgtcctagcacccctcccctgtccggtcctccggcccctccgccgtcgcccctccggggtccagccgggcggggctgctccagggtcgcggctggcgcgggtccccgggccctggccctccggtgccccgggccaaggagagaaaacttgagcatccacgcacaggggtggggagcaggatcccactctgagggtgcactgccccgccctctccgggtctgcctcggccccgcccgggccccaggccccgccccctcccctcggccggcccgagagctccgggggccgctgcagccgcccaagcgcccgccatgcgcgctgcccgcgccgcgccgctgctccagctgctgctcctgctggggccgtggctggaggctgcgggcgttgcggagtcgccgctgcccgccgtggtccttgccatcctggcccgcaatgccgaacactcgctgccccactacctgggcgctctggagcggctggactacccccgggccaggatggccctctggtgagagacccgggcattggcaccgagtgggcacctaacccccagcttcgcagatggcccccgcccccggcggccctgtctgctcgctccctgcccagacaccacctagacaggcccctcccctcacagacggccctgccagcccgagccgccagagaggaccccgagccccctgctgggagacgacagacctctgaggccacaggccgacgcgggacacccacccctccttctggtcccctactccttcctcttggggccttccctgggtgtaggttgggcccagccagcccttttcaccccagccttcagggcccagctcaaccccagtgggacctgtggttggctggatttgaagaggagcagacaggaacctctgaagtccactggggcccaacgtggcagggatcgaccacgctggaggcttccgggcacaggttgggggtgccatcagcactgggctccgggctgtgcaggggagtcagaccggcccccccaccgcccccgtgctggggccagctctcttggtagatcttggtagaggggcgggatcctgtcagccaagggcagtcccccttcctggagcctctcccctctggcatctctgtacccccagggcactgggatcgaaggccacaacccctggtctgtagacaccagaacagggaggagtccctggctgaggttgggggtaaactgagaaaaatgacaagccaccctcttcaacacaccacagttgggctgggggggtggagccctggcctggggaggccgcccacaattaccacagtttgggagtttgttagttcccacccctgtaagacttgacacgtagtcttcatttctggggaattggcttaaaggggcagcatcacccaaaacctgggcacttggctaaacccccacctctgttatgggggccccttccccaggagaggggaggctgtgccccatgacagcagagcttggacccatctgcattcttagggacgcttagagcatggtttggtccttattacaacctgggggtggaggaaagcagcagctcttctgtctagtccccattcagagagggacaggggctggcctgtggtcacacagccacaggtcacataggtaggtatctgcccacctaacgaaggtaaccagggaatgcaccaggtgtgatccttaaagtcgaggtacttttcatctttcaaaatgcattcgttggccaggtgtggtggctcacgcctgtaatttcagcactttgggaggccgaagtgggcagatcacctgaggtgaggagttcaagaccagcctggctaacatggtgaaaccccatctctactaaacaaacaaaaattagccgggcatggtggtgcacacctgtaatcccaggtactcaggaggctgaggcaggagaatcacttgaacccgggaggcggaggttgcagtgagtcgagatcataccactgcactacagcctgggcgacagagcaagattccatctcaaaaaaaatgcattattcttctcttatctttgtccatgacataagcaggacagcttaagttatagagggaggacgtgaagcccagagaaagatgggacttgcctgaggtcacacagcaggtcacagaactgtggtggggacctggctgtgctgcctccagcctctctgctgtagcacacctacccttcactgttccaaggagagctcgacctcaaaggtgttagtgctttggggtcaaggctgccttggggttcaatcctgtggctgtgccccctcagccttttttcttcccgtccccaggtgtgccacggaccacaatgtggacaacaccacagagatgctgcaggagtggctggcggctgtgggcgatgactatgctgctgtggtctggaggcctgagggcgagcccaggtggtgatctgaggggaagggtgctggggaagatggagaacagctgcagcccagagaggaaaagggacagcccagagccacagcctccaagccagggctctgtccactgccctgcagagagggaggggcatgtaccccatgggaacatctcacctctatcccctcaggttctacccagatgaagagggtcccaagcactggaccaaagaaaggcaccagtttctgatggagctgaagcaggaagccctcacctttgccaggaactggggggccgactatatcctggtga

SEQ ID NO: 12254 - DNA, 6000 bp, Homo sapiens; identical to SEQ ID NO: 2594

SEQ ID NO: 12255 - DNA, 6000 bp, Homo sapiens
gccgcagaaaggagtggagagcccgggcgtgggactcacgcttgaaatcccagcactttgggaagccatggtgggaggatcgcttgagctcaggagtttgagacaagcccgagcaacatagcggaagcccgtctctaccaaaaatacaaaattagccaggcgtggtggtgggcacctgtaatcccagctacttggagggctgaggcgggaggatcccttgagcctgggaggtggaggctgcagtgagctgggactgcaccactgcactccagcgtgggtgactgagaccctgtctcaggaaaaaaaaaaaaaaaaaggtggggagggttagttgttggcaatggaccagccactggggaggtgagtggggtgagagcccccaagtcggtgggggtccgtccagaaactccatgcccctgcctcaccccctgcaggccaacgagacttttgcttttgtgggcaacgtgactcactatgcccaggtctggctcaacatctcggcggagatccgcagcttcctggagcagggcaggctgcagcaacacctgcgctggctgcagcaggtgccaagggtgcccgcgagggaggcggctgtgggtggtgtggggagcccctctctgcccggctcggcaggcgcaggtccccctctgagccgcccctccaccccaagtatgtagcagagctgcggctgcaccccgaggcactgaacctgtcactggatgagctgccgccggccctgagacaggacaacttctcgctgcccagtggcatggccctcctgcagcagctggataccattgacaacgcggcctgcggctggatccagttcatgtccaaggtgagcggtggggcctccgagccaacccacgacaccccctgcctcgcacatgcccacggcgggctccagcgatgcccctcccgctaggtgagcgtggacatcttcaagggcttccacgacgaggagagcattgtcaactacaccctcaaccaggcctaccaggacaacgtcactgtttttgccagtgagctgccctccccgccccgccccagccccccacagacctcttcctccccagcccagccccacccgtccccctgtgccctcccactccttggccgcgccctggccttcccccctcacccgccacttcccctccccacccctgccccttccaaacggccccaacccacaacccgccccctccctgcacctccccacttctgcccacctttcccctggggcccccaccccagccctgtcccacctttccctggaccctcctgtccccgcccccacaccttggccccgcccccgtgccttgctttcccccccaccacgccttggtcccgcccctgcatcttggccccgccccaacctcccggccccaggtgtgatcttccagacccggaaggacggctcgctcccgcctcacgtgcactacaagatccgccagaactccagcttcaccgagaaaaccaacgagatccgccgcgcctactggcggcctgggcccaatactggcggccgcttctacttcctctacggcttcgtctggatccagggtgaggagcaggcccggaagaccggctggaggattcatgggggaggacaggtgtgaggacgagagggcctgcccggcacctgatggctgcccccacccacagacatgatggagcgcgccatcatcgacacttttgtggggcacgatgtggtggagccaggcagctacgtgcagatgttcccctacccctgctacacacgcgatgagtgagtgctgggcgcccggggctggggctggggctggggctgagtggcgcctgagcgcggcctccccgcagcttcctgtttgtcattgagcacatgatgccgctgtgcatggtgatctcctgggtctactccgtggccatgaccatccagcacatcgtggcggagaaggagcaccggctcaaggaggtgcgcgggccgggactctccctggaggcgcgggctggcagggaggggcggcgtcctccccggggcctgccccaagcccctggcccacccgcaggtgatgaagaccatgggcctgaacaacgcggtgcactgggtggcctggttcatcaccggctttgtgcagctgtccatctccgtgacagcactcaccgccatcctgaagtacggccaggtgcttatgcacagccacgtggtcatcatctggctcttcctggcagtctacgcggtggccaccatcatgttctggtgagcgcgggccatggtaggagggacctggggcaggcacttgcccagcaagctcaccccacatcctctcagagccccctggaccctggcacgggcctgcccaggaggccgggcgtgcgggtggatgacggtgcgcgtggcccctgcccacccagcttcctggtgtctgtgctgtactccaaggccaagctggcctcggcctgcggtggcatcatctacttcctgagctacgtgccctacatgtacgtggcgatccgagaggaggtggcgcatgataagatcacggccttcgagaagtgcatcgcggtgagggtcgcgggcaggcgggcggctggggtgccgggccaccccacgtgctgacaccactgccttctcagtccctcatgtccacgacggcctttggtctgggctctaagtacttcgcgctgtatgaggtggccggcgtgggcatccagtggcacaccttcagccagtccccggtggagggggacgacttcaacttgctcctggctgtcaccatgctgatggtggacgccgtggtctatggcatcctcacgtggtacattgaggctgtgcacccaggtactggccagcccttggagggcaggggagaggcaggggtccccagccagggttggggaccagcagtctgtgtccactcctggatgcagcacgggtggctccctgggtgggcacgtggcccacgtggtggatggtcaccccaggccctaggtcagcctcccctcccctccccgacccccaggcatgtacgggctgccccggccctggtacttcccactgcagaagtcctactggctgggcagtgggcggacagaagcctgggagtggagctggccgtgggcacgcaccccccgcctcagtgtcatggaggaggaccaggcctgtgccatggagagccggcgctttggtgaggctggcatcagaatggtggctggggtgggcgctgggttcagagtcctgggtggccttggcgccgcccccaccctgctgatccacagccctggtgcagaggagacccgtggcatggaggaggagcccacccacctgcctctggttgtctgcgtggacaaactcaccaaggtctacaaggacgacaagaagctggccctgaacaagctgagcctgaacctctacgagaaccaggtggtctccttcttgggccacaacggggcgggcaagaccaccaccatgtgagtgtcggaggggcagggcggtgggcatctgctgaccagagcaggagtcctagtcagggcagggtggggcccctgcagagggcgtggggtcatgaccccgcccacctacccaggtccatcctgaccggcctgttccctccaacgtcgggttccgccaccatctacgggcacgacatccgcacggagatggatgagatccgcaagaacctgggcatgtgcccgcagcacaatgtgctctttgaccggctcacggtggaggaacacctctggttctactcacggctcaagagcatggctcaggaggagatccgcagagagatggacaagtgggtgggctgggcggggggcggggcaggtgggcggaggccctggggctctgcatagcagcagccccatgccccacctccctgtcccaggatgatcgaggacctggagctctccaacaaacggcactcactggtgcagacattgtcgggtggcatgaagcgcaagctgtccgtggccatcgccttcgtgggcggctctcgcgccatcatcctggacgagcccacggcgggcgtggacccctacgcgcgccgcgccatctgggacctcatcctgaagtacaagccaggtgagtggggtgccgtgtgggcaggggtgcgggcggcgcctcccctgccccctgaccctgggtctggccttgtcctaggccgcaccatccttctgtccacccaccacatggatgaggctgacctgcttggggaccgcattgccatcatctcccatgggaagctcaagtgctgcggctccccgctcttcctcaagggcacctatggcgacgggtaccgcctcacgctggtcaagcggcccgccgagccggggggcccccaaggtctgtgttgaagctgcctgagctggcttcgggccaccttctccccgggacccccacctgagaatccacaatggagaggctgggccctcaccgtcacccgctgggcccaggatgcctgctggggcctggcccgccctctgcaacgcccgtatcttggagaggctgggtcctcagcgtcaccccctgggcccaggatacctgctggggcctggttcttcctctccaatgcccatatcttgacccagttgggttcccattgggggtccctcctcccagcccctgagtgaattccttcctgctcccacgtcccccacagagccagggctggcatccagccccccaggtcgggccccgctgagcagctgctccgagctccaggtgtcccagttcatccgcaagcatgtggcctcctgcctgctggtctcagacacaagcacggagctctcctacatcctgcccagcgaggccgccaagaagggggctttcgagcgcctcttccaggtgtgagggcgcacgggtcggggggcagttgcaggtggtggaggtgggcgcactcctgcctgggcgtccctgccgcagcctccccctccaccgcccctgcagcacctggagcgcagcctggatgcactgcacctcagcagcttcgggctgatggacacgaccctggaggaagtgttcctcaaggtgtcggaggaggatcagtcgctggagaacagtgaggccggtgaggggcctggaccacttgctcagcccaccccacccacaaggccccagctcgggcctgcgctgtcactcctgcctggtgtctgggggcgccaccctggtcctgggtggaagccaggggacgccccggggttagcctgcggtcctaggtgggtggtcctggtggccagaggtcccggacaggtgtatgagcctgggaactggggtcaagaccggggatgggggtcctgggcaggcctaggggccagtagccctgagtgtcccctcggcccttccactgcggcagatgtgaaggagtccaggaaggatgtgctccctggggcggagggcccggcgtctggggagggtcacgctggcaatctggcccggtgctcggagctgacccagtcgcaggcatcgctgcagtcggcgtcatctgtgggctctgcccgtggcgacgagggagctggctacaccgacgtctatggcgactaccgccccctctttgataacccacaggacccagacaatgtcagcctgcaaggtgggggtggcagggtgaggctgggacagcaagggagggggagcagggttgcgggggagcggcatgagggcagccagtagggagagggtagcgtgcaaccacctgctcagcctctacctctctgcacagaggtggaggcagaggccctgtcgagggtcggccagggcagccgcaagctggacggcgggtggctgaaggtgcgccagttccacgggctgctggtcaaacgcttccactgcgcccgccgcaactccaaggcactcttctcccagatcttgctgccagccttcttcgtctgcgtggccatgaccgtggccctgtccgtcccggagattggtaggccaccggctggacaggggtgctgggcttgcctccccccaccgcccgctgggagccctgatgatgcccactcctgagcttcctgact

SEQ ID NO: 12256 - DNA, 6000 bp, Homo sapiens
atggatctaataaagattcatgcaaattaaacacagtattatgtatactagaaccttcactgatccactgggtttccatgggcaagttcagtgaaagctcactgtcttcttcttgcagaacttatctcatagggttattgtaaaaataaaaaagaatagtttgggtgcaatgctaagtagagaacctggtgcaaagtagattcactgtcatttattgagcaaattatttactcatctttctccttctatgggccaatgaagtatttgaggtcaaggaactgtgttttctttatttttgtaacatttatcacagcgtctactgtttggttggtgcttaacaaatgtaggattacttaatgttagatattatacatcatattatttatatattattatatataatatatacatatactatatgtcttatagatataatatatacatatacaatgtactgcatgttgtatgctatataagttatataatgaatactacatctccatatgtgtcatatatttgctataatacttaaagttaagcaactaattaattattttatattaggattcttagaaaagaatagctgggcttggtggctcacgcctgtaatcccagcactttgggaggccgaggtgggtagattgcttgaggtcaggagtttcagaccagcctgggcaacatggtgaaaccctgccgctactaaaaatacaaaaattagccgcgcgtggtggcacatgcctataatcccagctacttgggaggctgaggcaagagaattgcttgaacctgggaggcagaggttgcagtgagccgagatctcaccactgcactctggcctgggcaacagagcaatactctgtctggaaaaaaaaaaaaaaaaaaaagaaagaagagagaagaatctaactatttgtattgtctagtatttcaccagttaaagttagccagttctctgggccagttgctgagtaactaatcagttcttttagaaaagatttgctaaaattagctggggaaagaaaatcaggatttgggtagataggtattgttgaaactaattccccccacccataaagacaaatattaggttggtgcaaaagtaatcatggtttttgccattgaaagtagtggcattacttttgcatgaacctatatataaaaattcttcaagggtcatttgtattgtacacagatgtttcctccttaaagtaagctgctaacagctgacacagttgtggatggagctgtatgcagaaatccttcgcatttcttttccttgtttcatgtaccatgtaaaatcagttttaagtttaaaactaagttgctcaataatgagatgcccatttcccccaacttctgttctgttattatatattgctctatggtttaaagtgtattccatgttgtgtctcatttttgatgtttatttattatgttcatttgaaagttattgtacttgtatgttaattttcattgatttttcttttgagcatgacttatgttttattttgtgtttcttttaggttttgttttgtttcataagatcccactggatgggtagctgaaataaaggaaaagacagagaaaggggctgtggtgcttgttggttgatgctgccatgtaagctggactcctgggactgctgttggcttatcccgggaagtgctgcttatctggggttttctggtagatgtgggcggtgtttggaggctgtactatatgaagcctgcatatactgtgagctgtgattggggaacaccaatgcagaggtaactctcaggcagctaagcagcacctcaagaaaacatgttaaattaatgcttctcttcttacagtagttcaaatacaaaactgaaatgaaatcccattggattgtacttctcttctgaaaagtgtgctttttgaccctactggacatttattgacttaattgcttctgtttattaaaattgacctgcaaagttaaaaaaaaattaaagttgagaacaggtataagtgcacactgaatagtctaatctacatgtaacacatattttagtgtgattttctatactctaatcagcactgaattcagagggtttgactttttcatctataacacagtgactaaaagagttaagggtatatataccatcactttgggacttggtagtattattaaaaggttatttccttcactgtcaataaaagtccaaatgtttagcttaggtctgagagtcaaacaatgttaaggattgtcttaaagttccttagccagcaaaacaaaacaaaacaaaacaaacaaatgaaaaacgtttaaaaagaagaagaagaaaaaaaacaagaacaagcagcaacagctgttttgttggggctatagatttaagttaggcatagtcaatttcagaataactaagagtggaatatatgcatatggtgaaattataaccttgcccttttttatttgccctctgcgatccacctgctttttagaagtctgccgagtgagaaggccacagtatctcatgctgtttgcattacagaactgcagcttttctactctgaaaaggcctgggagcagaatggctggcctgctgtgagcaggagaggagattctaagaaggatagtcccccctacaacatactgtcatactgctgggttttcatgggtaggaaagcttgtcctgaccccagcagcaaagaggtggcaggtcgctaatgaatatatgctttataatgtccttcttcattgctgagagggcagccttagagctgtggatttctgcatcccccctgagtctgacccatggacacctgtttcattcactttagcatcacagtgacctttgtatgctctgttcagtctgtgtcaggcagtatgcttgtcctgaagagaggtttggctatccccaccccaccccaccccaccctgttccttttttatcaggaggacttcagagccaggcctgcagcattttgtttgaaaacacaatcagctctgacagttagacatgcacacagacgccatagctggattggaaacattgatgttttaaaaatttattttttttggaaatagttgcacaaatgctgcaatttagctttaaggttctatagatttttaactagtccaacacagtcagaaacattgttttgaatcctctgtaaaccaaggcattaatcttaataaaccaggatccatttaggtaccacttgatataaaaaggatatccataatgaatattttatactgcatcctttacattagccactaaatacgttattgcttgatgaagacctttcacagaatcctatggattgcagcatttcacttggctacttcatacccatgccttaaagaggggcagtttctcaaaagcagaaacatgccgccagttctcaagttttcctcctaactccatttgaatgtaagggcagctggcccccaatgtggggaggtccgaacattttctgaattcccattttcttgttcgcggctaaatgacagtttctgtcattacttagattccgatctttcccaaaggtgttgatttacaaagaggccagctaatagcagaaatcatgaccctgaaagagagatgaaattcaagctgtgagccaggcaggagctcagtatggcaaaggttcttgagaatcagccatttggtacaaaaaagatttttaaagcttttatgttataccatggagccatagaaaggctatggattgtttaagaactattttaaagtgttccagacccaaaaaggaaaaataaaaaaaaaggaatatttgtacccaacagctagaaggattgcaaggtagatttttgttttaaaatggagagaagtggacagataaggccatttaatatatcaaagatcagttgacatctcctagggaatgatgaaaacagcaggctattagaaaattatttcatatagttctcgtgttcttttcttttttttaatccctgaagggatgatcagtaacatagcttctcttttctgtactctagaccaccccttttcatcattttgctttttatgtctcccataagaaatgtgctttttagagcttcctaatgcatgtgttgcattattgcagcattagaaaaggagaggtagcatttttgctgaaatcgggcctgtcactctccaataaaggttctggcacttcaatgccaggcaggtctcctaaatgaacagaatgatctgtgtgagccgatgcctgcccttccagaggggccactgtccccagccgcagccaactgtgtcccacaggaatgggagcctaggtttccaaatcttgtgattctttaggagaaacatgaaacctggatttcgtgtgaaatgtcccgattgttaaaaagttggctcaattatttttaaaacattttgtaagccaacaaaagtctgtgggctgccagtttattacttttgtcttaaaacatgatcattgttctctcacggtatccttctgtcttcccgttgcaaattcacttttctttcttcctgacattgccattgagggctttgttaccacaagctaagaaactgagtttaacagcccagttatctgcaacatgtcaattacctttgctcctctcctgtgattcccaccatgctgtgaccctcagctgtctccctttgctgggaattctgcaccaatgtctcccctcaacccattccctggttggtcctactcccgtgtggccagagacatcctagcaaatccttcctcctattatatctgacactaatttcttttcaacagcgctcatgtctcttggcccagtcaggtgctgccaggtttagataggaaagtacatgtcccattttcatgggtgcccttaatgtggtccacgtcctatatcttattatatttactcatggctcaatgggggcctccagagaccctctcaggctgctgagctagactaaggaatgcatccaccgtcatcacatgagacactgactctgtgacgacaaaagtacaaacagtctgaggctaagaaaggttcatctcacaacaggaaaaacaaatctcaacacacattagagataattgattcaggggttttctctcccagtctcccagcagggactgatttcatttctgacccactaggttttctttccagaaataggtagcaaggacaagaactaaacaatcccagccccacccagcaacacagaacacaggagtttgcttttggcttctcactctccaagtaaccctgaattaggcccagaatggctgaggcttggagcatctcctcagacagagcagaggcgacacctcttcaggggtgtgtggagtaaatagctcgaagagctgaagacagaaaaccagtttcacgccaggtgcgagagagagcataatggagggaagcccgctttctctctcctcttcttttctctttatttctttagagcacttgacttttttttctctctctctctagtattctaaactgaccccatgaccaactgagaatttatttttgtttcattggttgtttcacagaattagaacacacacgactttttattcctccattgcaaaatggaatcaagatactacacaagacctgtgctttcttcctttgcatgatttacacctccgcctgttttggtgctagctgtctagaacttctctcttggtttgaatctgattccttcacactacactagaagtttatttcatcttgttttgtctagactccagatacagagggacagctggactgaggacaagcaattccatctagcatagggtctctcagggttggtgcatccagccacatgggcagggccagtcacatctagtctatgtccccagagcccttggagttgcgcagcttagctgacttgactccaaggaaattagtacagaagtaaccactctattaagtgtgttctgctatgttcacatgcctgtagtacctgcaaaccatgccaggttcatctaaagacataggggaagattaaggactcttttggacagaccatgaattgaatt

SEQ ID NO: 12257 - DNA, 6000 bp, Homo sapiens
cacttgaattccctaagcattagagagaaaaattaatattaaagggttgttgagagataattgttttttattccctaccagacctgaatgtgaatttgtgaaaacaataaaactttgtttatttatttagtttacttttttttttttttttttttgagacaccgtctcactctgtcacccaggctgaagtacagtggtgcgatctcagctcactgcagcctctgcctcccatgctcaggcgagtctcatgcctcaacctcctaagtagctgggactacaggtggcagccaccatgcccagctaatttttgtatttttagtagagacaggttttcactatgttggccaggctggtctcgaacacctagtctcaagcaatctgcctgccttggcctcccaaactgctgggattacaggcttgagccactgcacccagccacaataaaactttaaatcagatcgttttttgttttcccttttccatttccatggggagtgttgattgctcttctctggtgtgtctccttctggactccttacagccattgggcagccagatagtctggtggcctcaagcatcaactctgcacccagagtgcagagttcaaatcttggttttgccttctgctaactgggtaattctgggcaagttacttaacctccctgtgcttcaggttcttcatataaaaaatgggagtaataacagcataaatgtcatagactagtagtgaggattcaaacagtaacatcgtacttaggacatgagtatgacattattagagccccagagacatatgcctttttgcccagaaaataaaggaatgaactttagaaagtgaagttaatatgcagtaataaacaagtaataaaagctctaaatttgctagagattcacacacacacacacacacacacacacacacacacacacacacacgtctgaattaattacagaacagatactcattcaaataccttgatttttgaatcttctgaagaccagttgtggtgcagctttactcccagacacccctgggtcataagccttatgaacccaaagacagctttatatcaagattgccaggtatttcagtaaggatgtttattttcttgtctgtgccattactagaggctttagatttcactagaaatttattgtatggccatggtaagtgattgtatgaccatggtaaatgggcatacatactaggggaatgaattaagaaaagagagctcattgttggtataagtgaattactggggctcttgacaagtagatgtccaaacccaagctatactaaacgtttccataattatgagtattatttttctgcccattatacttttcgtcactaaactccatgagggaagggactattctatcctcaacacgaagcactgtgccttatacttggtaggaaactaataaatatgtgtaaattggattgatagatggcttgtaacaagagttcctaaagagcagagcaaactcaatttgctcaagttgtttgagaattaaaatagggtttaaataacaagacaaagaacattccaagaggatggggaccatagtttttagaactttagatttatttttagctttgatgtaaacctttctgtttgtatctgcaatctgaaaggcaaagagatgatccttttatacaatgtagagttctttataaaacgccctatttgtatgccacttcataatttatatatccctttcacatgatgatagaaataattattccatcatagtttgagagcttactatgtgctgggaactatactttacatacattgcctcattgatttatccgtccaactttatgctgtagtttttatgatccccattttacatggggatactgaagcacaggggtaagtgacttttccaaggtcatgaggatttgaagtagacctgcctggacttctgagtccacagtgccttctgagaaagcctgtgaagtggggtagctgtgttctccatgttatagataagaaatgtgagataaaagatgaacaacaaaggacaaaactggaaatagagcccaagacttccacgtgcagtccagtgctgtttttcagttccatgctaccacacattagactattagaaaatttctctatttaactatacagatttggaagcatgctttcctcctactaatttgttattcgtagatatctgtggatattgagtgagtgaccgtgatatgcttacatacaaaacacattatgcaaaacacacatggcttgtgtgcttaacaatgcatcattcattcagcaaacgtgactgaggaggaaaaggggaggcttcacagaggaagatatgttgaagctctgggtggtccattcctttgacaaaggtgcagagaagcaggttgagatggacccccgatctcccatctacccacaatctgcttatgtctgggctcccacctctgcctgtaactgcatctccttgcttctctggagttgccaactgtattagtccattttcatactgctatgaagaaataaccaagactgggtaatttataaagaaaaagaggtttaatggactcacagttccacatggctggggaggcctcacaatcatggcagaaggtgaaggaagatcaaaggcacgtcttacatggcagcaggcaagacagtgtgtgcaggggaactgccctttataaaaccatcaggtctggtgagacttattcactatcacgagaacagcatgggaaaactcgctcccacattgaattacctcctatgagtccctcctgctacacaaggggattatgggagctacaattcaagatgagatttgggtggagacacagccaatccatatcaccaacatcactgtcccttgcctaactgattatatttagaatgagcagtgccttcattgcagtttgcataatcaaccaatgttggctctactggacttttcttcaaaatcagaaactgtacatcctaagcaaatgccagaacaattggcaagaatgcctggacttgttttctgcatggtcatgaaatagaaccatttttcatatgttggcaacctaaatgccattaatctggaatctcttcttgatcaaactgaaactggaccagataggctgaagtctcctctcgggattccacagactgccctagtgaatgggaggaagggaggctctccctcagtggtggtgagcctacttgtccttagtgttgtcacctttcatttcattgattagcatgtggggtctgaagttgcatcagaatgctgagattgcttctattgatccaagaacttttttttttcatgtaatggcttttttagtttaattttgccaaagtaggtttttatactataaatatcatcatggcttatataggtttgcaaagcttgatggactgaatccacactggtcccattgtttggaattattttctggtttgcttgtttatgaagagactaagaccatctatagtgtgctgtctaatatggtaatcactagtcacatggagctattcaaattaaaattaattaaaatgaaataaaattaaatatttagcttctcagccacactagccctatttcaagtgctcaatagccacgtatggctagtggctaccatactggatagcagagatacgttttcatcattgcataaagttcaattggacagcactgatctgctgcgtgtagggatctgctttatctgaaaacttgatgcagaatcacggctagttcaaagaaacttgcagaacatttcatgaaaattaaatttctctatggtgaaaactaggggtcaagtagcagatgaatactggctgtgagatgaatgcataaccagaacctcccattcccctttttccagcgtctctcctatctcccagcagtgctttatcactttctcctctcaagttgataaagagaaaggaagaaagaaacagagaagtcggtttatgttcataattaacatccatgaactctgcataattttttcccctctctttacaggtcctcgaggccacacgggttaatcgaagaaagagcgcactggctttgcgctgggaagcagggatctatgccaaccaggaggaagaagacaacgaataaacttccttcaacccaggaagcgtctttggtgcttgggagaccaagaaaccaagaaattaacaactgaaagcattttaatggactatttattaaagtgcaaacaaactcagcaatccttatgtagaccagaagctgcaatatacaatgatgaaaatgaaacgaaaaggaagtccccccatcagactctggacacccaggaatcaaaagagaaaggacttttttggtgactcaatcccagtgtctggtttggggccaatctacaatggatccaaaaggacaaaacatgttacaagcaaatcaacatagttgctgcaggcggaactgagaccagcctctctgggcgatgaaggacaatggtggtagggccacttagagagcagtagggcccaggctggtgcagcctacatggcacaggatatttccctgcaccagtttcccacctgtcacttgcagcatcagagggtgttgcattaactccattttctccagcagccataaaatgaatggcgtttctctccatatttgcccagaagaggcagttatgattccacttctcctacatttaattatttttaattgagaacaactcatgatcacaattcataaaatccatattttaagacaatagttcttcatgtcacaaacacaatctattctacatgaggaggctgagaaaggggaagagaaaaacaaaccaaatggatgatgttagctttaggatcgtgtctgcttataatattcactgatctgcagtttatgagaacacattttcacagttatgtttcttcataggaaaactatatttagtgggcaacaactatttttatgatgggatgggggagtatatacacgtatagaatctgtacgcgttgaacaacttggttcaagatggtgggggcatttttagagcggcaataattgaaaaaaaaggcgaactctgccttggagaggtagatgataagaaataaaaaggtgtttataactattttgtattataaagtgggccttagagataggaagaagaatgatggattccttttggatcaatcagaaaggaaacacgaaagaaaagtcaggaaggtagagagagaaaaagggagggaaggagaaagaatgggaataaaataaggaggtaagagatactatttttgctgagcaaccagtgtgtttcaggatgatacaaagaaaaatatagaatagaaataagtgcaggcttggaatcagctacaaatcctaaagatggggtgtgtgtggatgtgtgtgtgtgtgtgtgtacaccattgtgtgtttgtaaaatgtgtatgttcatgagtaagggtgtgtgtgtgtgtgtattaaaattccagagtgaccgtggcacttgggtgtacaggtaattcctccagagctgtttgctggcttcaggagtggagtgagaatttcttttttatgaaaagggatataaaggcaccgagctgatgcagtatttgtaatattaagttgacctaacaaggtatttgcatgagtcacaattacaaagttttgagcggttttgtaatttgacatttaggagagtctcctatttattctcatactttacattcatgcttagtatactatagaggatgccagctttaatctttctgtcatttaaagcaatatgataagggtattcaataattgggtgccctaaatttctggatgagaaaattttcaattctggccatgagaaagaaaaaaaaataaacagccttctttttttttcctttgttttaaaactgtggttttttaaaaaagcaataattaactcagacctcactaaaaatcatttttgtttttatattgttatgtcataagctctattatgttattctaacaagtagcaatttcacaaaatttgtatgtagatgttaacgc

SEQ ID NO: 12258 - DNA, 6000 bp, Homo sapiens
tgttgccaggctagagtacagtggcatgatcttggctcactgcaacctctgcctcctgggttcaagcgattctcttgcctcagcctcctgagtagctgggactacaggcacgcgacaccacacccagctgatttttgtatttttagtaaagatggggtttcactatgttggccaggatggtcttgatctcttgacctcatgatccacccccctcagcctcccaaagtgttgggattacaggcgtgagccaccgcatccggcccccaggcctcttttataagggcactagccgcattcaggtggggcagcccacccaatcaactcccaaaggccccgcctgtttttttttttgttttttgttttttgtttttttttttttgagacagaagtctcgctccgtcgcccaggctggagtgcagtggcgcgatctcggctcgctacaagctccgcctcctgggttcacgccattctcctgcctcagcctcctgagtagctgggactacaggcgcccgccaccacgcccggctatttttttctattttttagtagagacagggtttcgccgtgttagccaggatggtcttgatctcctgacctcgtgatccgcccgcctccgcctcccaaagtgctgggattacaagcgcgagccaccgcgccgtgccggccccgcttcttaataccctgacattaacattaggttttcaacatgtgagttttgagggtcacggacattctgaccatagcacccttggaccaataggacaggcagaggctgtggaatgactctggggtgggtgaagtagggaacactgctttgctttagaaagggaatccctcttctggggctgggagtggcttcccgcaggggactaccgtgcaagggagaagaaatctggcatctctccagaatgcttctcattgcagggccgctggcctagaaatggcctcaaatggaagctgccacccgatcctggtggaggctttgagctaggctagagatcaggactccagggttcagtgcgcacgtgctgcccctgcactaggtaagttccttcctctatggaccttcagccctccccttgcagtggagatagtgtgcacagccctggctcccctccctgaccctgggaaaaggctgaagggagaccccgtgctgttcctaggaaaggagatcttcccagcggtgggagggtgaagggggagcctccctctcctccagtcctgtcttcccagccccagggcggagctcttcctgtgtgtaagcctccacgcgggaaaagctgccagtgcattcattctctcgaggaatccctgcaaaccctcccagatgggtggcgttatcagcccgattttacccgagaggctcctgagggaaagggacctgtctgaggttggtgacagacacccagttcgatcccatctgtggtgccgccaggccgctcccttttctgctcctctcccgagaggctgcagagttctttccctcccagcagggtcctaaggaccccggcggtgctccaggggagccaacatcccctgctttggaggacggacgggtcgggtcgcagtgagcagctccgtggtgtcccctagttctacactcagaccaagagagggctgtgagggctgtgctctttttttttttttctttttgagacggagtctcggtctgtcatccaggctgtagtgcagtggcgcgatctcggctcactgcaacctccgcctcccgggttcaagcgattctcctgcctcagcctcccaagtagctgggagtacaggcacccgccacgacgcccggctaatttttgtatttttagtacagatgggatttcaccatcttggccaggctggtcttgaactgatctcaggtgatcctcccgcctcggtctcccaaagtgccgggattacaggcgtgagctaccacgcccggcctggctgtgctctcttaaagggccgaagcaatgcgggtgctggcgaccgacgcaaggaggtgacgcacaggggacttaaggagcggaccgccgcgggaggacgcgcccagctcagggggactccctctgcgccccccacgctgggtctccggcccacgcgtggcccggctggtctgcggagctagcgccagggccgccagagggcgcccggggcggaggatggggcgggagccggggaagcccgggaggtggtggccgagtgggcgccgcccctctgggtctgcggctcaggtcgaagagtcggctgcgtgggccggggaatccggattccgggggttcaacgcccaggggttccatgagcccctactgttctcggacgcccggccggccccgacgcactcgtcctagcacccctcccctgtccggtcctccggcccctccgccgtcgcccctccggggtccagccgggcggggctgctccagggtcgcggctggcgcgggtccccgggccctggccctccggtgccccgggccaaggagagaaaacttgagcatccacgcacaggggtggggagcaggatcccactctgagggtgcactgccccgccctctccgggtctgcctcggccccgcccgggccccaggccccgccccctcccctcggccggcccgagagctccgggggccgctgcagccgcccaagcgcccgccatgcgcgctgcccgcgccgcgccgctgctccagctgctgctcctgctggggccgtggctggaggctgcgggcgttgcggagtcgccgctgcccgccgtggtccttgccatcctggcccgcaatgccgaacactcgctgccccactacctgggcgctctggagcggctggactacccccgggccaggatggccctctggtgagagacccgggcattggcaccgagtgggcacctaacccccagcttcgcagatggcccccgcccccggcggccctgtctgctcgctccctgcccagacaccacctagacaggcccctcccctcacagacggccctgccagcccgagccgccagagaggaccccgagccccctgctgggagacgacagacctctgaggccacaggccgacgcgggacacccacccctccttctggtcccctactccttcctcttggggccttccctgggtgtaggttgggcccagccagcccttttcaccccagccttcagggcccagctcaaccccagtgggacctgtggttggctggatttgaagaggagcagacaggaacctctgaagtccactggggcccaacgtggcagggatcgaccacgctggaggcttccgggcacaggttgggggtgccatcagcactgggctccgggctgtgcaggggagtcagaccggcccccccaccgcccccgtgctggggccagctctcttggtagatcttggtagaggggcgggatcctgtcagccaagggcagtcccccttcctggagcctctcccctctggcatctctgtacccccagggcactgggatcgaaggccacaacccctggtctgtagacaccagaacagggaggagtccctggctgaggttgggggtaaactgagaaaaatgacaagccaccctcttcaacacaccacagttgggctgggggggtggagccctggcctggggaggccgcccacaattaccacagtttgggagtttgttagttcccacccctgtaagacttgacacgtagtcttcatttctggggaattggcttaaaggggcagcatcacccaaaacctgggcacttggctaaacccccacctctgttatgggggccccttccccaggagaggggaggctgtgccccatgacagcagagcttggacccatctgcattcttagggacgcttagagcatggtttggtccttattacaacctgggggtggaggaaagcagcagctcttctgtctagtccccattcagagagggacaggggctggcctgtggtcacacagccacaggtcacataggtaggtatctgcccacctaacgaaggtaaccagggaatgcaccaggtgtgatccttaaagtcgaggtacttttcatctttcaaaatgcattcgttggccaggtgtggtggctcacgcctgtaatttcagcactttgggaggccgaagtgggcagatcacctgaggtgaggagttcaagaccagcctggctaacatggtgaaaccccatctctactaaacaaacaaaaattagccgggcatggtggtgcacacctgtaatcccaggtactcaggaggctgaggcaggagaatcacttgaacccgggaggcggaggttgcagtgagtcgagatcataccactgcactacagcctgggcgacagagcaagattccatctcaaaaaaaatgcattattcttctcttatctttgtccatgacataagcaggacagcttaagttatagagggaggacgtgaagcccagagaaagatgggacttgcctgaggtcacacagcaggtcacagaactgtggtggggacctggctgtgctgcctccagcctctctgctgtagcacacctacccttcactgttccaaggagagctcgacctcaaaggtgttagtgctttggggtcaaggctgccttggggttcaatcctgtggctgtgccccctcagccttttttcttcccgtccccaggtgtgccacggaccacaatgtggacaacaccacagagatgctgcaggagtggctggcggctgtgggcgatgactatgctgctgtggtctggaggcctgagggcgagcccaggtggtgatctgaggggaagggtgctggggaagatggagaacagctgcagcccagagaggaaaagggacagcccagagccacagcctccaagccagggctctgtccactgccctgcagagagggaggggcatgtaccccatgggaacatctcacctctatcccctcaggttctacccagatgaagagggtcccaagcactggaccaaagaaaggcaccagtttctgatggagctgaagcaggaagccctcacctttgccaggaactggggggccgactatatcctggtgaggaagtctggctagaatcgggcttctgaaaggcggtagtatccgtccctgatagaaatctgggtataggctgggtgcagtggctcacgcctataatcctagcactttgggaggccaaggcaggtggatcacctgaggtcagaagttcgagaccagcctggccaacatggtgataccccatctctactaaaaatacaataattagctgggcgtggtcgcaggcgcctgtaattccagctgcttgggaggctgaggcatgagaatggcatgaacctgggaggtagaggttgcactgagctgaaatcatgccactgcattccagcctgggtgacaagagtgaaactcagtctcaaaaaaaaaaaaaaaagaaaaagaaatctgaatgtgactgacccacccgaaggctggatccttcggcaggctatctgggccagagcccagaccagatgttcagattggatccctatgttaaaagctcagactaggtactaagcctggacccctcagatagatcccgttgtatacactttactgagcctcgatttctgggctagagcccagggtataaattgagcctggatctctgaactagagctcagagtaggtgtttggatccattttctaagccagatcccagataaaggtcttagatcagtaactcaggtataatctctggacccagtccctgagtcagtgccccagactagagccttggtccagaaacagatgtactgagtttgtgagacctctgtaagagcattcccactggatcctaggagccacgctgggtctctggcaggaccactcagtgaactccttggggggctgcagcccaggcagggctggagcctgtgacgtcccctcctcaaagtttgcagacacagacaacattctgaccaacaatcagactctgcggcttctcatggggcaggggcttccagtggtggccccaatgctggactcccagac

SEQ ID NO: 12259 - DNA, 6000 bp, Homo sapiens
gtgggctgggcggggggcggggcaggtgggcggaggccctggggctctgcatagcagcagccccatgccccacctccctgtcccaggatgatcgaggacctggagctctccaacaaacggcactcactggtgcagacattgtcgggtggcatgaagcgcaagctgtccgtggccatcgccttcgtgggcggctctcgcgccatcatcctggacgagcccacggcgggcgtggacccctacgcgcgccgcgccatctgggacctcatcctgaagtacaagccaggtgagtggggtgccgtgtgggcaggggtgcgggcggcgcctcccctgccccctgaccctgggtctggccttgtcctaggccgcaccatccttctgtccacccaccacatggatgaggctgacctgcttggggaccgcattgccatcatctcccatgggaagctcaagtgctgcggctccccgctcttcctcaagggcacctatggcgacgggtaccgcctcacgctggtcaagcggcccgccgagccggggggcccccaaggtctgtgttgaagctgcctgagctggcttcgggccaccttctccccgggacccccacctgagaatccacaatggagaggctgggccctcaccgtcacccgctgggcccaggatgcctgctggggcctggcccgccctctgcaacgcccgtatcttggagaggctgggtcctcagcgtcaccccctgggcccaggatacctgctggggcctggttcttcctctccaatgcccatatcttgacccagttgggttcccattgggggtccctcctcccagcccctgagtgaattccttcctgctcccacgtcccccacagagccagggctggcatccagccccccaggtcgggccccgctgagcagctgctccgagctccaggtgtcccagttcatccgcaagcatgtggcctcctgcctgctggtctcagacacaagcacggagctctcctacatcctgcccagcgaggccgccaagaagggggctttcgagcgcctcttccaggtgtgagggcgcacgggtcggggggcagttgcaggtggtggaggtgggcgcactcctgcctgggcgtccctgccgcagcctccccctccaccgcccctgcagcacctggagcgcagcctggatgcactgcacctcagcagcttcgggctgatggacacgaccctggaggaagtgttcctcaaggtgtcggaggaggatcagtcgctggagaacagtgaggccggtgaggggcctggaccacttgctcagcccaccccacccacaaggccccagctcgggcctgcgctgtcactcctgcctggtgtctgggggcgccaccctggtcctgggtggaagccaggggacgccccggggttagcctgcggtcctaggtgggtggtcctggtggccagaggtcccggacaggtgtatgagcctgggaactggggtcaagaccggggatgggggtcctgggcaggcctaggggccagtagccctgagtgtcccctcggcccttccactgcggcagatgtgaaggagtccaggaaggatgtgctccctggggcggagggcccggcgtctggggagggtcacgctggcaatctggcccggtgctcggagctgacccagtcgcaggcatcgctgcagtcggcgtcatctgtgggctctgcccgtggcgacgagggagctggctacaccgacgtctatggcgactaccgccccctctttgataacccacaggacccagacaatgtcagcctgcaaggtgggggtggcagggtgaggctgggacagcaagggagggggagcagggttgcgggggagcggcatgagggcagccagtagggagagggtagcgtgcaaccacctgctcagcctctacctctctgcacagaggtggaggcagaggccctgtcgagggtcggccagggcagccgcaagctggacggcgggtggctgaaggtgcgccagttccacgggctgctggtcaaacgcttccactgcgcccgccgcaactccaaggcactcttctcccagatcttgctgccagccttcttcgtctgcgtggccatgaccgtggccctgtccgtcccggagattggtaggccaccggctggacaggggtgctgggcttgcctccccccaccgcccgctgggagccctgatgatgcccactcctgagcttcctgactctgggcctcaccccacacctgaggctgggcacgcaccggggttcatccgggagtcctgtctcctcgggtcccagaccccaggcgtggatcccttggggttgggggaaggggaccgaggcttgggggccgctggccagagggcagaacctgctcaggcctccctgctcgccctgccaggtgatctgcccccgctggtcctgtcaccttcccagtaccacaactacacccagccccgtggcaatttcatcccctacgccaacgaggagcgccgcgagtaccggtgaggcctccagcgggggcagccttggtgggtggggcgagtgaaggggcggggacagccttggtgggccaggcgggcgagggggcggggctggcgaggggcggagactggcagccccacctcacactgtcggtgcccgcaggctgcggctatcgcccgacgccagcccccagcagctcgtgagcacgttccggctgccgtcgggggtgggtgccacctgcgtgctcaagtctcccgccaacggctcgctggggcccacgttgaacctgagcagcggggagtcgcgcctgctggcggctcggttcttcgacagcatgtgtctggagtccttcacacaggggctgccactgtccaatttcgtgccacccccaccctcgcccgccccatctgactcgccagcgtccccggatgaggacctgcaggcctggaacgtctccctgccgcccaccgctgggccaggtagtggttcagggggcctgctgggggggcaggggcagtgaggggtccttctcaccgcaccatgctgtgcccacagaaatgtggacgtcggcaccctccctgccgcgcctggtacgggagcccgtccgctgcacctgctctgcgcagggcaccggcttctcctgccccagcagtgtgggcgggcacccgccccagatgcgggtggtcacaggcgacatcctgaccgacatcaccggccacaatgtctctgagtacctgctcttcacctccgaccgcttccgactgcaccggtgagctgggtggggaggctgtgggtgagggtggccggccaccagccacctagtctcaactcctgcccctctagcctcactgcctgcctagcctcaccgcccctcccacctgcctgcccaggtatggggccatcacctttggaaacgtcctgaagtccatcccagcctcatttggcaccagggccccacccatggtgcggaagatcgcggtgcgcagggctgcccaggtgagcgaggctgcgggcctgggccccgctgtgtgtagcgccgcccgaggtctgcagggacccaggtctgaggtcctggggcctttctgtgtcctcttccttctgcaggttttctacaacaacaagggctatcacagcatgcccacctacctcaacagcctcaacaacgccatcctgcgtgccaacctgcccaagagcaagggcaacccggcggcttacggtgagctgacataggcagggcggggcggggcggggaggagctggggccggggcggggaggagctggggcctgaagctgccgcccccgccccgccgtgtgcaggcatcaccgtcaccaaccaccccatgaataagaccagcgccagcctctccctggattacctgtaagtgtggccagtgggggatgaggtggggcaggtgggcactgcagccccggccgtgaggactgagggcttccttgccccaggctgcagggcacggatgtcgtcatcgccatcttcatcatcgtggccatgtccttcgtgccggccagcttcgttgtcttcctcgtggccgagaagtccaccaaggccaagcacctgcagtttgtcagcggctgcaaccccatcatctactggctggcgaactacgtgtgggacatggtgcgcccggcgtggccatggggtgccccggcccttctcatcccccatccccgccctgccccgggtctctcaccagccgcccccacccctgcagctcaactacctggtccccgctacctgctgtgtcatcatcctgtttgtgttcgacctgccggcctacacgtcgcccaccaacttccctgccgtcctctccctcttcctgctctatgggtaagcggaagcggaggggggagcggcctcaggtgggaccggggctgcctggtgaccactgcccgccacctgcccgcaggtggtccatcacgcccatcatgtacccggcctccttctggttcgaggtccccagctccgcctacgtgttcctcattgtcatcaatctcttcatcggcatcaccgccaccgtggccaccttcctgctacagctcttcgagcacgacaaggtggggcggtgacgacatggtgggggtggcggaccctgcggaggctgtgcccctcaccccggccacccctgtgcccctgaccccggccaccccgcaggacctgaaggttgtcaacagttacctgaaaagctgcttcctcattttccccaactacaacctgggccacgggctcatggagatggcctacaacgagtacatcaacgagtactacgccaagattggtgagggggcccgtggggcggggaaggcggtgggggccccgcaaggcccagagcacaggccctgagctgtctccccgcaggccagtttgacaagatgaagtccccgttcgagtgggacattgtcacccgcggactggtggccatggcggttgagggcgtcgtgggcttcctcctgaccatcatgtgccagtacaacttcctgcggcggccacagtgagtggggggcggggtggggcgggggcggggcgggagcagggatgggttcgggggtggggcagggtaggggcgggggtgggggcagggatggggcaggagggggtgaggcaggggacagcagaggggcctgcccacccttcttacatgccacagccagaggatgcgaggctggtggcagggaggggcagtgggggtggcgagctgctggacactgtccaccctgtcccccaaggcgcatgcctgtgtctaccaagcctgtggaggatgatgtggacgtggccagtgagcggcagcgagtgctccggggagacgccgacaatgacatggtcaagattgagaacctgaccaaggtgggctctgggcatgtagggtggggcctgggtggggtaggccagggccaggggggtggggccccagcagtggaggtggagcctgggtgggcagggccctgagctctgggggtggggcctgcatggggtggggctgtggggcacgtggccccctgggctctggaggtggggcagggtctgggtggggtggggccagaggggcagggtgggggcaggatgccccgctgagtgggcaggctcctggccaggtctacaagtcccggaagattggccgtatcctggccgttgaccgcctgtgcctgggtgtgcgtcctggcgagtgcttcgggctcctgggcgtcaacggtgcgggcaagaccagcaccttcaagatgctgaccggcgacgagagcacgacggggggcgaggccttcgtcaatggacacaggtggggcgggagccctgggtgggcggggccgccgcgtcctcacgcgctgacagctgccgtgtccccagcgtgctgaaggagctgctccaggtgcagcagagcctcggctactgcccgcagtgtgacgcgctgttcgacgagctcacggcccgggagcacctgcagctgtacacgcggctgcgtgggatctcctggaaggacgaggcccgggtgaggatctgtggggcggggcagg

SEQ ID NO: 12260 - DNA, 6000 bp, Homo sapiens
tttctcctgtttttattgacaaagttgacatccttatattaatactcatattgtttcagtgggaaagaatttgagctccaccctcttaaaagctaagaagtttgatttgttaatttggcatgctcattttacatgccatagtgcactgttaaactagctcagcttctgtttgcctggaggcaaaacttttagaaggagactggagacagatatgaaggagaattaatcagtgctactgagtacttcctaaattcttagggcttttgtgggtgattaaatccataaatgatgtttggcatctgtactgagttcttttggaagggcaggagggagaaatgccatggaaattaagctccatagactcttttagcattgttgtaaatgatgacacagattggtggtggtacttacggttctggaggcagatgacactagcacttggcagaccagacaccaggtggaggaagatggagagtctacatggttgggcttagaggcgtcttccaaagttgaacttgaaaatgtctcggagatttctattaccacatggtctattttgccacttatggatctaataaagattcatgcaaattaaacacagtattatgtatactagaaccttcactgatccactgggtttccatgggcaagttcagtgaaagctcactgtcttcttcttgcagaacttatctcatagggttattgtaaaaataaaaaagaatagtttgggtgcaatgctaagtagagaacctggtgcaaagtagattcactgtcatttattgagcaaattatttactcatctttctccttctatgggccaatgaagtatttgaggtcaaggaactgtgttttctttatttttgtaacatttatcacagcgtctactgtttggttggtgcttaacaaatgtaggattacttaatgttagatattatacatcatattatttatatattattatatataatatatacatatactatatgtcttatagatataatatatacatatacaatgtactgcatgttgtatgctatataagttatataatgaatactacatctccatatgtgtcatatatttgctataatacttaaagttaagcaactaattaattattttatattaggattcttagaaaagaatagctgggcttggtggctcacgcctgtaatcccagcactttgggaggccgaggtgggtagattgcttgaggtcaggagtttcagaccagcctgggcaacatggtgaaaccctgccgctactaaaaatacaaaaattagccgcgcgtggtggcacatgcctataatcccagctacttgggaggctgaggcaagagaattgcttgaacctgggaggcagaggttgcagtgagccgagatctcaccactgcactctggcctgggcaacagagcaatactctgtctggaaaaaaaaaaaaaaaaaaaagaaagaagagagaagaatctaactatttgtattgtctagtatttcaccagttaaagttagccagttctctgggccagttgctgagtaactaatcagttcttttagaaaagatttgctaaaattagctggggaaagaaaatcaggatttgggtagataggtattgttgaaactaattccccccacccataaagacaaatattaggttggtgcaaaagtaatcatggtttttgccattgaaagtagtggcattacttttgcatgaacctatatataaaaattcttcaagggtcatttgtattgtacacagatgtttcctccttaaagtaagctgctaacagctgacacagttgtggatggagctgtatgcagaaatccttcgcatttcttttccttgtttcatgtaccatgtaaaatcagttttaagtttaaaactaagttgctcaataatgagatgcccatttcccccaacttctgttctgttattatatattgctctatggtttaaagtgtattccatgttgtgtctcatttttgatgtttatttattatgttcatttgaaagttattgtacttgtatgttaattttcattgatttttcttttgagcatgacttatgttttattttgtgtttcttttaggttttgttttgtttcataagatcccactggatgggtagctgaaataaaggaaaagacagagaaaggggctgtggtgcttgttggttgatgctgccatgtaagctggactcctgggactgctgttggcttatcccgggaagtgctgcttatctggggttttctggtagatgtgggcggtgtttggaggctgtactatatgaagcctgcatatactgtgagctgtgattggggaacaccaatgcagaggtaactctcaggcagctaagcagcacctcaagaaaacatgttaaattaatgcttctcttcttacagtagttcaaatacaaaactgaaatgaaatcccattggattgtacttctcttctgaaaagtgtgctttttgaccctactggacatttattgacttaattgcttctgtttattaaaattgacctgcaaagttaaaaaaaaattaaagttgagaacaggtataagtgcacactgaatagtctaatctacatgtaacacatattttagtgtgattttctatactctaatcagcactgaattcagagggtttgactttttcatctataacacagtgactaaaagagttaagggtatatataccatcactttgggacttggtagtattattaaaaggttatttccttcactgtcaataaaagtccaaatgtttagcttaggtctgagagtcaaacaatgttaaggattgtcttaaagttccttagccagcaaaacaaaacaaaacaaaacaaacaaatgaaaaacgtttaaaaagaagaagaagaaaaaaaacaagaacaagcagcaacagctgttttgttggggctatagatttaagttaggcatagtcaatttcagaataactaagagtggaatatatgcatatggtgaaattataaccttgcccttttttatttgccctctgcgatccacctgctttttagaagtctgccgagtgagaaggccacagtatctcatgctgtttgcattacagaactgcagcttttctactctgaaaaggcctgggagcagaatggctggcctgctgtgagcaggagaggagattctaagaaggatagtcccccctacaacatactgtcatactgctgggttttcatgggtaggaaagcttgtcctgaccccagcagcaaagaggtggcaggtcgctaatgaatatatgctttataatgtccttcttcattgctgagagggcagccttagagctgtggatttctgcatcccccctgagtctgacccatggacacctgtttcattcactttagcatcacagtgacctttgtatgctctgttcagtctgtgtcaggcagtatgcttgtcctgaagagaggtttggctatccccaccccaccccaccccaccctgttccttttttatcaggaggacttcagagccaggcctgcagcattttgtttgaaaacacaatcagctctgacagttagacatgcacacagacgccatagctggattggaaacattgatgttttaaaaatttattttttttggaaatagttgcacaaatgctgcaatttagctttaaggttctatagatttttaactagtccaacacagtcagaaacattgttttgaatcctctgtaaaccaaggcattaatcttaataaaccaggatccatttaggtaccacttgatataaaaaggatatccataatgaatattttatactgcatcctttacattagccactaaatacgttattgcttgatgaagacctttcacagaatcctatggattgcagcatttcacttggctacttcatacccatgccttaaagaggggcagtttctcaaaagcagaaacatgccgccagttctcaagttttcctcctaactccatttgaatgtaagggcagctggcccccaatgtggggaggtccgaacattttctgaattcccattttcttgttcgcggctaaatgacagtttctgtcattacttagattccgatctttcccaaaggtgttgatttacaaagaggccagctaatagcagaaatcatgaccctgaaagagagatgaaattcaagctgtgagccaggcaggagctcagtatggcaaaggttcttgagaatcagccatttggtacaaaaaagatttttaaagcttttatgttataccatggagccatagaaaggctatggattgtttaagaactattttaaagtgttccagacccaaaaaggaaaaataaaaaaaaaggaatatttgtacccaacagctagaaggattgcaaggtagatttttgttttaaaatggagagaagtggacagataaggccatttaatatatcaaagatcagttgacatctcctagggaatgatgaaaacagcaggctattagaaaattatttcatatagttctcgtgttcttttcttttttttaatccctgaagggatgatcagtaacatagcttctcttttctgtactctagaccaccccttttcatcattttgctttttatgtctcccataagaaatgtgctttttagagcttcctaatgcatgtgttgcattattgcagcattagaaaaggagaggtagcatttttgctgaaatcgggcctgtcactctccaataaaggttctggcacttcaatgccaggcaggtctcctaaatgaacagaatgatctgtgtgagccgatgcctgcccttccagaggggccactgtccccagccgcagccaactgtgtcccacaggaatgggagcctaggtttccaaatcttgtgattctttaggagaaacatgaaacctggatttcgtgtgaaatgtcccgattgttaaaaagttggctcaattatttttaaaacattttgtaagccaacaaaagtctgtgggctgccagtttattacttttgtcttaaaacatgatcattgttctctcacggtatccttctgtcttcccgttgcaaattcacttttctttcttcctgacattgccattgagggctttgttaccacaagctaagaaactgagtttaacagcccagttatctgcaacatgtcaattacctttgctcctctcctgtgattcccaccatgctgtgaccctcagctgtctccctttgctgggaattctgcaccaatgtctcccctcaacccattccctggttggtcctactcccgtgtggccagagacatcctagcaaatccttcctcctattatatctgacactaatttcttttcaacagcgctcatgtctcttggcccagtcaggtgctgccaggtttagataggaaagtacatgtcccattttcatgggtgcccttaatgtggtccacgtcctatatcttattatatttactcatggctcaatgggggcctccagagaccctctcaggctgctgagctagactaaggaatgcatccaccgtcatcacatgagacactgactctgtgacgacaaaagtacaaacagtctgaggctaagaaaggttcatctcacaacaggaaaaacaaatctcaacacacattagagataattgattcaggggttttctctcccagtctcccagcagggactgatttcatttctgacccactaggttttctttccagaaataggtagcaaggacaagaactaaacaatcccagccccacccagcaacacagaacacaggagtttgcttttggcttctcactctccaagtaaccctgaattaggcccagaatggctgaggcttggagcatctcctcagacagagcagaggcgacacctcttcaggggtgtgtggagtaaatagctcgaagagctgaagacagaaaaccagtttcacgccaggtgcgagagagagcataatggagggaagcccgctttctctctcctcttcttttctctttatttctttagagcacttgacttttttttctctct

SEQ ID NO: 12261 - DNA, 6000 bp, Homo sapiens
agaacagatactcattcaaataccttgatttttgaatcttctgaagaccagttgtggtgcagctttactcccagacacccctgggtcataagccttatgaacccaaagacagctttatatcaagattgccaggtatttcagtaaggatgtttattttcttgtctgtgccattactagaggctttagatttcactagaaatttattgtatggccatggtaagtgattgtatgaccatggtaaatgggcatacatactaggggaatgaattaagaaaagagagctcattgttggtataagtgaattactggggctcttgacaagtagatgtccaaacccaagctatactaaacgtttccataattatgagtattatttttctgcccattatacttttcgtcactaaactccatgagggaagggactattctatcctcaacacgaagcactgtgccttatacttggtaggaaactaataaatatgtgtaaattggattgatagatggcttgtaacaagagttcctaaagagcagagcaaactcaatttgctcaagttgtttgagaattaaaatagggtttaaataacaagacaaagaacattccaagaggatggggaccatagtttttagaactttagatttatttttagctttgatgtaaacctttctgtttgtatctgcaatctgaaaggcaaagagatgatccttttatacaatgtagagttctttataaaacgccctatttgtatgccacttcataatttatatatccctttcacatgatgatagaaataattattccatcatagtttgagagcttactatgtgctgggaactatactttacatacattgcctcattgatttatccgtccaactttatgctgtagtttttatgatccccattttacatggggatactgaagcacaggggtaagtgacttttccaaggtcatgaggatttgaagtagacctgcctggacttctgagtccacagtgccttctgagaaagcctgtgaagtggggtagctgtgttctccatgttatagataagaaatgtgagataaaagatgaacaacaaaggacaaaactggaaatagagcccaagacttccacgtgcagtccagtgctgtttttcagttccatgctaccacacattagactattagaaaatttctctatttaactatacagatttggaagcatgctttcctcctactaatttgttattcgtagatatctgtggatattgagtgagtgaccgtgatatgcttacatacaaaacacattatgcaaaacacacatggcttgtgtgcttaacaatgcatcattcattcagcaaacgtgactgaggaggaaaaggggaggcttcacagaggaagatatgttgaagctctgggtggtccattcctttgacaaaggtgcagagaagcaggttgagatggacccccgatctcccatctacccacaatctgcttatgtctgggctcccacctctgcctgtaactgcatctccttgcttctctggagttgccaactgtattagtccattttcatactgctatgaagaaataaccaagactgggtaatttataaagaaaaagaggtttaatggactcacagttccacatggctggggaggcctcacaatcatggcagaaggtgaaggaagatcaaaggcacgtcttacatggcagcaggcaagacagtgtgtgcaggggaactgccctttataaaaccatcaggtctggtgagacttattcactatcacgagaacagcatgggaaaactcgctcccacattgaattacctcctatgagtccctcctgctacacaaggggattatgggagctacaattcaagatgagatttgggtggagacacagccaatccatatcaccaacatcactgtcccttgcctaactgattatatttagaatgagcagtgccttcattgcagtttgcataatcaaccaatgttggctctactggacttttcttcaaaatcagaaactgtacatcctaagcaaatgccagaacaattggcaagaatgcctggacttgttttctgcatggtcatgaaatagaaccatttttcatatgttggcaacctaaatgccattaatctggaatctcttcttgatcaaactgaaactggaccagataggctgaagtctcctctcgggattccacagactgccctagtgaatgggaggaagggaggctctccctcagtggtggtgagcctacttgtccttagtgttgtcacctttcatttcattgattagcatgtggggtctgaagttgcatcagaatgctgagattgcttctattgatccaagaacttttttttttcatgtaatggcttttttagtttaattttgccaaagtaggtttttatactataaatatcatcatggcttatataggtttgcaaagcttgatggactgaatccacactggtcccattgtttggaattattttctggtttgcttgtttatgaagagactaagaccatctatagtgtgctgtctaatatggtaatcactagtcacatggagctattcaaattaaaattaattaaaatgaaataaaattaaatatttagcttctcagccacactagccctatttcaagtgctcaatagccacgtatggctagtggctaccatactggatagcagagatacgttttcatcattgcataaagttcaattggacagcactgatctgctgcgtgtagggatctgctttatctgaaaacttgatgcagaatcacggctagttcaaagaaacttgcagaacatttcatgaaaattaaatttctctatggtgaaaactaggggtcaagtagcagatgaatactggctgtgagatgaatgcataaccagaacctcccattcccctttttccagcgtctctcctatctcccagcagtgctttatcactttctcctctcaagttgataaagagaaaggaagaaagaaacagagaagtcggtttatgttcataattaacatccatgaactctgcataattttttcccctctctttacaggtcctcgaggccacacgggttaatcgaagaaagagcgcactggctttgcgctgggaagcagggatctatgccaaccaggaggaagaagacaacgaataaacttccttcaacccaggaagcgtctttggtgcttgggagaccaagaaaccaagaaattaacaactgaaagcattttaatggactatttattaaagtgcaaacaaactcagcaatccttatgtagaccagaagctgcaatatacaatgatgaaaatgaaacgaaaaggaagtccccccatcagactctggacacccaggaatcaaaagagaaaggacttttttggtgactcaatcccagtgtctggtttggggccaatctacaatggatccaaaaggacaaaacatgttacaagcaaatcaacatagttgctgcaggcggaactgagaccagcctctctgggcgatgaaggacaatggtggtagggccacttagagagcagtagggcccaggctggtgcagcctacatggcacaggatatttccctgcaccagtttcccacctgtcacttgcagcatcagagggtgttgcattaactccattttctccagcagccataaaatgaatggcgtttctctccatatttgcccagaagaggcagttatgattccacttctcctacatttaattatttttaattgagaacaactcatgatcacaattcataaaatccatattttaagacaatagttcttcatgtcacaaacacaatctattctacatgaggaggctgagaaaggggaagagaaaaacaaaccaaatggatgatgttagctttaggatcgtgtctgcttataatattcactgatctgcagtttatgagaacacattttcacagttatgtttcttcataggaaaactatatttagtgggcaacaactatttttatgatgggatgggggagtatatacacgtatagaatctgtacgcgttgaacaacttggttcaagatggtgggggcatttttagagcggcaataattgaaaaaaaaggcgaactctgccttggagaggtagatgataagaaataaaaaggtgtttataactattttgtattataaagtgggccttagagataggaagaagaatgatggattccttttggatcaatcagaaaggaaacacgaaagaaaagtcaggaaggtagagagagaaaaagggagggaaggagaaagaatgggaataaaataaggaggtaagagatactatttttgctgagcaaccagtgtgtttcaggatgatacaaagaaaaatatagaatagaaataagtgcaggcttggaatcagctacaaatcctaaagatggggtgtgtgtggatgtgtgtgtgtgtgtgtgtacaccattgtgtgtttgtaaaatgtgtatgttcatgagtaagggtgtgtgtgtgtgtgtattaaaattccagagtgaccgtggcacttgggtgtacaggtaattcctccagagctgtttgctggcttcaggagtggagtgagaatttcttttttatgaaaagggatataaaggcaccgagctgatgcagtatttgtaatattaagttgacctaacaaggtatttgcatgagtcacaattacaaagttttgagcggttttgtaatttgacatttaggagagtctcctatttattctcatactttacattcatgcttagtatactatagaggatgccagctttaatctttctgtcatttaaagcaatatgataagggtattcaataattgggtgccctaaatttctggatgagaaaattttcaattctggccatgagaaagaaaaaaaaataaacagccttctttttttttcctttgttttaaaactgtggttttttaaaaaagcaataattaactcagacctcactaaaaatcatttttgtttttatattgttatgtcataagctctattatgttattctaacaagtagcaatttcacaaaatttgtatgtagatgttaacgcacatttcctttgcttcttttattagactagtgttgactttggggggggacatttattcacaaatgagaagtaggcacaaagtaaaaaatggaaccatctactaacaaggatcctttaaaactgccaagggagctctaacttgaagccacatcctacagatggcagcccaaatagcacatgggcaattggcaccatctttatatggttgagtctcctgaatattttgaatgaattctcaacaaaatgtgctagccactggggacgcaaaacaagtaagatccctgttgcaagaaattcattttatagtgagggaggttggcatggagactaaaattctcaggaaaatgagatccgtgttagattagaagtcctgatgtgaaatgggaggactcaggaaggaggatcgtctttacctgaggatttctagccagaggtcccagatgcctgggctgagaacccagcgataagggggcgttcccaaagcagacacagggataagaacagaggaggcagcagcattgcacagccccaggcacagtggcagttaggatggctggagagtaggatagttctatgggttgcccaaaaaatgtgatgcgcttcatgttttctctgactcatggatctggtagagaccatagacatgatatagactaacttccccatttttcacaagaggaaaccatccttatgacttaccttaaagttttttgttctgttttgaaggaaaccatgtgcttcatgaaacctacagttgacaagagaatgtacagctaagagaaaagcttaagaggccacactattcgcggaatggctttagaggcagatgaagtggtctttgaccacagttgattgaaccagagcacttattgcttaaagaataacagagttctagagctgggggttcttgggccatgctccgtgtgtggataaggaaagaaatactgtttc

SEQ ID NO: 12262 - DNA, 6000 bp, Homo sapiens
ctacaaaaaattttaaaaaattaaccaggcatggtagtgcacacccatagacccagctccttgggaggctgaggtgggagcattgcttgagcccaggaggttgaggctgcagcaaaccgtgactgcgccactgcactccagcctgggcaacagagcaagaccctgtctcaaaaaacaaaaaacaaaaacccacacacaaaaaagcaaacttggctgggcgcggtggctcatgcctgtaatcccaacactttgggaggctgaaacttgtggatcacctgaagtcaggagtttgagaccagcctggccaacatgggaaaaccccatctctactaaaaatacaaaaattagctgggcgtggtggcaggcacccataatcccagctacttgggaggctgagacaggagaatcacttgaacccggaaggtggaggttgcagtgagccaagatcgcaccacttgatcctgacttcaggtgatccacaagccttggcctcccaaaatgctgggattacagcctgggcgatagtgcaagactccctctcaaaaaacaaacaaacaaacaaacaaacaaaccaagcctgacctgcattgagatctccaggacgtctgggtctggccacgcctgggaccacacaaggtcccgtgcagcagagtggcaacgtggttgggtgaagaggctgatggggcctcccactgtggctgagagtggggtgttggttggctggggctcagggtgaccccgcagggccatcccagcctggctggcacccaacgtgggctggtgtagaagaaggaacctggcctccaggctccaggccctggcttagagggagcggggagtctggacttcaggctggatcccttcctcttcctggagcgggtgctggcccccaacccgcttgcgtcagggacaaaaggactccttccctttccagcctggaaagcccctctgctgcaggctggaggaagggaccctgggcccagcctatagtcagcggtgtctatgggcatggatctggacggggaaaaggacaaagcagcctccatccacagttcattccgggaccaggcccttgcaggcacgcgctgggctcctgtgggaagacactaagggccccaggacagacctcctctccgggcatctgggttcctagatggcagaggtggcagagtggggtgggatggcccaattgggagctttagcttccggcaaagagctgagcacagtacatcttcaatgtgtaagattctcctgggagaccagggcccagctggtggtgagctgggggaagtgggtgatactgccgtgggaggagccacctggccctctggggaagtgcactcgctgtctgcagcgcccaggcctgggtagctgggtgggggctggggggccatctgtgctcagggtgcctgcacctgggccttctctgccctgggccaagcctgcccgagcctctctgtcctctgcctgcccagctggacatctctgggcctctctggagaccagtggggtgggctgtgggggcgtcatattgccctggcttggcatccctcttgtggctgtacccctcccagcagccccaggactagcaagtccccgagatgggggtggggacagtggttgatgccaaaggttgtgggggcaggggcggggcaggagcaggaaggtcccctgagttccctcaccttgggcagagataaaaggagcacagttccaggcggggctgagctagggcgtagctgtgatttcaggggcacctctggcggctgccgtgatttgagaatctcgggtctcttggctgactgatcctgggagactgtggatgaataatgctggtgagtgtctggccctcggggaggcccaagctggggacagctaggcaacctgggaggggaggacgggggtggcgctgagtggggcatgtcggtgtccctgagcccatgggaggggaggacgggggtggcgctgagtggggcatgtgggtgtccctgagcccatgggaggggaggacggggttggcgctgagtggggcgtgtggatgtccctgagcccaagtgacagagcctcccctccctcgtgctgctgcagggcacggccccacccggaggctgcgaggcttgggggtcctggccggggtggctctgctcgctgccctctggctcctgtggctgctggggtcagcccctcggggtaccccggcaccccagcccacgatcaccatccttgtctggcactggcccttcactgaccagcccccagagctgcccagcgacacctgcacccgctacggcatcgcccgctgccacctgagtgccaaccgaagcctgctggccagcgccgacgccgtggtcttccaccaccgcgagctgcagacccggcggtcccacctgcccctggcccagcggccgcgagggcagccctgggtgtgggcctccatggagtctcctagccacacccacggcctcagccacctccgaggcatcttcaactgggtgctgagctaccggcgcgactcggacatctttgtgccctatggccgcctggagccccactgggggccctcgccaccgctgccagccaagagcagggtggccgcctgggtggtcagcaacttccaggagcggcagctgcgtgccaggctgtaccggcagctggcgcctcatctgcgggtggatgtctttggccgtgccaatggacggccactgtgcgccagctgcctggtgcccaccgtggcccagtaccgcttctacctgtcctttgagaactctcagcaccgcgactacattacggagaaattctggcgcaacgcactggtggctggcactgtgccagtggtgctggggcccccacgggccacctatgaggccttcgtgccggctgacgccttcgtgcatgtggatgactttggctcagcccgagagctggcggctttcctcactggcatgaatgagagccgataccaacgcttctttgcctggcgtgacaggctccgcgtgcgactgttcaccgactggcgggaacgtttctgtgccatctgtgaccgctacccacacctaccccgcagccaagtctatgaggaccttgagggttggtttcaggcctgagatccgctggccgggggaggtgggtgtgggtggaagggctgggtgtcgaaatcaaaccaccaggcatccggcccttaccggcaagcagcgggctaacgggaggctgggcacagaggtcaggaagcaggggtggggggtgcaggtgggcactggagcatgcagaggaggtgagagtgggagggaggtaacgggtgcctgctgcggcagacgggaggggaaaggctgccgaggaccctccccaccctgaacaaatcttgggtgggtgaaggcctggctggaagagggtgaaaggcagggcccttggggctggggggcaccccagcctgaagtttgtgggggccaaacctgggaccccgagcttcctcggtagcagaggccctgtggtccccgagacacaggcacgggtccctgccacgtccatagttctgaggtccctgtgtgtaggctggggcggggcccaggagaccacggggagcaaaccagcttgttctgggctcagggagggagggcggtggacaataaacatctgagcagtgcctcgtgggtctggccagtgtctcatgggtcacctccgtgcagggccacagagcctgcatctgccctcccctgacatgtcgcccccacggccatggggctgcttgttccccacggggggtcctgtcgcctgacttctgggcctttgctcaccctccgcctgagagccctccctgtgccgggctgcccactggctaccccagttcctacagcctccgccagacggccccttatcagagagccttctgtgtcccccaaaaggccaaggcgatgagcccaggagttcgagaccagcctgggcagtgtagtgaaatctcatctctaccaaaaatacaagaattagcagggcgtggtggctcacgcttgtggtctcagctacttgggatactgaggtgagaggatggcttgagcccaggaggttgaagcttcagtgagccgtgatcacaccacagcactccagcctgggcaacagaatgagaccctgtctcaaaacaaaaaccaaaacaggccaaggttggggaagagtagggaacggacgtcagaggcctggccaggctgaaatcgcccatctcccaggcccgcaggctggagggtgtctggggtgacagggtctgacctgtgccttgtagctccctctggtggccagtgctggggaggcactggggatgcggctgcagccagggagcccctgtagtggacggtggagagtggggcgaggaggagagaggccaacccacgggtggtgctgaccagggccccaacaggctaagcccccggggctggggcacagggcttgtccctaccccaggtaggggtgggcaggttgagggcaggaagcccccctcacccatggctgtggcttgtgggaaagacctgctggtagcttcctgccctgacccagccctgtggactgagcagagaaaagcaagtgccttgaggctgcgggctggggtgggaagctgatccctcactcactagcccagggtcaccttcctgctgcaaaggagctgggaggagtggggagctgtggcctcggaggtcttcattcacttgaggatgcgccttctatgtgcgccctgacactggacaccacacagcgctactccaccccattcacaggggggaaactgagtctgggaagcgccgtcagagccacccatggggtcagcctgtcctctgtcgctctctacaggccacgcggaggaactgccccacctcccggggcgccccagcaggtgccaagccacagccgcagaaccgcctgatcccgaactccctgtgcagagaccagactcgcccgaatatggggagaaaaacgagccgcgtgcagcaggggccgcctcggtcccctgcctgctccgctcacggcgagcgttcctggggcctcgagtttccccccttccgctggctgctcggaatcgcgggacggacccacctggccgccctgcctcccttccaggtgggcaccacctggactccaagtgctggtttacaaagcacacaggagacccttacgggggtgagctggcccctcgccagcgtccgctcggcgcgccccggggacagtgaaggcttggggcgcctctgcagagtcgccagcgcggtgggcgcagccggatgcctctgggagaagagcgcagcgcccgagggtcccccggcctacgaaggctaagccggggtctcggattcgatgtgggcgcgtcgcgtgacgcccggcgaggggcggcccggaggcttcccggcggcggcgcgcgcagggtctcgggcccgggtcggtcccgggcgcggcgcgggcggcgggcgcctcctggcgggcgcggacggagcgcggcgcctttaagcgggggcgggcggggcgcgggcagagtcgctgtcgccgcggccgccggggcggagccagcgcggatcgggtcccggacgcccgagcgccccgcccccgcgcgggcgatgcccagcggcgcggcgggctgcggggcccggcggggcgcgcagaggagcgggccgcggcgctgaggcggcggagcgtggccccgccatgggcttcctgcaccagctgcagctgctgctctggaagaacgtgacgctcaaacgccggagcccggtgagcccaccccacgcgcccgccctcagcccgaggccgcgcgcaccgcggccagaggcgcgctccccgcgcgcacgtgcggacggccgggcgcgcgcagaccccggcgggcgctgggggcggcgcgggcccgagccccctccccgccgggccctgccctcgcctgccggcgctgcggcctccggggaggtggctcggtcgtgtccagtccggtcccgcgtccgctgacatcgcggtgctcggctgagtcacggcacccgc

SEQ ID NO: 12263 - DNA, 6000 bp, Homo sapiens
ccattgaacccgaggcgctgcggcggggcaacatgagctccctgggcttcacgagcaaggagcagcggaacctgggcctcctcgtgcacctcatgaccagcaaccccaaaatcctgtacgcgcctgcgggctctgaggtcgaccgcgtcatcctcaaggtgcacgggtctgggacgctccatgtttgacaggcagagtgggagggggtctctgcaggcctgggacccctgggcagagggtgtcggcagaattgacacgggaggggtacggggtgcagcttcggatgggacacaggctctgcaggtgggggaccagggggtcgcttttcctttcgggagctccaggggctgctgtgggaaggcactggagagtctgctctggcagggtcctccggctgggggtggccggtccagggcagtgctggtggaggaggggtgtgtccagagaccttccagagtgtctcgtgggcgggcagctgggcagtttgggttctgggtgaggggtcctgtctggaacaagcagaggccagggctggacattggcctgggaggggagggcctgtggacgaggccaatcctgggtgtagagggggtccctaggatgagggtgggacagatgagggtggagcattgggtgcttaagggacacatggagacaggtccagcaaaggagctggtgggcacagctgggcagttgggggtccggaggccgtgctgccctgggagtggagggcaaagcaggtttcacctgagcgccgcagaaaggagtggagagcccgggcgtgggactcacgcttgaaatcccagcactttgggaagccatggtgggaggatcgcttgagctcaggagtttgagacaagcccgagcaacatagcggaagcccgtctctaccaaaaatacaaaattagccaggcgtggtggtgggcacctgtaatcccagctacttggagggctgaggcgggaggatcccttgagcctgggaggtggaggctgcagtgagctgggactgcaccactgcactccagcgtgggtgactgagaccctgtctcaggaaaaaaaaaaaaaaaaaggtggggagggttagttgttggcaatggaccagccactggggaggtgagtggggtgagagcccccaagtcggtgggggtccgtccagaaactccatgcccctgcctcaccccctgcaggccaacgagacttttgcttttgtgggcaacgtgactcactatgcccaggtctggctcaacatctcggcggagatccgcagcttcctggagcagggcaggctgcagcaacacctgcgctggctgcagcaggtgccaagggtgcccgcgagggaggcggctgtgggtggtgtggggagcccctctctgcccggctcggcaggcgcaggtccccctctgagccgcccctccaccccaagtatgtagcagagctgcggctgcaccccgaggcactgaacctgtcactggatgagctgccgccggccctgagacaggacaacttctcgctgcccagtggcatggccctcctgcagcagctggataccattgacaacgcggcctgcggctggatccagttcatgtccaaggtgagcggtggggcctccgagccaacccacgacaccccctgcctcgcacatgcccacggcgggctccagcgatgcccctcccgctaggtgagcgtggacatcttcaagggcttccacgacgaggagagcattgtcaactacaccctcaaccaggcctaccaggacaacgtcactgtttttgccagtgagctgccctccccgccccgccccagccccccacagacctcttcctccccagcccagccccacccgtccccctgtgccctcccactccttggccgcgccctggccttcccccctcacccgccacttcccctccccacccctgccccttccaaacggccccaacccacaacccgccccctccctgcacctccccacttctgcccacctttcccctggggcccccaccccagccctgtcccacctttccctggaccctcctgtccccgcccccacaccttggccccgcccccgtgccttgctttcccccccaccacgccttggtcccgcccctgcatcttggccccgccccaacctcccggccccaggtgtgatcttccagacccggaaggacggctcgctcccgcctcacgtgcactacaagatccgccagaactccagcttcaccgagaaaaccaacgagatccgccgcgcctactggcggcctgggcccaatactggcggccgcttctacttcctctacggcttcgtctggatccagggtgaggagcaggcccggaagaccggctggaggattcatgggggaggacaggtgtgaggacgagagggcctgcccggcacctgatggctgcccccacccacagacatgatggagcgcgccatcatcgacacttttgtggggcacgatgtggtggagccaggcagctacgtgcagatgttcccctacccctgctacacacgcgatgagtgagtgctgggcgcccggggctggggctggggctggggctgagtggcgcctgagcgcggcctccccgcagcttcctgtttgtcattgagcacatgatgccgctgtgcatggtgatctcctgggtctactccgtggccatgaccatccagcacatcgtggcggagaaggagcaccggctcaaggaggtgcgcgggccgggactctccctggaggcgcgggctggcagggaggggcggcgtcctccccggggcctgccccaagcccctggcccacccgcaggtgatgaagaccatgggcctgaacaacgcggtgcactgggtggcctggttcatcaccggctttgtgcagctgtccatctccgtgacagcactcaccgccatcctgaagtacggccaggtgcttatgcacagccacgtggtcatcatctggctcttcctggcagtctacgcggtggccaccatcatgttctggtgagcgcgggccatggtaggagggacctggggcaggcacttgcccagcaagctcaccccacatcctctcagagccccctggaccctggcacgggcctgcccaggaggccgggcgtgcgggtggatgacggtgcgcgtggcccctgcccacccagcttcctggtgtctgtgctgtactccaaggccaagctggcctcggcctgcggtggcatcatctacttcctgagctacgtgccctacatgtacgtggcgatccgagaggaggtggcgcatgataagatcacggccttcgagaagtgcatcgcggtgagggtcgcgggcaggcgggcggctggggtgccgggccaccccacgtgctgacaccactgccttctcagtccctcatgtccacgacggcctttggtctgggctctaagtacttcgcgctgtatgaggtggccggcgtgggcatccagtggcacaccttcagccagtccccggtggagggggacgacttcaacttgctcctggctgtcaccatgctgatggtggacgccgtggtctatggcatcctcacgtggtacattgaggctgtgcacccaggtactggccagcccttggagggcaggggagaggcaggggtccccagccagggttggggaccagcagtctgtgtccactcctggatgcagcacgggtggctccctgggtgggcacgtggcccacgtggtggatggtcaccccaggccctaggtcagcctcccctcccctccccgacccccaggcatgtacgggctgccccggccctggtacttcccactgcagaagtcctactggctgggcagtgggcggacagaagcctgggagtggagctggccgtgggcacgcaccccccgcctcagtgtcatggaggaggaccaggcctgtgccatggagagccggcgctttggtgaggctggcatcagaatggtggctggggtgggcgctgggttcagagtcctgggtggccttggcgccgcccccaccctgctgatccacagccctggtgcagaggagacccgtggcatggaggaggagcccacccacctgcctctggttgtctgcgtggacaaactcaccaaggtctacaaggacgacaagaagctggccctgaacaagctgagcctgaacctctacgagaaccaggtggtctccttcttgggccacaacggggcgggcaagaccaccaccatgtgagtgtcggaggggcagggcggtgggcatctgctgaccagagcaggagtcctagtcagggcagggtggggcccctgcagagggcgtggggtcatgaccccgcccacctacccaggtccatcctgaccggcctgttccctccaacgtcgggttccgccaccatctacgggcacgacatccgcacggagatggatgagatccgcaagaacctgggcatgtgcccgcagcacaatgtgctctttgaccggctcacggtggaggaacacctctggttctactcacggctcaagagcatggctcaggaggagatccgcagagagatggacaagtgggtgggctgggcggggggcggggcaggtgggcggaggccctggggctctgcatagcagcagccccatgccccacctccctgtcccaggatgatcgaggacctggagctctccaacaaacggcactcactggtgcagacattgtcgggtggcatgaagcgcaagctgtccgtggccatcgccttcgtgggcggctctcgcgccatcatcctggacgagcccacggcgggcgtggacccctacgcgcgccgcgccatctgggacctcatcctgaagtacaagccaggtgagtggggtgccgtgtgggcaggggtgcgggcggcgcctcccctgccccctgaccctgggtctggccttgtcctaggccgcaccatccttctgtccacccaccacatggatgaggctgacctgcttggggaccgcattgccatcatctcccatgggaagctcaagtgctgcggctccccgctcttcctcaagggcacctatggcgacgggtaccgcctcacgctggtcaagcggcccgccgagccggggggcccccaaggtctgtgttgaagctgcctgagctggcttcgggccaccttctccccgggacccccacctgagaatccacaatggagaggctgggccctcaccgtcacccgctgggcccaggatgcctgctggggcctggcccgccctctgcaacgcccgtatcttggagaggctgggtcctcagcgtcaccccctgggcccaggatacctgctggggcctggttcttcctctccaatgcccatatcttgacccagttgggttcccattgggggtccctcctcccagcccctgagtgaattccttcctgctcccacgtcccccacagagccagggctggcatccagccccccaggtcgggccccgctgagcagctgctccgagctccaggtgtcccagttcatccgcaagcatgtggcctcctgcctgctggtctcagacacaagcacggagctctcctacatcctgcccagcgaggccgccaagaagggggctttcgagcgcctcttccaggtgtgagggcgcacgggtcggggggcagttgcaggtggtggaggtgggcgcactcctgcctgggcgtccctgccgcagcctccccctccaccgcccctgcagcacctggagcgcagcctggatgcactgcacctcagcagcttcgggctgatggacacgaccctggaggaagtgttcctcaaggtgtcggaggaggatcagtcgctggagaacagtgaggccggtgaggggcctggaccacttgctcagcccaccccacccacaaggccccagctcgggcctgcgctgtcactcctgcctggtgtctgggggcgccaccctggtcctgggtggaagccaggggacgccccggggttagcctgcggtcctaggtgggtggtcctggtggccagaggtcccggacaggtgtatgagcctgg

SEQ ID NO: 12264 - DNA, 6000 bp, Homo sapiens
ggctgcagcaacacctgcgctggctgcagcaggtgccaagggtgcccgcgagggaggcggctgtgggtggtgtggggagcccctctctgcccggctcggcaggcgcaggtccccctctgagccgcccctccaccccaagtatgtagcagagctgcggctgcaccccgaggcactgaacctgtcactggatgagctgccgccggccctgagacaggacaacttctcgctgcccagtggcatggccctcctgcagcagctggataccattgacaacgcggcctgcggctggatccagttcatgtccaaggtgagcggtggggcctccgagccaacccacgacaccccctgcctcgcacatgcccacggcgggctccagcgatgcccctcccgctaggtgagcgtggacatcttcaagggcttccacgacgaggagagcattgtcaactacaccctcaaccaggcctaccaggacaacgtcactgtttttgccagtgagctgccctccccgccccgccccagccccccacagacctcttcctccccagcccagccccacccgtccccctgtgccctcccactccttggccgcgccctggccttcccccctcacccgccacttcccctccccacccctgccccttccaaacggccccaacccacaacccgccccctccctgcacctccccacttctgcccacctttcccctggggcccccaccccagccctgtcccacctttccctggaccctcctgtccccgcccccacaccttggccccgcccccgtgccttgctttcccccccaccacgccttggtcccgcccctgcatcttggccccgccccaacctcccggccccaggtgtgatcttccagacccggaaggacggctcgctcccgcctcacgtgcactacaagatccgccagaactccagcttcaccgagaaaaccaacgagatccgccgcgcctactggcggcctgggcccaatactggcggccgcttctacttcctctacggcttcgtctggatccagggtgaggagcaggcccggaagaccggctggaggattcatgggggaggacaggtgtgaggacgagagggcctgcccggcacctgatggctgcccccacccacagacatgatggagcgcgccatcatcgacacttttgtggggcacgatgtggtggagccaggcagctacgtgcagatgttcccctacccctgctacacacgcgatgagtgagtgctgggcgcccggggctggggctggggctggggctgagtggcgcctgagcgcggcctccccgcagcttcctgtttgtcattgagcacatgatgccgctgtgcatggtgatctcctgggtctactccgtggccatgaccatccagcacatcgtggcggagaaggagcaccggctcaaggaggtgcgcgggccgggactctccctggaggcgcgggctggcagggaggggcggcgtcctccccggggcctgccccaagcccctggcccacccgcaggtgatgaagaccatgggcctgaacaacgcggtgcactgggtggcctggttcatcaccggctttgtgcagctgtccatctccgtgacagcactcaccgccatcctgaagtacggccaggtgcttatgcacagccacgtggtcatcatctggctcttcctggcagtctacgcggtggccaccatcatgttctggtgagcgcgggccatggtaggagggacctggggcaggcacttgcccagcaagctcaccccacatcctctcagagccccctggaccctggcacgggcctgcccaggaggccgggcgtgcgggtggatgacggtgcgcgtggcccctgcccacccagcttcctggtgtctgtgctgtactccaaggccaagctggcctcggcctgcggtggcatcatctacttcctgagctacgtgccctacatgtacgtggcgatccgagaggaggtggcgcatgataagatcacggccttcgagaagtgcatcgcggtgagggtcgcgggcaggcgggcggctggggtgccgggccaccccacgtgctgacaccactgccttctcagtccctcatgtccacgacggcctttggtctgggctctaagtacttcgcgctgtatgaggtggccggcgtgggcatccagtggcacaccttcagccagtccccggtggagggggacgacttcaacttgctcctggctgtcaccatgctgatggtggacgccgtggtctatggcatcctcacgtggtacattgaggctgtgcacccaggtactggccagcccttggagggcaggggagaggcaggggtccccagccagggttggggaccagcagtctgtgtccactcctggatgcagcacgggtggctccctgggtgggcacgtggcccacgtggtggatggtcaccccaggccctaggtcagcctcccctcccctccccgacccccaggcatgtacgggctgccccggccctggtacttcccactgcagaagtcctactggctgggcagtgggcggacagaagcctgggagtggagctggccgtgggcacgcaccccccgcctcagtgtcatggaggaggaccaggcctgtgccatggagagccggcgctttggtgaggctggcatcagaatggtggctggggtgggcgctgggttcagagtcctgggtggccttggcgccgcccccaccctgctgatccacagccctggtgcagaggagacccgtggcatggaggaggagcccacccacctgcctctggttgtctgcgtggacaaactcaccaaggtctacaaggacgacaagaagctggccctgaacaagctgagcctgaacctctacgagaaccaggtggtctccttcttgggccacaacggggcgggcaagaccaccaccatgtgagtgtcggaggggcagggcggtgggcatctgctgaccagagcaggagtcctagtcagggcagggtggggcccctgcagagggcgtggggtcatgaccccgcccacctacccaggtccatcctgaccggcctgttccctccaacgtcgggttccgccaccatctacgggcacgacatccgcacggagatggatgagatccgcaagaacctgggcatgtgcccgcagcacaatgtgctctttgaccggctcacggtggaggaacacctctggttctactcacggctcaagagcatggctcaggaggagatccgcagagagatggacaagtgggtgggctgggcggggggcggggcaggtgggcggaggccctggggctctgcatagcagcagccccatgccccacctccctgtcccaggatgatcgaggacctggagctctccaacaaacggcactcactggtgcagacattgtcgggtggcatgaagcgcaagctgtccgtggccatcgccttcgtgggcggctctcgcgccatcatcctggacgagcccacggcgggcgtggacccctacgcgcgccgcgccatctgggacctcatcctgaagtacaagccaggtgagtggggtgccgtgtgggcaggggtgcgggcggcgcctcccctgccccctgaccctgggtctggccttgtcctaggccgcaccatccttctgtccacccaccacatggatgaggctgacctgcttggggaccgcattgccatcatctcccatgggaagctcaagtgctgcggctccccgctcttcctcaagggcacctatggcgacgggtaccgcctcacgctggtcaagcggcccgccgagccggggggcccccaaggtctgtgttgaagctgcctgagctggcttcgggccaccttctccccgggacccccacctgagaatccacaatggagaggctgggccctcaccgtcacccgctgggcccaggatgcctgctggggcctggcccgccctctgcaacgcccgtatcttggagaggctgggtcctcagcgtcaccccctgggcccaggatacctgctggggcctggttcttcctctccaatgcccatatcttgacccagttgggttcccattgggggtccctcctcccagcccctgagtgaattccttcctgctcccacgtcccccacagagccagggctggcatccagccccccaggtcgggccccgctgagcagctgctccgagctccaggtgtcccagttcatccgcaagcatgtggcctcctgcctgctggtctcagacacaagcacggagctctcctacatcctgcccagcgaggccgccaagaagggggctttcgagcgcctcttccaggtgtgagggcgcacgggtcggggggcagttgcaggtggtggaggtgggcgcactcctgcctgggcgtccctgccgcagcctccccctccaccgcccctgcagcacctggagcgcagcctggatgcactgcacctcagcagcttcgggctgatggacacgaccctggaggaagtgttcctcaaggtgtcggaggaggatcagtcgctggagaacagtgaggccggtgaggggcctggaccacttgctcagcccaccccacccacaaggccccagctcgggcctgcgctgtcactcctgcctggtgtctgggggcgccaccctggtcctgggtggaagccaggggacgccccggggttagcctgcggtcctaggtgggtggtcctggtggccagaggtcccggacaggtgtatgagcctgggaactggggtcaagaccggggatgggggtcctgggcaggcctaggggccagtagccctgagtgtcccctcggcccttccactgcggcagatgtgaaggagtccaggaaggatgtgctccctggggcggagggcccggcgtctggggagggtcacgctggcaatctggcccggtgctcggagctgacccagtcgcaggcatcgctgcagtcggcgtcatctgtgggctctgcccgtggcgacgagggagctggctacaccgacgtctatggcgactaccgccccctctttgataacccacaggacccagacaatgtcagcctgcaaggtgggggtggcagggtgaggctgggacagcaagggagggggagcagggttgcgggggagcggcatgagggcagccagtagggagagggtagcgtgcaaccacctgctcagcctctacctctctgcacagaggtggaggcagaggccctgtcgagggtcggccagggcagccgcaagctggacggcgggtggctgaaggtgcgccagttccacgggctgctggtcaaacgcttccactgcgcccgccgcaactccaaggcactcttctcccagatcttgctgccagccttcttcgtctgcgtggccatgaccgtggccctgtccgtcccggagattggtaggccaccggctggacaggggtgctgggcttgcctccccccaccgcccgctgggagccctgatgatgcccactcctgagcttcctgactctgggcctcaccccacacctgaggctgggcacgcaccggggttcatccgggagtcctgtctcctcgggtcccagaccccaggcgtggatcccttggggttgggggaaggggaccgaggcttgggggccgctggccagagggcagaacctgctcaggcctccctgctcgccctgccaggtgatctgcccccgctggtcctgtcaccttcccagtaccacaactacacccagccccgtggcaatttcatcccctacgccaacgaggagcgccgcgagtaccggtgaggcctccagcgggggcagccttggtgggtggggcgagtgaaggggcggggacagccttggtgggccaggcgggcgagggggcggggctggcgaggggcggagactggcagccccacctcacactgtcggtgcccgcaggctgcggctatcgcccgacgccagcccccagcagctcgtgagcacgttccggctgccgtcgggggtgggtgccacctgcgtgctcaagtctcccgccaacggctcgctg

SEQ ID NO: 12265 - DNA, 6000 bp, Homo sapiens
ctcaggaaatgtttgctgagcttatcatggcatgacactgcgtgagactaacaaggagagaaagaaaacagaagggaaagtgggcagtaaagacagactctgagattggctaacctctgtagtgcagtcaaaggtgcaatcataaatgctggctttcttgctttcttcccacagatttgctcacaccccccaatgcctcacctggctatgtgggaagacactggatagagaggagcagcaatgcttcatcttcctcaccttgacccagaaaattagaagcaagaacttggtgatctccaggctagaagtggtacaacaaggagcagagcccctggtgaaaggtacctggagggcgcaaggaacagattggcaaagagcagagaggatgggcaggctctgtgagaggtgagcatcatacaggaacccacagagagagcagggcatagtgtctgtgtgtggtgtaggcagccctcattaggagagacaggcctgtgtaaggaggaagcatttaggggcagcatagtggatagccaggagaagtgggcatctgggatcaaatccttgctgcatgctggctggacgtgtgactttgagcaggttaattgaccccctctggtcctgtctcctagtctataaaatggggacaataatgatattcacctcatagggatattgcatggattaaatgagataatgcatgttaagtgcctggcatgtgtttacttaatgcactctatattagttttctatggttgccagaacaaattactacaaaccgggtggcttaaaagaacagaaagctattcactcacagtttcagaggccagaagccccaaatcaaggtgtctgcagaatacagtcttctggggctctaggggagaatttgttattccttggcttggggctgcatcactccaatctctttacatgccatctccatctttacgtgaccatttcctacatgtgtctgtgccttttcttctgactcttataaggatacttgccattgatttagggcccacctggtaatacaggatgatctcatcccaagatccctaacttaattaaattagcaaagtccctttttccaaatgaggtcacatttgcagattctgggatacggatgtatcttttgagccaccattcaacctattacaatacctaagtactgagtgctttctgtaagccagaacttgatatgtgttatttgatcagttgcttaagctaaatcttggagaatagcattctgggttccttgggacctgatcctgttttcccaagtaataagagggtaccatgtgggtgctatgattagtgaccaaaggaagttggttgacgtagtttctagattctctggcttccctcctcagtctttttccctgcatcctgacttaggccacatacaatattttttcctttctctgcaaaacgtctgtggtaggcatttttatgctgtccagatcccccttcaagaaatgacttttagtcccagcggcttggagtattgtcatcggccttcaacttctgatcctccccagtgcagagagctgcctcactggagatcacttctgtcccagcataggccacaaccagtgacagatggagacagcagtacaaatgccctttcatttcagcctaacatgagacaagttagataggccattttaactccatagttccttgggggattgaaagaagctttgtgggatttgcattgcaactccaattctccctccaccctttcctgcttcctctccctcccttccatggcactgatcccaaggtactcctgattaaacaccctgcacattaaacttcaaatcagagtctgcttcccagacattctaacttgtgccaatgtctaaggatcatatattcttgggatcaaacaattatatgcaaaatagaaaatttggtctgagtttgtacttatgtatgattctgttcccataggtggcaatacacaatgtcacgttaaggttgtaaatcatattttaaattttggaaggatctctttagggctttgaagtttttcattttcctatgacttagaacatacgacatgaatctaaggcaattctaaaactttgaaatactccttaagtatctggaaaaaggagcaccagtttgattgttgctgaaaacttctttagttgaaaataatgttttgaggtttcgactgaatgtataactgtctttgaatttttagttaagtagtgtgatgaaattcatcagatatttagcaccatctgtgatcaagaagtcaaaaaaaaaaagaatataagacccaagtgagagaagtcctgtactggttgagaaaataggcttttggaataaagcagatctgggtttgagttttgtctctactgtccacagtcactgaactctgtgcctcagtttccccatctattaaatggggataatgaacatatttatcctgtagagattttgtgaagcttaaatgagattatctacataaaacatttataatggtaaacacaataaatgttattattagctactacctgaggcaaagcatataaataaaaaaagatacatatacaccaaatagcacacactaatgaataaatttttgaccatttgaatcattgtttacagaaaacacatgaaaatttgttcctacctttaaaaaaggattccagatatattttccttattagggagaaggttactaattttctaatactgaaagtgacatctgagtgaagacctcattaggcggtgagttgtgtggctctttgtggaagagcattttgagcagaaagaacagccagtgcaaaattctgaaaggatagctggactgtgtttgaggatcagccaagaggtctgtgtggctagagaagagtaagcagggtgattgaagtcagagaaataagagggtggggctgggtgcagtggctcacgcctgtaatcgcagcacttcgggagtccgaggcaggtggatcatgatgtcaagagattgaaaccatcctggccaacatggtgaaaccctgtctctactaaaaatacaaaaattagctgggcgtggtgtcacacgcctgtaatcccagctacttgggaggctgaggcaggagaattgcttgaacctgggaggtggactttgcagtgaacagagatcgcactccagcctggtgacagggtgggattctgtctcaaaaaaagaaaaagaaggaaagcaagaaaagaaagaaaagggtggagcaggtcctatagggcctggttggtcatcgtgaagactttggactttactaaatgacttgggaacttgttgggtcttgagctaaggagtgacatggcccaatttctgtattaaaaggataaccctgactagtgtgttcagaatagagtagggtgggcagggcagaaaatgaagggagaccgtggtcaggaggccactgcggtatcccaggttgatggcaagggcagcttggaccaaccaaggcatcaccaccatgggcacagagcatggtcagcatctgctgtgttttgaatcctgagctgatagaaattggcaatgtctgacaggaacggatgagctgaagatgcctccaagttttctctcctgaacaactggaggaaaatagttcttttactgagatgaggaagacacaggggacgggcaggtttggcaagaaatatgcagccttcatgttgggacctgttaagtatgaaatagctctgaagcatccgattggaaatgttgaggtggcaatgagatcgaagagtctggcgttagtgagtagtctgggttagaaatataaatgtgggagttatcaggctatcattggtatctaaaactatgagacttgaggacagcattgaggggctggatagagaaagaaacaggagtgacagggaagaacttggaggcactctcatgttaaggggttacagaggtaacgcaaagaggccgagaagcggcggccaatgaaagaccaggaaacccagcggtctggaagccaggtgaaggcatgggagcaggttgaactgatggctcaactggagtttgttaggccagtggtcctcaaagtattgttccaaacccgctgcggcagcagcagcctctggaaacttattagggacgtgcagcctctcaggcccactccagagctactggatcggaaacggagggtgaggcccttcagcagattctgatgcaccctcaggttttaaaaccactgccctcctcacaaaattgcctgcacaaaattataaatgggagaaaggaggaggaggaggaggaagaggaggggaggaagaagaactctttacaagaaaagaatattgttggagacccacttagtgcccaaagcaaacagcttcctcagaagtaactccctccccaacaaccccctcccagtgtaaagcctcccattaatcaatctatcatggctctttggagagaaggaatgcccccatttcaccggacggagggaatgctgagcaccaggcatgccagacattccaccggctaaaaaaagtgggggtggtattccagggttagcattgctggaccgtaaacgctgaaactccttagatataaagcttattccacccaaccgtttccaaattttcctccaggctgtccttggagaattccaccctctttcattctggggagaagaagttaaaattagggccagccctgcgggactgacatgccagatgcagggaagctgtccccagaaataagcgagttcccaccgcggctgggcggggcgggagcctcgggtcccaacccagcggagggactcctggaaggcctgccccttccaagtgtctgcaagggctctggtcccaagctttaaaatcctgagcgaaggcactgcgggccgacctctcctctcccagccagtcgtggctggcctttcaaagtgtgcagttgtctcctccctgtccagccccatcgtcgcccaggaccagctgggccgcggtctgacctgaggctgctgctcagcgccggggcgctggcgctctccattcgagcaccttccagcataccgctcggctccgggagccgctctgcaaagttgggcagctcagagcgcaagctttgcctctcgacttctccctccttgggtccccggcgcccccgcctcccacgatccctttcactaggagcagccagtcccagcgggctggcaacttgcaccccttcctagtcatcctccctgaaacgcgaccatgctgttaaggggcgtcctcctggcgttgcaaggtaaggcctggaccccgggacaaccccgggggcgctctgacgactcgcccccgctcctgctgcccccgggggtccggctcaccgtgctgggctgggccatccgagggcgcctcctgatcctccgcagccgctaactccctcccctggccaagcctggggtgggggtgggggtgggcgtggggtcgctcagtggaggcgcccggggatgctgggggacaggtactgcatccctctcccgccccctcccgctcgtctttcccccactttcaccaggtagtccccctggggctccccgagttggtgcaaaggctcctgggtggagctcgaactgaaactcgctttgtgcccgcagccctgcagctcgccggtgccctcgacctgcccgctgggtcctgtgcctttgaagagagcacttgcggctttgactccgtgttggcctctctgccgtggattttaaatgaggaaggtaaggaggctcggtggagaggggcgcgaagtgaactttcttccttgatggcttgcttttttttcccacatgggtaatgttatcttggagttaattctccgcggcaagaaaagtgtgagtcatggatcctccttcaagccctcagctgtgctgcaagggatggccgaggcaggaacggggcgggcgggaggccgccctttgtttacctggcctatgggtagaagcttaaaatttgcgtctcaccccagcactccttaatggaagggagaaacggagcacagctaatgattgttct

SEQ ID NO: 12266 - DNA, 6000 bp, Homo sapiens
ccaccggtcactaggcccgccggggtgtccgtcttcggcgaccccatcgggaaaggatttcgctgctgccgccaagggtctaaggcctacctggcccacttgaagacaaagaacgagaacgttggtgctttgcccacttctgctctgccggattatgctgcagcttcctcggtggccgctcattcgccctctcctgccccacccgccccaccaatcccttagcccttttattttttttttgcctaattttaagtcctcgtcctggcattcgcatccctgcttggcctgacccttgcccacatttcgcaccataccccgtccctcacctgctacgaaagttgcaacgcttctctgcacttgggggcaactggaccttaccaaccctggtgaaactgtatttcatacgtaatctgggagacttacattaacgctctgccgtctaaacctcatacctgctctatgagatagcaacaatattgtccctttccagcactgatgaagtccaccagaagtgatggggattccagctccattctgtcacacaccagaaccttaatccttggctccttcaagctggaacgcggctgacttcacctgacccactcccaaactcctattcatctttcaagatcctgttcaaatgtttcttcagtggcatcttccttaataccttccaccgagggacaactagatcccctctgctaggtagcagtgtttcaggagctaaaccctgtgactaagagaggacggcctgccattccctcagctgtgggttctaaaatactttaggaccttgctgggcgccgtggttcatgcctgtaatccccacactttgggagactgaggcgggcggatcacctgaagtcaggagttcgagaccagcctgaccaatatggagaaaacccgtctctactaaaaatacaaaattagccaggcgtggtggcgcatgccagtaatcccagctactcaggaggctggggcaggagaatcgtttgaacccaggaggcggagactgcggtaagccgagatggcgcaattgcactccagcctgggcaacaagagcaaaactccgtctcaaaaaaaaaaagaaagaaaaaaaaagtcaggaccatctggcctttctcaggaatctacctttttgtcacaggttctggtggtagtgagttctctgtccctggagatgccatcagagcctaagtggcactgcagaaacgtgcagccctggagttttggtagttgatgaagattctaagtcaaccctctttagatgggcagaagagttcagccaaatgctcagcccctggaaacaactcctccagtccttcagactacagctctgttgtcccttccttccataaaccttcccacacctccctgactagtcacatccctttattctcactcataaccccaactgctgagtacagatctggcacatagtaggctctcaataattgctgactgggtgaaagaatggataaaaacagctaaccttaggtgagtgacttctgagcctctatttcctgtcttctaaggggatgggtaataatgatagttgctacctagcaggaatgctatgagaattaaacgatgcttgcaaagcaattaaaggtctggcctaataaatggaacctcttactaatgttatttaaagagtggttctaaatctcagatgcatgtcttctgaaagtgcttctgggaggagtcaaataccacaagactgagaaaaacaagggaaatgactgtgctagagaccccagccactgtcctaagcattgacagcccaatgaactaagcactcactatgagtccagcacctactatggggccttttatctaatctctctacatttcttccaacaatcctaagaaatcaatactttctcccccagtttagaaatgtggggacaggttcagaaagatgaaaaagactctgctaccacctgcaggactcaaaagatctggaaaggaatgtgtctaagggtaaggagggatcttagggggctgtggttctgaggccagaggcagcagacagacgggaccagactgggatacagctaagaacaaggcaggcatggccggacatggtggctcacacctgtaatcctagcactttgggaggccgaggcgggtcagattgactgatctcaatcgggagggatgactagaagtgagactaggtggagaggaaggctttcaggtggaaggaacagcatgtgccaaggtcccaaggccagccagatcacggcttggcccatttgaggagctgggagaatctgtggtgaccagagcccactgagagagagaagggtaaagaggaggcagccagagattatcaggtcatgtgggggaacagccagcagggggcagagttcctctagtgacggcagccttgctcttccttgtcctgcctagagtcagagcaaggccgcagttcatcaagaaagggcttggggagggaatcccccctgccggcttcgatttcttttaagtacgctctgtcccgtttttgaatacataggacacacacattacaaaacccacaggatgcaatgaaagttcttactccctggatctccttagaaccaccgtgctgactttttgcattgtttttcagatagtctatgtccataagaacatacacgatatttactttttacactaatctagccccggttttgatgcctcccaggggatctctagttatagaagaagcttatttgtggatgggcacagtggctcatgcctgtaatcccagcactttgggaggccgaggtgggcgggtcacgaggtcaggagtttgagaccagcttggccaacatagtgaaaccctgtctctactaaaaatacaaaaaattagctgggcgtggcggcaggcacctgtaatcccagctacttgggaggctgaggcaggagaattgcttgaagccgggaggcggacattgcagtgagccgagattgcgccactgcactccagcccgggcgacagtgcaagactctgtctcaagaaaaaaaaaaaaaaaaagaagcagcagcagcttatttgtactcagtgtgtgctttgcacagggttctttaattcagctgagagttgtagagcaccgtaccttgtgccaggtcagtggttctcaaaccctaagccccctggagccctggagggtgtgttaaaacacagattgctggactccatgcccagagtttctgattttgtgagtctgtagtggggcctaagaatttgcatttctttttcttttttttttctttgagaaggtctcgctctgtcacccaggctggagtacagtgtcacgatcttggctcactacagcctctgcctcctgggttcaagtgatttttgtgcctcagcctcccaagtagctgggactacaggcatgtgccaccacgcccagctaagttttgttttttgggtttgtttgtttgtttttgagacagagtgtcactcttgcccaggctggagtgcagtggtgccatctcggctcactgcaacctctgcctcccgggttcacaagcgattctcctgccccagcctcccgagtagctgggattataggcatgcaccaccacatcagcctaatttttgtatttttagtagaggcgagttttcaccatgttgcccaggctgggagagtttgcatttttaacaagttatccgatgatgcggaggctgagaccaaggaccacactttgagaaccactgagttcaatgttcatggggagaaactaagaatgtgccctaggaagtcatgctccaacacaaggaaacaaacacaccaacaagaaagacagtcccattgagcaataaattctatgaagaaaatgagaccaagcatggtggctcacacttgtaatcccaacactttgagagactagggtggctggattgcttgagcccgggagtttgagagcctgggcaacacagaagaccccatccctaaaataaatacagaaattagccagcatggtggcacatgcctgtagtccaagttattcagaaggctgagggaggaggatagcttgagctggaaagttgacgatacagtgagctgtattcgcaacacagcactccagcctgggtgacaaaggaagacccagtcaaaaaaaaaaaaggaaatgctgggtgcagtggctcatgcctgtaatctcaacactttcggaggccaaggtgggaggattgcttgagcccagaagttcaagaccagtctaggcaacagagtgagaccccgtctctgcaaaaaaaaaaaaaactttaaattagccaggtgtagtggtgcacacctgtagtttcagctactcaggaggctgaggtgggaggatcacttgagctgggaaggtcaaggctgtagtgagctgggatcgcaccactgcactacggcctgggcaacagagtgagaaaaataaaaatttaaaagccggaagctactggagtttgggagccgacaggagggattccagagggaaggagaaatgaaagacggaagacaggttggggttgctgagccttgggaaggcttacagcagtcaggtccctgtccagaagtgggtgaaatcggagagcgcaagggctcacgtgccctgggaacatccgtctctcatgcgaactttacaaacactccaaaaggaaagcacgagtcccccatcttacagatgaggaaactgaggcacacaggtgaagggacacgcccaaggtcccacgactcacaggacaggacctgagtccgtgagaggagcccacgcgcctcgccctggccccgttgctcctgccggctgcgatcgagacccaccctggcgcgcgggcagggatgcccttgggagagccgcccgacgacggggaggccccgcgaacggcgggcggggcggggcggggtgccccctccgccctagctccgcccctggcggcgctggaagacccgcggggctggcagcagggtgcaggcgcggggcgcggggcaggcagagcgggcgaaggcgcggagctcgcagtgcagcccgcgcttcccagcgtccgtgcccggccgcctgtgcctaccgtgcccgtggcgccatggccgctgccgccctcccgccccggccgctgctccttctgccgctagtgctgctgctgagcggccgccccacgcgcgccgacagtaaggtacgcacgcccctcggacccgcgcggctcggcgggtagcggggcgcgagggggcgctgtggctggggtgcggcccgggagggagcccggggccagggcggaggagccgggagctgagagaccgaacctgggacttctcagcactgaagccgcaggggcaggggccccgagagaggggcgcgtggaggaacaagcgctggagatgtagggatgctagggacccggggcctgaggaaggggcgctgggaccgggtccgattcccggaggggtcgggggatttccccggagtgctggccagactcggggttcgtaggggaagctcctggcaactgttacccaacgactcccaggcttgcagcaagccctgggccacggctttcacggcccgctggggactgggggtcttctctacccgatgaacgcagccgcgctggccactcgcctggcctctgatgttcttgccagggaccgggtgcaccccctggaggactaggtagctccagaagtggtctgagctgttctctgctgtggctaagaggatctgctctggtgtcaagccgacctgggttcagtcgcacatccgcttctcatccgccatcgcccatctgagcctccgtctattcacctgtagatacagggagaatcatgggacccacttcctgcagttgatggtctctagatgcggtgtggtcatgcctgtaaagtacttagcactaggccgggcgcggtggctcacgcctgtaatcccagcactttgggaggccgagacgggcggatcacaaggtcaggagatcgagaccatcctggctaacacggtgaaaccccgtctctactaaaaatacaaaaaaaa

SEQ ID NO: 12267 - DNA, 6000 bp, Homo sapiens
tcacctgtcagcagtgactgcaacattcactccagtaggaccactgtgccagcaataacagcgtcacccgtcagcagtgaccatgaggtccactccactgtgccagcagtgcccacagtctccctccctgcagacagagactggacaacaatgtgctgttgccaactgtttattcagggccctgaacgggtggtgcgtggacatgcaacacactcgggcccacagcagcgtgaccggccgctcccaagccccgggcgcacaaccacagccaggagcagcccctgccaccactgggccaccgtccagggccccacaggaccagccgaaggtgccccgggccgaggccagctgggtcaggtgtacccctagcctggggttgagtgaggagcggcacccccagtatcctgtgtaccccaagttgcccaggaggccgagggggccttgggctccatctgcactggccaccccgtgccaagcatcacagctgcgtgagcaggtttgtgtgtgagcgtgtggcggggcctggttgtccccttcctaaggcgtaactgctataagcatctccacctctcccgctcgggaaaaagccacagagcctggcgatgtcctcaaggggtcccggtggctccagtgcacccagcacacctcagcgcctctggctggcaagccaggagaagaaggtgcgaggccgtgggcgaggtgcctggaggacgcgcatggtgcgtggggagcgccaggctttgatggtggcgtcgtcgctggccgtgagcagcagctcctgctcctggggactgaagaccactgagttgaccacatcctcgtgccgcagcctggccagacagatgttgtagtggcggtcccagatgtagccgtgccggtcctccgccccgctgcagaacagcgcctgggtgagccggccgcccgcccgctgctgcccacacccgccctgcaccacgccgcgccctgcacctggccacgaagtccctgctgacgtccaggaagatgaagaagcactcgtcgttgggcgtgtaggcgcggtgcgcacgcagagcccgcctcacctcccgcatggtcttgaggtcgaacaccagcaggtcaatctcctccgcgattggtggcggctgcatggggtcggccaccaccgcaccgttgggccaggcgcggctgttcacgtacaggtacctgggcgaggggcactgtgctaggtgtgggccgcctgcgggcaccccgcctgggacactggcaagaggcccacctgttgtcgggcgacaggcccatgccgatgatgtgtccgtgtatgtctatgacgtggtccagcgcgtcgaagaaggcatcggagccccggccctcacccagcacgggccctgccgtggtcatctggtgtggcaggatctgcttgatgcctgcagggagggctacggtgagggtccctgtccaatgccccaaggacatcactccagggcagcttcctacctcagtggtgtctctggggctgtgagcaccacagaggtccgtgggcactgcctgctccgggggccccagacctgaatcaggcccgtcggttgcttgctggccagcggccctgcctgcgtttgttttcactgctcatcccacaggccccaggtctgggcttgtgaccccaggggcgagtgaacgatcccagctttgcctgtggacttgcttgctgtctgcccctcaggacccctgcccggcctcccccaagctcctaggaccgaggcgggcagcatggcggcaggggtgtaccgatctggtgtggggagtaggtgaggcagccagtggtgaagatgaggtacttgctcttggcgcctgtggcactgcgctcgggtggcttggtgtggccctgggccagcagctcggccaccttggtctctagcatgcgctccgacagctgtggctgcgcccgcccctccagcacgcggtccagaaagtgccgcaagccctccttggcgtgggcgggggccgggccagccaccacctcctcgttgtcgctgcccaggtcaaagatgcggcagggggacgtggccgggtcaccggcttccagcagcaggtcagggctgtcgaagcggctgcagtcggccaccatcaccgtgcggacggtgctggcattgaggttctggatcttgaacagccgcttcaccacgttgacgttctctgactccacatcctgggggcgggggcacgtgccaggtgggcgccgggcgccaggccccaggagggcagccccgcccctagccccgcacgcacctggaaggcattgttgagccacagcaccgagcaggaggtgatatctccgatgcggtgcaggttccccgagatgaggctggtctcggtgagccaacagccaaacacgtcatagggcttgttccgcacgcgggacagcagcgcgaaggagtctgtggggaggccggggctggacaggctgtcggcgtggggcgggggcagggtcaacccgccgcccgtgctcacctaggctgatgacagcaatctcgccggatgaggagttgtgcggccccaggaacacccccgaggccagcagtagcgagtcgtccttgttgaactgggagaactgggtgtagctccagttgtagggccgcatgtccgcgctgtgcagcagcgagatggtcaggtcgttgctccagatctgttcggcaggggcggctgtagtgatcgcctggccaggtcgcggggcgggggcctgctactacacagccatgaggccccagctctgccagccctactcagaggccaccagggagcagggaccccttccagccactgtcatccactcggggggcattggtatagagcggaggagcctgcccctgaagcaggcggctgtgtgtgggaccctctcctcagcactcagggccaccctgcaccgctcctgatcctctgtggtccctccgctggatgcagggaggctgctgtcacctctggcctgacccacccccccccccaccaccacctggttggaacgcctgggtcctgggacctccgtgctgcggcagagctgggtggggtgtgcaggacacctggccgtcctcaccttcacagtgcagtccttggagcaggacgcgaactggtacccggaatgggagaagctgaggtgcaggacctggtctgtgtgttcccgcagcgtctgcacctccacgcagggcaccgtgtcatacagccgctggaactcctcgtaccaggacatggccgctgcgggtgggcagttgtcagtcctgggcccgggccttcctcgcagtcacggccatgagccgagtgtggccccagcagtcctggcaggccccgtggtgcccctggaacccactagtcatggcataggcctcggctgggggattcaaccctgtagctcacagagacccctgtaccccccaccccccaagtgacccaatgaaccctctggcctccaagctctgaggggcgcctgcgctgtgtcctgacaggcctctatcagggtgtgggggggtgagcatggacacgcggggccgcggggcgggcccccagccaggctgacccccaagcgcaggggcccggggccctggctgcagaacgtgggtaggggccccacacgccactgacctgggtgtcggggcacgtcgcgggccacctggtagtagcggtagaactgctccctccacaggaactcgtcccgcgacacggcctgccattggcggcacaccagcccggcggccagcacgtcggccgggcccaggctcaggaagatctggtagaccaggctgtcggggagcaggggcgtgccgccctcgtccatcgtgacattctgcccaggcggccctgaaacccaccaacggctgccctcagcccaggcccgggaagggaggccgagagcgggcgtcctgttcctccagccccaaccgtcccgccgggagttccacggggctgcgtgtctgcaggggacgcccgggtaccgccgcccaaccaaggacccggcagctccgggcgggccgggccggcccctctccgccgcgtcatcccccggcctcctgcggccggcagcgggcgcccctcagcccgccagggcccggaccgccgcacgcgaggcacggggacaccaggcgccgtccggggacgggcttccgccgagaggaagctcggggcggccaggcagtggcctccgccctgcggccctggagcagctctgcccggcgggctcggggcggacggcggggacgagcgcacgggcggcctcggggctcctgcactcgcccaaggcgggcggggacgacaaggcgggacccccgagggccgcaggcgcactcaccacggccgcctccgcccgctgcgccgcccccgccctgcgcgacccggacccgcttccgctgccgcagccgctcggaccgccgcccccgcccaacggggagcccgccaggcccgacgccacgagccccgaggcatcgatggccgaggaaggcagagcgcgcgggtagcccgcatccgcccctcgtgcgcctgcgccttgggctccggcggcctggccggcttttctttgtgcgcctgcgcgcactcgggcgcattgggaacagcgccccttgtggccagcgggcggcggtcgtgggcggggttgcaggcgaggctcaacgaacgctggttcgggacccgcctccggcgctccctgttgccgggccctgagcaagtggcttcatgaaccccgtgacgttggccatggagataagaccactgggtgatggtttaaggaagataacgtgtaaagggctaaggactgtcggtggaaatcaggggtgcaggagaaatggataaacagccagaggtcaactcggactttgtacataggacatggtgccagggccctgccaggaagtgcagatcgaagctaggctcacgaggaggctggaggtggggggtggggaggcaacggatggacatggacttcctgggctgggctctgtgacagcagagtagactctgtcctgggacttggtggtgctacccttggcctcccacagtcctgccaccctgctgccgccaccatgctgccccctgggactgcgaccctcttgactctgctcctggcagctggctcgctgggccagaagcctcagaggccacgccggcccgcatcccccatcagcaccatccagcccaaggccaattttgatgctcagcaggtagaagttggggggggtagagggaggcaggtagaagttgtgggaggggtagagggagacaggtagaagttgttgcgggggagagggaagcaggtgaagttgtggggggtgtagagggaagcaggtgaggggccctcccacagtgccctcgagttctcccatggtctgcccccagtttgcagggacctggctccttgtggctgtgggctccgcttgccgtttcctgcaggagcagggccaccgggccgaggccaccacactgcatgtggctccccagggcacagccatggctgtcagtaccttccgaaagctgtgagtcccagagcagccctgcaccctaaccccaaccctcctctcagcccccggacttcagccctgctctggcccctgaccccaccccggctgtggcctggactaggattcctggttggggtctcccagcctgtggtgcctcctccccgcccccccagggatgggatctgctggcaggtgcgccagctctatggagacacaggggtcctcggccgcttcctgcttcaaggtgaggcaggggctgcagggcatgtgggtgggggatgacgcagccactgtggctctctgacatggctactgtggctctgccccagcccgagacgcccgaggggctgtgcacgtggttgtcgctgagaccgactaccagagtttcgctgtcctgtacctggagcgggcggggcagctgtcagtgaagctctacggtatgtgggggccagcctctgtgaccaggcaggcgctcaagctctgcacactcactgggccaccccgaggggctgggtgagcccatggg

SEQ ID NO: 12268 - DNA, 6000 bp, Homo sapiens
aagtttctgctgccttttgttcagctatgccctgcccccacaggtggagtctacagaggcaggcaggcctccttgagctgtggtgggctccacccagttggcccttcctggccgctttgtgtacctactcaagcctcagcaatggcagatgccccttccccagcctcgctgctgccttgcagttcaatctcagactgccgtgttagcagtgagcgaggctctgtgggtttgggaccctctgagccaggcacgggatataatctcctggtgtgccatttgctaagactgttggaaaagtgcagtattagagtgggagtgtcctgattttccaggtttcccttgtcacggcttcccttggctaggaaagggaattctgcgaccccttgcgctttccgggtgaggtgatgccccaccctgcttcagctcacactccgtgggctgcatccgctgtccaataagccccagtgagatgaacccagtacctcagttggaaatgcagaaatcacccgtcttctgcgtcactcatgctgggagctgtagactgtagctgttcctatttggccatcttggaacctcctcctattttatggtactaaatacaaaggttcctggaactggaaaccttagtgaatagtttcagcctgatacctgtggcccaggggcacatgaactgaaagcatagtagacttcaggagtcacatctgtagagatgtgtgtggtccaaagaacagatggttagaggaggctgtgcaggctatccctgatttagttagagtccaaacctgttgggaagaactggtcaaccagactagtgcttcaccctcacaaactaaatgaattagtccattgtgcccatgaaagaaagaagtcaatcgaatgatcctggggataattaagaggtttcctctcttccaggacctcagaataatcctggtcaagacttgtactgttaccagtaggaatgcacagccatgatcactaaacaaaagacaattcttaggtcatctctctcatgatgaattcattacttcccctccattttgaaaatacttcatgtttcagggcccttagtctctactttccactttcccagtgacagcatctttcagtggagctttttcccctcattgagaatttcatctatagctaaggtcctttactttggattcaggtgggccttttcagagctccatagccaggtgtgaacatttttttcttgtcttaaaaattacttttgggatgaattttttttaagctaaatgtattagggtattgtttccatctaccatgttactaacttatgtgtaggatagcattggattcctttgtacatagttaggtgatatactatggtcattttcatgccttgatctctctttccatggaattaaacacacccttctgttaggattatgtatatctgtattgtttacattgacctaagttagaaaatgttaaagaaaatatgtacaaaagaaaaagtttcctttcatcattgaatgtgcaaaaccccctgtgcttcttgtggaccaatttgcttgccagtgaaagaatgaaggtaatgaactcaaagaaagaattatgtgttcatctaaaaaatacttcagatagtgtagaacttgtctgagatgatttgctttgataagactttaattttaccaaaactgggatttgctctagtttgccttggatcatcatagtcaagtgcatatctcaccgccaagaacttcacacatttggagtgactacggtggagccatgtgccctagaaatggtcaaactggtttgtgcttagagctgtgggaaaaaatgcattcattcatccattcaacagatattaatgagcatttactatgttccaagcactgttctaggacctgggaatgtggcagtgaactaaacaagaaaaaaaatctctgtccttgtgaattctaaaggaaagagacaggcaaacataaaaataagaaaattatacagtatgttaagaggcaattaactatggaaaacataaattagggtataaggaatgaggagtgccagggaagagggactgcaatttggaatagtatagtcagaacaggtctaatagaaaaggtgacatctgagcaaagacttaaaggaggtaagagagtgagacctgagaatatctagaggaagaaccagacttagcacatgcaaaggccttcaggcagcagcatacctgccatattccaggaataatacaaaggccagtgtggccaagcaacacagtaagtgaggagaaagccagtaggaatgagacaggtaagagaataggtgggagactgtatggggttctaaagccaattgtaaggactttagctttcactctgaaatgctaacccagtggaaggttttaaatgagtggtatgattttgcttttgctttagaaggagcactatgaatacaattttgagatgagattgcaggggaccagagtagaagcagacagagtagttgggaagctgttgcattaatccaagcgagaaatgatagcagcttggaccagggtgatagcagtggaggcggtaagaagagaagtgactggattctggatatattttaaaggtagagccagtgggaattcctgatagccttgatgtggagaatcagaaaaagagagtagtggtgtgcgactcacaggttttgggtgtcaacgactggatatttagtctacttcaggctgtcaggaagttgagttttgaatatgctcagtgtgagatgtctacctgacagtaagtggagatgtccattagacagtttgaacaagtctagatttcagcaaaaaggttgaaaatttgagtttgagatataacatatttggtatttaaagccctgaaacaagatgagatcatcaaggaagtaagaatagcgaagtaaaaactggaccttggggcactccagggtcaaaaggtcaggaaagagagagtggaattgtgaaaaaagtgaccagcaaaggagtcaccagtgaggaaggagaaaaagcaggagaatacagtgtcttgcaagccaacgtaagaatgtaattctactttctgaagtggtaaaccactatgtccaatgttacaaaaatgacaaagactgaaaactgaccactcgagttcgtaatgaggatgtcactggtgagcactgcagaacactgacaggtttttttgctattatttttgagcagatcatgggaaagttggcagctatgccatttcccttaagcatgcatctggatgaaactactgccaatgagatgaaaagttgaagttgactggatgtcaaatgtaacataccagatcaaagacactcccacaatttcaatttcttatttaaaccaattagctttctaattaaaatttacttttgaactgcactgaaatatatgtagtctttagagtatcctaaaggaggttttgatttctacttgttcactgcattcaggaatccccagctagtggagcctatggtggcaccatgccttgttaacaggcaacctgaagtgacagacacagaactctgctctgattttgcttctttggggcagcgtcattccttatatgtgactggttgatgcaggccatatcctgagtcagcccagttttgcagggtgagaactttatagagtaaaacaaacactgggggaagaggttgcacagtgcacacaatttattaagaccaacgatgctttctcccactgttttaataaacttatagaacttctcagatttgtgtttgtagaaataagaaaaagagaatggagaaaggcctcccaggcacatagaggggacttctaaccaattcttgtttggatgtctcgattgccatatttttggaaatgattaattagagttcattgattaaacttcaaactataaagaaaccatttaatttgcatgtattatttgggatctctttatttttccccttgatttggtcaccaatttctgcatgaaataatgagacatatgatactttgtaaagattactttttacatcatatatgtaaaaaataaatcaaaattggcaaatgttggtgtttgcttgggctgccataacaaaatatcatagactaggtggtttaaacaacagaaacttacctctcacagttgtggaggctggaaagtccaacatcaaggtgccagctgtttcagttcctggtgagggctcttttcctagtttgcagacaggcaccatcttgctgtgtgcccacatggcctttcttggtgtgtgcgcctgaagagagagagagaacaagctccctgctgtctcttcttataagggcactattgtcatcaggagggcttcagcctcatgacctcatctagccctaattagctccccagtgccccatctccaattactatcacacaaggggtagggcttcaacatatgaatttggggagacacatacatccattccaaacacaaatgtaacaccaaacaaggcaacaaagttgcatgcaaactttctttgtgtacttttcaaatagaggcagtctaaacttttcatcaagtgatcaaaggttaatacctactagtgaagagtttagggccttttttaaaatgggcctcagatgcacagaattatattaccagtgaattactctagaaaagatctcttgcattactattcatatatagttttacttcagtgacatgatagtgattgtttaacaccaactggctttgagaaggatgtactgacttgtatacatgtccaatttctgtagtttaaatagtcccatcatggcccagttccagctaccaatgtgaaatcacctggagctcggacagaatgcatacaatggactattggaagcccgtacaagttggctgcagcacaccactgccttatctacatgccgattaatcctgtttctgcctgaagccaataaatttaaaaatagcaataaaataaaattagaaaaggaaattggaaaggcaatttaaaaatattacagaatatggctcttcgccatcttttctcttcccgtggagccgtcgccacgaaggtcgagctgtgcagttttagtgggtacaagatctacccgggacaggggaggcactacgccaggaccgacgggaaggttttcgagtttcttaatgcgaaatgcgagtcggcattcctttccaagaggaatccttggcagataaactggactgtcctccacagaaggaagcacaaaaagggagagtcggaagaaattcaaaagaaaagaacccacccagcagtcaaattccagagggccattactggtgcatctcttgctgatataatggccaagaggaatcagaaaccttaagttagaaaggctcaacgagaacaagctatcagggctgctaaggaagcaaaaaaggctaagcaagcatctaaaaagactgcaatggctactgctaaggcacctacaaaggcagcacctaagcaaaagattgtgaagcctgtgaaagtttcagctccccaagttggtggaaaacgctaaactggcagattagatttttaaataaagattggattatatttaaaaaaattacagagtatgttttcaaaactaaaaaaaagtgtcacaaaaagttttaggaattaagtaggacaggaaacaaataatggaatatgcataacatgtgagcatatgtcattatgttatttaattctcacaattctgtagcataggtattaacccttatcttaaaatgatgaatgtaagtttagagattattcattagaccagaatcacataaacaacaaatattatagtcaagacttgaacccagatctacctgactacaaaacccaccctctctttctctccaaaccaacgtctggaagctttaggatattgtccatgaataagtaatataaattctgatgtgttaatcactgtatcagtggcataatactggtatattaattacctcttgtatattaaactgaattataaatcattaaatttaagaaatcattttgttggtctcatttttggaagttattcattc

SEQ ID NO: 12269 - DNA, 6000 bp, Homo sapiens
gctgcgtgtcctgccctggtcagggtgaatgtgctataggactgggcaggggaccaggactgcccctggggacaaggacagagttgggcgagcatgggggtccaagctgcaggttcgaggtttgtatctctgctggcgcagcctcacctccgcctgtttcctgcatccggcctctgttgggccactgggagtctggggacatacagctgccaggagcgggcgtgggggcttcctttcccagcttcctttacagagggagggggcacctgggcatcctgtgccccagagtaggagattaaccccttcctcaccccaaagttgggatcacagtggctttaagtattcgaaaagtgtttggtatgtacctactattggccaagcccctggcagcaggggagaaagctgacacttggtgaatttcttctgtgtcccagtatttcctgtgcagctagtacattccaggccctcccgttactggctctgaagttattctcctttgatctttcctcttgtaacctcaggaaatgtcaacccacttcatgtaactctgagccagatgatccggagggtatatcagctaggcctggaaccaaccagagatggtttccacagccacagaaaaatgactttttaattatctcctgttttgcattatcttgcattgctcctgttaaccatggtttactaagtgataaccttatggaaaaattaaaagcaaaaagcttttgttcaccctgggaggaggtggggagagaacagcctcacttgggagaggctggctccctctgccaaagggaaaaacctcccgggggataagcagcaacttggggtctcagcttccctctgctctcttccctgacaccaatagttctcaaccaggggtgactttgcccccaggggaaagctggcaatagctggagacatttttggttgtcacaacttaagtgggggacaggatgggtgctactgggattctactggttagaggccagagatttggctaaataccctacaatacacaggacagtccccaaaagcaaacagctatctggcaaatgtcaatagtgatgaggctgagaaaatctgtcatacactttgacttctgtcatccctgggatctagttttttgattgtttgtttgtttttttgagacagggtctcactctgtaggccagggtagagtgcagcctcaatcccccaggatcaactgatcctcccaccacagcctcccaagtagctgggactgcaggtacacaccaccacactcagctagttttttgtgttttttgtagagatggggctttaccatgttgctcatgctggtcttaaatttctgggctcaagcgatcctcctgccttggcctcccaaggtgctgggattacaggcatgagccactgcacccagcccctggaatctagtttaaaatgcactgtcatattccatagactttttggtcctcacagtgaccctgccatttagttgttagtatgatgacataatagcccacttttcaggcagggaaactgaggcttggagaagtagctactggcccaaagttacccagccaggaagtagagagcaaggatttgaatccaagggtatccgactcctgcctgctgcctcttggtccctgaacatgagtcacccagggatgactggacgtcaatcacttttaggttatcttttcctctgtaacaatttctacaaatgaaattctggacccataattctgttgctccgcggcttctcagcaaactggtgctttctgcctctgacttctgtctgtcctgctttagctgaaaagtatactcagacgaaagaatcccagatctactagagctttggcgaactgggactgatacctgccaggccccccaggtttccaagtcctctccagtgaacaaggccagcttgggtgacagcccagcaaaggagatccctagatagcgggaggttcacagagcgaggggcattatggttctaagcagtctgtctgctcctggcaggattcagaaccaggagtagatccaggagctggtgtgggagctgctaaaagtaggcaaggagccagagccccagcaaggggagatgaggcagggaaggagaacagccctgggagtaaaggcagggctcagtgctgggagaggagccggcacggcccaggagagaagctggagacttgcagggagcagagattcaccctcagcaaaaccccaaagggttccactccatctacactgtttgaagattttataagcagaagatatttatgtattatgtatacaattttaaagtaattttaaagtagcaaaagattggaagcaacttaagtaaccatccataatgggcaggggtggtggctcacgcctgtaatcccagcactttgcaaggctgtggtgggtggatcacttgaggtcaggagttcaagaccagcctgcccaacatggcgaaatcccgtctctactaaaaatacgaaaattagccaggcatggaggcacgcgcctgtagtcacagctactcaggaggctaggtaggagaatcacttgagcccgggaggaagaggttgtcgcagtgaattgcttgcagtgagccaagatcgcaccactgccctccaagctgggcaacagagtgagactctgtctcaaaaaaaaaagtaaccatcaaaaagggactgggcggctgggtgcagtggctcacacctgtaatcccagcactttgggaggccaaggcgggcggatcacttgaggccaggagttccagaccagcctggcccacatgatgaaaccgtgtctctattaaaaacacaaaaaattagccgggcatgtggtgggtgcctgtagtcccagctactcaaaaaaaaaaaaaagaaagaaagaaaaagaaaaagaaaaaataagggactgggtaaataaattatggcctttaagcaatggtgtactgtgtggccatgagaaggaacggagcactatatatgcagatatgcatcagttcccaaaataggctgttcagcaaaaaagaaaagtggtaaaaatatgtgtgtatgtatacatgtgttcccgtaaatatacagactctctttagaaggatatacaaggaacctataataactgttggcactgagaaataaaggtgggagggtgactttttatagccgttgatatcttttacatttagtaccatgcacatgtattatctatttttttaattccttcactttttaaatttaaaaagttcataaacacagggtctcttggagcctatttttcctgctcatgctcactgcggccgcccctagcccgttcgggggactgggcagcaaagcctaatgaccaaagctggggtgtccctccaggctaggggttcagaggaagctggcccaggaaagacctccaatcctgccccctccgcagagcatcaaggccaacctgagccgggagaatgaggtggtgaaggacagcgtgcgccacctcagtgagcagttgaggcactatgagaatcactctgccatcatgctgggcatcaagaaggagctgtcccgcctgggcctccagctgctgcagaaggatgccgccgccgcccctgccacccctgccacgggcactggtagcaaggcccaggtgaggccccagctctgatcatggggccggagctggctgaacttgggagctcagtgtgccaggacgttggccctgtggatcagctcgatgggggtttggggctgtaagatggggttgaggactggcacagccagagagtccctggcagggtgaggtgcaggggatacctgctgtacagcaagcacagtcagcacagggaatgggggataggcctggggatcctgccaagggggctggtccctaagccaggtgtttggcatccttctcattcccaagcttgaaactagtagggacaagcttgtggaggtggtgccccctgcctggccctcagagaccaggttggctgcagcaaaaccacttctagcctcccctgctgtggctgggttgagcctgctcagagggaggtgggcaatgcctcagggacccctgcagactgatacccattcatccaacccaccctggggtacagaacccctgcagccaatacccaggcactcgacctccaagctcagagcagagtgagcagaggcactggttctgtcactaggcagagccacccatgacagataacacacctgcgtgcaaatgtgataaacgtcctctctgtaggcagatgaactgtgaagctggttctccctctgagcagatcaattagaaggaacaaccacttttgggtgagccggttgcacagaggctcctgcctttgctgggtatgtggcttggcaaatggagtgcagactggattcaaccccattcaggctcctctggccagtcacccttgggcaagacacaagccacaccattgttcacactggccttgtgttttggtgagtggctgaagaagggagctgacatttgtggaattcctactttaaacttgactttctcacagacattgtcagtgaaccccatagtcacctgggaggaggggcgacccctgcccatttggcagatgaggcatggagagaggtcacatggagaggcggtggcggagctgggactggcagccaggtctgcgtgactgccaagcccaccctcttcctctcttcttctccacatctcggtctcctttgctgacattgtgataatgcggccatttgtgtctgcaactgggactgcctagatgccgataaagcagctaggaagcctgtgccttggcccccagctggcttcctgctcattcccgtgccaattccgcaggcgagaatgaagcgtgttttggcaatggtgcagaaggcacccagctactgtacttgccgtatctgctggagcttctgcctaacgatgagtgatgtcacaggccctgtgttcttgtgccaagccagcatcggaggcatttaaataggaagtgaaaataacaaaacacaaaaagttagaaatggcatatcctagaggttgggtgaccaaccctgtcccagtttgcctgggacttgagggtttttccaggatgcagcactttcagtgctaaaactaggaatgttccaggcactctgggatgagttggtcaccttgcctaggtgcctaagaacctctcccctgcccacgtactaagaccaatgagtaagagagacaaggctgggaaggtgagcaggtggaggaggctgcctcccagggagctggtccttctagcctgccccccagggggattggacaggagttgagaagtgggacaggaatctaacctatcaggttggacttcaagcctgcaagggagctaaagagctgggtgaggaaactgaggcaaaccagtcatggatgtagccaccatggtggggtaaaggaaagctgtgactttgtgagtgcttgggacatagggcctggggcaacatggccacctccagtccccacatgctgagcccccaggactccccacaacatttcttctactgtccttcaagtctgagacttctcttccctcccaggacacagctagaggaaaaggcaaggacatcagcaagtatggcagtgtgcagaaaagctttgcagacagaggcctcccaaaacctcccaaggagaagctgcttcaggtggagaagctgagaaaggagagcggcaagggcagtttcctccagcccacagccaagccccgcgccctggcccagcagcaggctgtgatccggggcttcacctactacaaggcaggcaagcaggaggtgaccgaggcggtggcaggtgagtaggaggggaatggggaccctggggagtcagggatggatgcctcctaggaatcccctcatcttctctgcagtgggaccaccccagattcagttccacccattgattacctgttgggtgccctctgctcattcacatatgaggataacaccccactcagggggtcattgggatgagatggcagaaccaacctgcagggccactcag

SEQ ID NO: 12270 - DNA, 6000 bp, Homo sapiens
tctttttattttttaaaaagtaaaataaaaaagaaaaaccaaaaaagaaaaaaatttaaatttttgtactgacaaataaaaattgtatgtgttcatttgtttgacatactgcagaaagaataatttttttaaatgtgtgtatttataatgtacaacataatgctttgatatgtgtacacacagtgaaatggctaaatcaagctaattagcatatatattacctcacattatgtatctttttttgtggcgagaacacttaaaatctactctcttagcaatcaaaattcaagtatacagtatgttgaacttattcctgttgtctaaatgaaattttgaatgctttaagcaacatctcctcaatccccccatccactagtaaccactattctactctctgcttttatgagtttgactttttaactttttaaatttttaatgtttatttttatttatttttattttatttttattttttttgagatggagtctcactctgtcacccggctggagtgcaattgtgtgatcttggctcactgcaacctcctgcagtgattctcctgcctcagcctccagagtagctgggactacaggcacccaccaccgcacccagctaatttttttatttttagtagagatggggtttcaccacattggccaggtttgtctcaaactcctgaccttgtgatccgcccacctcagcctcccaaactgctgggattacaggcatgagccaccgcgcccagccaatttttatttatttattttttttgaggcggtgtcttgctctgttgcctaggttggagtgcagtggtgtgatgacagctcactgcagcctcaatatcccaggctcaagcaatcctcccacctcagcctccccagtagctgggactacaggcgcacaccactatgctcagctaattaaaaaaatttttttttttttttgtagagagaaggtcttgctatgttgcccaggctggtcttcaagtcttgagttcaagtgatcctcccacctcagcctcccaaattgctgggattacaggtgtgagtcactgtgcctggccgagtttgactattttagattccacatataatgaataatataactttgaagatttttattttctccattctcttttttttttttgagaagagtttcactcttgtcgcccagagtgcagtggcatgatctctgctcactgcaacctccgcctcctgggttcaagtgattctcctgtctcagcttcctgagtagctacgattacaggcaccgcctaccatgcccagctaatttttgtatttttagtagagacgggtttcaccatgttgcccgggctggtcttgaactcctaacctcaggtgatccacctgccttggcctcccaaagtgctgggattataggcgtcagccattgcgcctggcctccattctgcttttctgaatgttttatgtttttggtaacgatcaggcattgttttgatgatgaggaaaggggaaagaaggccacaaacaaaatttcaggagagatttaagttagacccagataacattcccagcccgttgctctggctggggggcttgggggtctgtgtaccgatgctgcctgccctcctccccacaggcagagaggcgagctgtgagggcaccctccgggctgtggacccccctgtgaggcaccacagctatgggcgccacgagggagcctggatgaaggaccctgcagctcgagacgacaggatctatgtcaccaactactactatggaaacagcctggtggagttccgcaacctggaaaacttcaagcaaggtcagggacccccggaggtggagagggggctgggtatggacaacctggggaggggtcctcatggggacttggccttccttgccttgtgggtttctatggtataggctggttgagctccagattgttagccaccccaaggagggggttctgggctgagggcactgggctggaggcccagacagaccccatggcaccccggtgtgctagcaccctgccaggaaccagaatgcagcggcaaacaagagagacatggtcctgccctcacaagtgtgacttaccatcaaggggccaatactgagtttccatttgttgaacgcttaccctgtgctgatctcgccccccgtgtatcagctcttggtagctacatacctccaggaggtggggttatcacctgttttataggtgcgcagtgtctcaggtcttagcggagctgcaggtctgggcaggggccaggatggagctgacggcacagggaagggcagaattctgcttatcaaacctggggaatgatgccaggaaggggtcatttagatctagcctgcccttcagaaatgcacagtctggtgggggaggcaaaggcttaaagagacgatttcagtacagcattagagggagcactgaaggggctatgggaacccagcctagagatcagggaagaccttcccaggaaggtgatgctgagctgggccctggaagaagagtaggagtaagccatgcggaagggagagggaagggtgttccaggcagaaggctgagtacatgcagaggcctggcaatgagaggaaacgtgatggcctggggtaggggggatggtgactgagtaagctggggcaggcctggtgagccagataaaggagtttggacttaaccccgagagccatggagtcacaactaaaggcctggaacaggccgggcgtggtggctcacacctgtaatcctagcactttgggaggctgaggtgggctgatcacttcaagtcaggagttcaaaaccagcctggccaacacggtgaaaccccgtctctactaaaaaattaaaaaaaaaaaaaaaattagctgggtgtggtggcaggcgcctgtaatcccagctacttgggaggctaaggcaggagaattgcttgaacctgggaggcagaggttgcagtgagccgagatcgcaccactgcactccagcctggatgacagagagagactctatctcgaaaaatatgaaaaaaataaaggcctggaacaactgaaatccttcctccgctagctcaaaattggccggctttctgctcaagcagcgcacagggtggtggaggaagccagtgataagtatcaagatgaaggcttctgtctggctgctacagacgtgtcctggggggataaaagacaaagggttatgggaggctggaggagaggcccctcactcaggctagggaggtcagtgaaggtttcctagaggaggtgacattggcctggggctctgaaagatgggcaggcattccccaagcagatggcctggggaatggcagtcctaacagaggaacagcagggacgaaggcctggagacaaagaatggggctgatgtcaccctgtgtctaaatcctagctgtgccattccagagctgggcgaccttgatcctctgagcctttttttttttaagcagatgggatgacgatagacctccttcaggagacgcttgtgccataataagatgtcatcccagctccaggcacactgcacatgcttggtatcagtcacttactgggccactgagagcccttggtgggctcaggggatgtgggtgggctggggttgctcgggaggtctggggtgaccatcgccctcgcctgcaggccgctggagtaacatgtacaagctaccctacaactggatcggcacaggccacgtggtgtaccagggcgccttctactacaaccgcgccttcaccaagaacatcatcaagtacgacctacggcagcgcttcgtggcctcctgggcgctgctgcccgacgtggtatatgaggacaccacaccttggaagtggcgcggacactcggacattgactttgccgtggacgagagcggcctgtgggtcatctaccccgccgtggacgaccgcgatgaggcccagcccgaggtgatcgtcctgagtcgcttggaccccggcgatctctccgtgcaccgggagaccacgtggaagacacggctgcggcggaactcctacgggaactgcttcctggtgtgcggcatcctgtatgccgtggacacgtacaaccagcaggaaggccaggtcgcctacgctttcgacacgcacacgggcaccgacgcacgcccccagctgccgttcctcaacgagcacgcctacaccacccagatcgactacaaccccaaggagcgggtgctgtacgcctgggacaatggccaccagctcacctacaccctccacttcgtggtctgagtggagacctgtgctccccggagaggggcagcagtgcgggaggggctttgcacagcagctcctgcaactgacccagtccgcaaatatttattgggggccagcccagggctgggactgggcatgaggtggtcaccaggattgagcttcctcagcacccagtgggtaatacttgcttccacttgcagagcaccgtgccaagcacttcccacacacttacccgtttgattctcctagcacctcccttggaggtagagatcatgaacccatttaacagacgaggagacaggctcagagaggcaccgtcccttgcctaacacctcagttgtgatcaggcaggctgtgctctcaggacagccccattttagggatgaggagacttcaccacgccctcccctccctgccctcccccatctccccggtctcccttgttctctcaacccagtctcccttcccagggccactcagaaccagaggtctttagggccagtgtactggtgtggggtggaggccctggctctgcctgccatcctagggccctgttctggctgagctgttggtggccctgggctttgggccccttagccaatgtccttgtctcttgtctttggccagccccctcagcccagcccaccccacccgctgtccggccacattccaaacctctaccgtcacctagctgctgagcagaaaccgcaccccgagagaaaatcccatcctctgttccaaggcccctgtctgctctatgctcatttttattttctcttattcttcatcagtgccgtcatttgtttctgcagcagcagctgagaaggcagccggcagctctgccagggtggggagctgagctgaggctccctctccacccagaagcactggcgttgttcacatagtcaggccttgggtcccctccctggttcatcccagagcctttgggcctggagtccgccttgtcctttttctctgggctttcaaacccacaacctttacacactcagggatacctccgggtctgccatgaataagaccctaggcccaagtctggtgtggtgccaggatggcacagtttccctcttccttgccagccctgacctggtcactgggcaggctggcccagcagcctgggggctgcagaagacatggtgtgagtagttgggtccaggggaggcatcaggccttcttctggttgcaggagagaaccagagggtgggaacggggagggaagaactgagggtctgcagactggacttttcctggctcgacccaggacttgggttgaggatgcacgggggccaccttgcccggggccactggtggctccccagagcctcagacccacacagcccagaggacgaggccttcaagcctgcccctcttctgcttttttagacagtatttttagagctggaaagaaattttctagcccaactccctgtttcatgaaagagaaaagaggctcagaaaagtttagagagcagctcagtgtcacactgggagctgggcacagccgatctccttccagaagggttctgtctgtatcctttattctccgcacatggaggctgccctacctgggaaggcaccccagcacctgtgaaggacatttactgctcatcctcacctgccccctggcccttgctgccttcattctgtcccaatgccagctccctggatgtctgtatgtttgaataccagttgccatgttaggaaggtcagctgcacagccaagagtgtaagagtgtaaagaaatgcc

SEQ ID NO: 12271 - DNA, 6000 bp, Homo sapiens; identical to SEQ ID NO: 1358

SEQ ID NO: 12272 - DNA, 6000 bp, Homo sapiens
tatgatttaagtttagaggctataaagtaaattttagtacaaataacttcagcccacaaagagattattcccctagggtgaattatagggatgagaaattgataccccccaaataatgataaaaataggagaaggaagaagggaagtgttctaggtgaaattacaacactctggttatgccatagtagacctagaatactgtagatttgcagtggaaactggcaacagatgattatacatgttggaaagaaaataagtattatatcgtgtgactcttcccctaatggaagtgtgaccaaaatagggaagaggaacaatggtcatggtgattcactctggcagtggccagctaagcccatcaaggaacacaatgtttcatgcagagttttaaagaatgcaggggcattgatcgagtagagaaggaagaacctagcatttcagatgaagggacaacatattcagagtttgagaagcctagaacaacatggttcatgaggggaataatcaataatttggtttgctggagcgtaaagtgtacgaagatttgtacagaaatgaagaaatttgaagaaagatacttccagagccagagccagactttagatgctgagctgaccatactagggatggagagccactgactggtattgatcaggggatggcaccattgattgttttggaaagaacacactgatggcagtgttctctggaggcagctggctttgtcatggtcctctgccattaattttgtaggccaacggcaaccctaaatgttagagaacacaatacatttatttccaagcattggaataaaagcaaggagcctgagggacatttaagagcgcttggtcctgtgtttctcaaacttgggtcacttttgtgacatcatcgtgattttctcttatccaaaaatcatttttactctagtttttaaatatttttgatgggctcattttttcacaactccaaaaaggaaaaaaatatatcttcaagcactagtatttgttaaatttgcaggtttagccattccttgtgtattgtatattaatataaacctaactatcaaaagaaaaatgcttatctgggcatttttaggatggtaccatctgagtcccgccctgaaatccttctttaggaaatgctggtcaacctgatgccatcattttccaatgaagaattaatgtgcaaggaaatcagatgatttgcctacatcctctatgtgctaaccatgtgccacagttctaggtgctggggccacatcatctggggcaacatcagatcaacatcattgagctcttttctcccccagtttgtccacttatctagtcatcagttacaaaatcactgccctcaggaacttatattctagtgggggacacagacaaaaaacaaacctacaaagacacagcacaatggcaggtaatgtgagggactatgaggaaaatagggggaagcataggaataaataatgacacggtgtgcttttagataggatggtcaagaaagacctttgagcagtccagatgtgttgagagggtgaattgtggcatatctgaggatggttctatccaggtacaggaatgacaggagcaaagtcctctcaaggagatcttgcctgacatgcttgagaaagagcaaaggcaaactagtgatggtgccatgaaagcctgtctattaagaccactactactccttcctgcttgacacctcaccactcacaccccttttttctataccaagggttgaccagggccagttccagcctactacctgttttattggaacaaaaccatgctcatttgtttacttgttgtttatgggagttcttatgctacaacaagagttgaatattactgcagagactgtatcgccctcaaagagcctaaaatatgtaccatctggcccttagcagaaaacgtttgctaaccactactttatatcatgctctttagttgatgcggttgtcaaatgcgaacatcccagaaaaatactgctttggacatctttataataatgaaatatgcattttccatgttaaaatctcgttactgatggtagaaaatctgatttcactttttcaaaacggagttgtgtaccagtagaaactttttagtattttatcttcaggtgtgatttttctttaacaatgaatgggaagaataaggtatctgccattgcataaagaaaagagtgaggaagaagcacagtaagcattacccttgtggttttctcttgttagtattcaaattacattcactctaaactacatctgaaacaggttgataatataccctgttgggagttgcattgtcaggtgatgcacaagattttatgcagatctatatggacagtgtggcctagagctacaagtctctttggagctaattaccttcttaaatcaaagggtcctaaagataatctacaacctcacatgaaaaagttgctgtgctcacctgggacttcctttttcacttaagcaaaatgcccagggttctggcagcaatatttttgtttttggttaaagttcatggaaagctcctcttattctattctctattgaatagttatttatctttataaagggaaaacaagacaaaaacaagtaagactggagagaatcgggtaaaaaaatacataagcaatatttaaagactccgtatacatgtaactcagtgtttaaagtaattcagatgaagggttggagtagtatctagtgaagaaggaagttgaaaaagatgaactgttaaaatatttcttacattgagaatattatctacaatcaatttatttagtctcacagacccactacagcctactagctcagtgtatctttcaggtgtttccctgcccacccactcagctcccaccttctcatttcccccactttcctcctcttctccctttgtttctctagaaaactcaccctccacattataaaactttcttttccaaatcttccccactgatccctctatctttttacttaattctccttgctttgtctcttcctgagatactcatccgtaataacctcctattatcatatggttaagcttgacagttgaaaaaaaatattttctgactatataaaatatagttttctgactataaacatatggttacaggagaaaactttggaaaacatggaaaagcaaaaagaatagaataaaaattagctacatagttaccaccttaaaaatgtttcctacctatcacctctgtatctatttaaaatttataatttttccacccttactgttttatggcctgcttttttcacatagcaacatgaaaatgtttatttctctacgtaattaagcagtcttttgaaacctgattatcaccaccaaatggcatgaaatactgtttatttgattcatctcctgttgatagacttcatttgtttccactttttctgtattataaataacactgcagtgaacatctctgtgtgctcacatctctgatgattcctttggaataagtgcttgggagtgttacagctgcagagaagcaagtttatatatgtcattaaggctgtcaccaagtgttattctgtagccaactcctgaagacaggcaaagggacttcctccatcatgtgtttaaagctaaaactaagtttgatgtttcatttggttcttatttatcataatgtttccccaactgaaagtcactaggtagtttattgtttctttctctggggaaaccttgcaagttacagaccagaaaatgtgggagtttgaagaagattgaccctggaaagagcagagggctaaaaagatggctcaggaccgaattcaagtttgaaataagtcattcgtttcccagtattatgcttattgagtgtccacatgacacgtactaggcgcattaacagaggattacggaaaaatgaaaaccaaagccccattgccctcacagatttaccatccacaagaaaagggaagagtgccatctcttagcacttatttctgtgtttgggaagagaaaagtcctttggagatgaagtgctcatatactcactttttaaaaagtatttttgccttcttgaaatttaagctcttttatctcccagtttgttcacttatccaatcaagaatactattatctaaaatattcactcttggatgatatatgaaagagccctttctatgtgactgaataccagctggaatctctccattgggccaccccaaataaacatatcagggcatcacaacttttgatctgcatccataggccaccgtggtcacagctcacctctttttaataaggaagcaggactgtaggtttctaatcatacatttgcaattgctagaggggcagcaggataagaagtatgatcggagaagttttattattgacattttagaagttctcgaaggtccccgacaaactccaacttcattcttcttaggcccatgttcagggaccaaaatattctactgaaacattcagagattttagcagtttctctttaaagaaatgctaccattccattctttggggatggtggaacaatgccgcttgtgtgctccaaccactaggatcattcatacactgtttctttagaaggatttgctttccaaagttgaactttcagaactcagaacaccttatcacactttcacaagctttctctctgaaaatggaaaaagaaaaagggagggagggcgggggagcctgttaggacctgtgccagttaaatccgatctctccggggatttgtttttcttctggcgtcagattagatgttcaaatcaagcagtgtttgagggctgggagggaatgtccatgggattcttagtgaggctaatcccgaagcagcacattccaaggggctaatctgcccaagttcattgcttacttgaaacgtctcttgggggaagagccgaacaagtgactttttttttccagtgggcggtcataagagcattattaacggaatgaccagccctagctgcagcaaaatgaaagcaacaggagctgctccggggactgcttttgccagtacccagaatcagtgctcaggtaaaatgatttcagctaacttttctcttgttcaacttctcaatattggatctggggacctagaggaagaccaaagatcaacaccgagggaggcttggagggaaagggcaaaacgaacttatgaatttagtacctttgggttggggatgtttgttctgatgaagacagggtatacatttgaaacaagagagggtgacaatgagaagcattgtgaaacttttcttgtaatttgttcctataaagttagtggaccctttttcctaatcttgcaaatactggtctgagtggttgtccttctgttaagctgccctgctgaagaggagattgcaatagcactttccaaggctttttggaaatgggtttaatataccctgtgtgtgtgtatgtgcttgtaaatcttcctgcctggagaacttgattcgatagctggtggggaggacatagtaagaagattcaaagtagtttggggactaacatttgtagcaaagactttgtgaaaaacattgaatcctgcttaaatgaaatgacttaattttttaaagcaatatttacagacttgtttttattattttgatgctttattgactgtatatttaactttcaaaattagtagttgctttattctttgagggtaatcattatactttgttcaatgtgagtgtcctcatttctgtcttgaatatgatgtcttttaattattagcctttgaaaaacacttccctattacacatcacacatgactgataatgcagaaagacaagaaagaaaataaccagcccttcacaaactcagtcatggttatgtgaccattctacctttagaaaagaatatacagagaggttttctgggggccatagaagccatcttttctaagcgtgcatgagacttccaaagcatatttaaaaagaaaagattttaagacatgatgtctgttaaagttttgtattaaagaagaattgaagggtca

SEQ ID NO: 12273 - DNA, 6000 bp, Homo sapiens
gggtatggagtgatgtaagcacccttgtggccaccaccactgggactgctctgggtcagaccagaagccagcacagcactgggtcttgcccgagtcccactgtaaccactacctggctactgcttatgtttactcatgatcctagggctgtgcaatcagcaggtgatgaagccagccagggttgtgtccttcctttcagggtggtgaattcccccaggccttgggtgggtccagagatgctgactggcagctagagactagagtcgaaaaccttagaagtttacctgttctattctactgtggctaagctgggcctcaaaccatgagacacagcccttctcattcttccttcaacttgccacaggcagaggagcttcatcccatggccaccaccaccacaagcccatgaggagtattgccaggttactgctgatgttcacttaaggcccaaggtctctgaagtcagcttgtggtgaacgctgccaggcctgggactcatacttcagggcagtgggctctcctctggtccagggcaggtccagaaatgctgtccaagagccaaggtctggaattagggaccccaagagcctgcctggtgctcaaccctactgtggctagctggtgcctaaggtacaagacaaagtcccctttacttttccctctgcttttctcaagtagatggagtctctcactgtagctaccagagctgggaatgtgctggatctcacctgaagccagcacctctcagagtctcacccaaggtccacggcatactgcctaggtatcactgctggctactcaggacccaaacactctttagccagcaggtgatggttcctgccaggattgggtccctcccttcaagggagtgggttcctttctggcccagggtgtgtctggaaatgtcatctgggacctagggcctggaatgggggcctcatgactctgaccggtgccctgtcttactgtggttgagctggtatccaaggtgcaagacaaagccctctttactcttccttctcctctcctcaagtggaagaaggaggtctcttttggcaggagctgtgttgcctggggatgggggaggggtggcacaagcacccccttagctgtcctagcttgtgtctcagtaggtaacacgccccccaagtccacttggtctgagcccagctcagcactaggatttacagttcccgtggcctaaactgcctttcaagaatatttagagcctcagagcactccagtctgtggtgtggcgaggcttgctggaacttgagttctgactgctgggatggatgattcctctctatctagagctggtctaaatgttctctcagtgggcaggcgttggctgagttcagcctggttttgctttctgctgtgacaaggcagcactgagttcaatgcaaagcctcacaaccgctgctttctccctctcccaatcacacagatttctccatgccaagtggctgctgtggatgggtggggaaggggtagcatccacaattcaatactgactttcctcttatagactgttggtaggagtgtaaattagttcagccattgtggaaagcagtgtggtggttcctcaaagagctaaaaacagaacaatcactaaacccagcaaccccattactgggtatatacccaaagaaacataaattgttgtgccataaagacacatgcacacgtatgttcactccagcattattcacaatagcaaagacatagaatcaacctaaatctcatcaatggcagattggatttaaaaagtgtggtacatatacaccggggaataccatacagccataaaaaagaacaagatcatatattttgcaagaaatggatggagctggaggccattatccttagcaaatgcaggaacagaaaaccagatatggcatgttctcacttacaagctcactgtgagctaaatgatgagaacacatggacacaaagagggaagaacagaccctagggcctccttgagagtggagggtgggatgagggagaggatcagaaaaaataactattggctattgttatgacatgactttacctataaaacaaacctgcactgtacccctgaacctaaaataaaagttaaaaataaaaaagactctctttcctacctcttcagtgcctcttccagtaatatgaagttaaaaccagttactgtgagtgctcacctgatttttggttcttagaaaggtgctttttttgtgcgtacatagttgttgaatttggttttcctacaaaggggatgatcggggccttctattccaccttcttgctccacctcttcccagtttcatttttgattgttcatcttcctcttataaacttgagctacttgtagactggacaatgtcttattcatctttgttttcctggtgcccagcatgatgcctgacaaacagtctatgttcaggaaatatttgttggcctgaatcaaaccacactagactactaatgaatattttaaaatttaattttcacagctaccctgggcataggtatgtttgtgcccagaatagttttctttttatttatttattttttgagatatggtcttactctgttgcccagtctggagtgcagtggtgccatcatagctcactgcagccccgacctcctgggctcaagcaatcctctcacctcagccatccaagtagctggcaccacaagtgtaagccaccacgcgtggctaatttttgttttttttttttgtacagatggggttttgccatgttgaccaggctggtctcgaaatcatgagttcaagtgattctcctgcctcggcctccctaaatgctgggattacaggcatgagccaccatgcctggacaagaagttttatatacaagtttgacaactgattaaagtgcttgtgaaagatacagattcctgggccccaccctataaatcctgatacaagagatctgggtagggtggttggagcctgggaatctgcacttttgacaaatgcctcagatgtttctgatacagcttgggaaccaaaggcagcttgtaaactagtacattcaatgctttaagcacttcacattgcccttgtatttcaggctctaaatgccttgaagcttgatctgaaaagaatatatgatcatcctaacatgtaggtttaccaaagatggtaaactagaagatggtagacttcttacaaatcttgagttccaaatggctactcttcttggtgggtctgaagatttctgagaactctctgacccagtcactgtaagagacctaacaaagaaattgtatggaagacagagatcgagaaggatttacttgccttagaagagctttcagaacctgttaactgtttacagattaacgctttaaagaagatgggttaaggagaggaaaggagattaaatgtgtttatagaagaacaacaaatgcctagcacttagggaggctgaagtgggtggattgcttgagttcagaagttcgagaccagcctgggcaacatggtgaaactccgtatctacaaaaattacaaaaattagccaggtgtagtggcttgcacatgtagtcctagctacttgcgggggctgaggctggaggattgcttgagcccaggaggtggaggttgcagtgagccgacatagtgccactgcactccagcccggtgacagagcgagaccctggctcaacaacaacagcaacaacaacaaaaagaaaaacaacaaaatgccaatacacatatgagagattacaattttccaataaacaaagaaatgcttattaaaaccacattgagaaatgaggggaaaaaacctgtaaactgtctgcaaatgtgaattcaccaggcaaaaattcataataaactaaatgagtaggtgtccctaattttaagtcggttgtcagggatgaatgactagcattgttaattacacttgtaataatgtgagcatcattttgcctgtgtgctttgtgccacctctgccaacaccctgggatccaccccaaatcactgaccacaaccttaatcaagactgcctaggccgggcatggtggctcacgcctgtaatcctagcactctggaaggctgaggcatgaagatcgcttgagtccagagtttgagaccagcctgggcaacatagtgagaccccatttctaaaataaataaataaataaataaataaataaataaataaataaataaaattagccaggcactgtggtgtgtgcctgtagtcccaactactctctggagcctgaagtggaaggatcacttgagcctgggaggtcaaggatgcagtgagccatgatcctgccactgcactccagcctgggcaacagagcaagactccatctctaaaaaaagaagaaagaaagaaagagagaaagaaagaaagaaagaaagaaagaaagaaagaaagaaagaaagaaagaaagagaagatgcctatccagaggaatccaccaaaacaaaacaaaacaaacaaaaaaaatgaaaaaaaaaccagaaataacaaaacatttgtattgtatgttacacatgaagcacattaagtgatttcctttgttcattgtaaccttgtgagggaactggatttttgtccctattattcccattgcatagataaataaactgaggcttgacatgcccaataagtcacaggtagtaaaagcagtgcgttagcttaaatctctgatctcctcacgccccacactgactcaacagtaacaatacattactacaaaggatgtctgtgatgacagtggccatcccatttgatcctcgttattcttcttttatcgaaggaaactgagagtcaccttcttttctaggcagttaggtaactgaagccgaaaggtattgtgacagatccactgggctgtaaaaggcagcgtgtggaggtggagcccagagtttctgcctccacagttaaaagctcagacagggctttgggagcagggcctgcaaatcaaagatgaaagaacaacctgtcttggagcgcttgcaggtaagctcaggctgctcgactggcggggaacaaggaccttaggcgattcgctagatctgcgcccccggccttagatagaagtgggtggggccagggacactacatctaacgaggatctagaatagctaggatttatgaaataccggctttcaagttctctggtctccacccaaagatgattatcctatctaaggtagtgtacgctactacagggcaggtcccgcagcccccgtttcaagagctgggatgcggccatagcggaggtggtgtcagagcggaaacctagcgggggtcgggggttcagctcggggcggtgggaaacaccccgggagaggaggcagctctgattccgctccgggccggagggagaggagttcggaggtggcttgagctgagaatccggaggagagaaggcgcgttttgagctgccacgggcacagatctcagacccggacgctgactagccgggggtcgcggctttccgaggcggctggagaagtgcccagacggccgtccctccgcgcccctgcgcgtccccgtgcgcccagtgttccccgtgcaggagtcccggagcgatgacagcgccggttacggtaaacacccgccccgccgcagtccgcttccttccccaacgcggcgccgcccggacttgcaacctcaggagtccccgctggctcctctccaccgctggcatatggcgcaacaggaagttctgggggcttggagagggagggtgctcctggctgttgggagagcactggagacgcttgggagagtagtggagatcctggtaatttcttggtctcgcctattttgtctggactttctcacactgtgtatgaaaaataagtataattgagcacattgtatttcaggaatagtccaggcagcttagcaaacgttagctcatttcagcctgctctgataagaacatatgctctggagccaggtagcctgaattagcatcccagctgcatcactacctgtgattttgggcgagttaacat

SEQ ID NO: 12274 - DNA, 6000 bp, Homo sapiens
agatgcaaggcataaaagatccatgaaggcaaataagcttttagaaaatttccaaattcttttggctgcagttataaaactagttctgcaaattaagcacaaaaaagtccttaaaaatgtcccagtctgtgatgggccaagttttattccatagatcatttggataaacactaaattgaaatgattatcacacacagaagaagagagtgattgagagagactgccatattagcttctccaatctctatttgagttccctttagtatgtggtttagaaaggaaatcaggaaatccaaacactcagctaataatcctggtggatgttgaaaaggccaagcacttgtcacagctgatgactgactcccctgacaataagtagattaaggataccataatgtgctttttcatagctaaaaggttaacaactattggcagttcctaatttacagataggtaatagccctggcctgaatttggtttcttgggtgtaggggattatgtgatgcaaaagaaaagacagtatcctttgtgttttccagcataaggtcaaagcataggcaatattttgaattggacaaaacagactagatttttccttcctctttgtcaccctatttccttagtttctaaggtcccttttttcctgtttccagtttctcagtctgcctagaaattattcagggaagtttcacctggatcctatatacaatgtgcctggcatgtagaagttacttaagataaaagctctagagtaatgaagatttgttgcacaccttctgaaattcttccttaagatctcttgtgttcccaaaatcctttataatgcaaaataaacttctttcccttctcttccccccaaaaatcccaacaggatattaattttacaccaatcaggataaaataatttatactaatctgtgactcactgatagtcccaaaatcatgagagttatttgcatttttaaaagagaataattgctgccaaaattaatgcctaattagtagaatgtagaacagtgttacaaagtattgagtgaatataggcttatttttaattgagggaatgagaaaaaattattaggctttggacagatgagccctcagggtctgctcccctaaactgacctaatttttttctagattcattcccttctaaaattctgctaccatagattctctaagagctccatatattttttgtttgtttgcttttatccaggaagattcacatgacaacaaggtccttggcaatagaaacaaaggagccaatgtggaagacagcataatttgagactctggatatgcactagctaggggagaacacatttttcatctgaatattgataaaaatctacataattactattgcaaaaaaaaaaaaagggggagacccagaattggggacatgccatttaatattatggccatttacaaaaacaaagatagatgtgaatgcaacttgtaataagtcaaggtataggaaaaaacacaagatagttttccagactcaccagaagcctcccattcccgtggaacttgaaaagattcacaggaggctgcatactgttgcatctatacagacaactgttaagatctgtcgccacaaccacagttcagaggaggaatcttcagctgtaagaggttaaatgtcatatccataggcgaaacaatactgaaaagagaatctaactcctaattcccacagcatcctttactgtagcctttccttggctaccaccatagcaatatatctcagcttttagtccatccattgctggtaccagaaaacacagatgtgaacaaaagcacatgttaaattgcgagcatttggatttgttctggtttgactctccaacatgggttcttagatcagtagttctcattctgagtcagataataatttttaaaaagcttcatctctgagtaagccaattttgaaatttgactgattttagctaccaaccacacagctgggaagaacttaaaatattgaagccacaatgctactcactatctaatgattttgtgcagataactcaacttttctcaaattcaatgtccttttctttagaatggggatgatcacacaaacctattgaggttgatttctatgatttgacagtagtgttatttttcatgtggcttattgcaatagcctcatctccttttctcatcttctggcgtccactcttaaccactgttcatctatcagtaacaaaacaactgtagcgatcccgttaaagtattaattctatcactcttctgccctccactcttaaccactgttcatctatcagtaacaaaacaactgtagcgatcccgttaaagtattaattctatcactcttctgcccaatgtccctgccttcatgccttctcatctcattcagagtagatgccaaagttcatttgcttacattgtctgccacctcttcattgcctctctgacctgacctgccaccactttcaccctggatcattttgctccggccactccagacccctcattattctttaaaccttccagaaacactcggggccttggcatgtagtttcccctgcttgggaattcttgcctagagtattcacatgaatcactcccttacctccctttacatctttattcaaaagctgtcttctccgagaggtcttccctggctttctcacctaaaattacaacccaacctcttcctaatacttcctctacactgctttctttttccacttagcacaaactaacataccctacatttatttacttatttgtatattttattgtctctttcacactagaatataagctctatgttagcattttgttcacttattgactatgtgatgttgtggaaaggagaaaactcaacttttctagagtttattcatctgtttccaggatggtcctacaacaatgattgacacatactaggagcttaataattggttgttgaatttaagtgaactttgaaaatgatgacccttgacacatgaaaaaggtggacaagaaggagaaagggaaaaggaaaaagaagatttggggaaaggagagagaacaattttgtcagatatgctcagaccaccatgatatggacaaagaaaaccaagcagcaaaaggaaaacaggaaggacaccagtgaattataatgggaaagcccggaaagaaacaaaaggaagcccaagaagggagagccattcttcattgttcactcagtattcaccaggtttaagtagagttttatcacgacctggtgcagtattatcctcagaaacttgggaaggtcttctgtgtaagagcagttcagttattccctcaaggcagtcatgaacttgtgaaaaacctaatgcatatagagtgattctaggatgctattaatgatcagatcaaactattctccatcatcatgtttttcttgagaacctgatctgaacataagtgtaatgccaaggactaaaagtacaaggactaagcatggtcataacctagaaagttatacattatattcttcaaaacacacactcgagtacagacaaatatacctccttactacacaattagtagatacccaatcttcctgcaatgcaaggacctcagacttctacacttttattattcagatctcaatcagtggaatcctgtggatcaagggggaatttccagcacactagaggcagcttttctccattcatgggatgttctctcaggcttcaggagggtttctttccctcctcattcagcccactactatgattttcactttttttctcatgggagacttttcttctctagcaacccagtcttgcaaaaacgatgccgaatgtctggtaaatttgttctgagatacctttaaagatctgggctggggaaaacagcattcactttgcaagcttcttgggatttttacttaactagagtctcttcttcccaggatttaaaacatgatggaaactttagctcatgaatcaaaacaaccctccagagctaaaagccagctgtatttgcataacaatttagcagatccaaacagcagggcaaggtcgggtgaaataagttgccaaggtcatggtcatgaagtagtattagactcagaaaggctgatccccagtgcttgctccaccccatggatctctcctaccctccttctaaacgatactgtgggataaaataaaattaatctactgtatatgtgcaaaccacaggcctgcccttaactctttccttaccttctagtttcagattattcaaatcatggaggaaaagattagatcacaacacgttgacttcactgtattaccatacaaatgaaataacttagtacaaactgtgatctggggactcttgatctaaactgggaactgctgttgactgcattttaaactctaaaagtattttgaaactctttaatttcttgaactgaaaaaattgctttgaattcactttgttttaattctgagaacctaaaaacagggattctttaaaaaaaaaatgcaaaggctcacatgccagaaagaaagaagctgaggagataaaaatgtgtaaataattcttactttaatacccttagctagaaaaaccttaaaagcgacacatccagaagctcgttaagtcacagcctctttgaacctatttcagtgaaccaccgaatttcagatccctcaggtgcgactctgaattcagaattctcaccggctcatagtcctattttccttcttaggttttagggaattttgcaaactatgacgcccagcctttgaggggagaggactttccaggggcgcgggatgtgccactcgggaatctcaccaacagtgggcgtttagcgcagccaagcgacaggcaggcgccagggctcagcaacagggaggcgccggctgaggcggggagaactttggcgctcggagcagagccaccctttgctggccagtcgcgttgctcctccgaggaagcaagcggcggtggcgactcggtggaaaaataacgaaagaaaggcagagaggaagtagcgagagaagagagaaaatgaagtcggcgctgggggagcctgcaggagggtggccaacagtggaggaaggtggatttggcttcttttccgcaccccgggcgtgaaagccctctccaacgcgaccccaggaaataagtgggtctcgcctgggcagaaaaggaaaagaatccaggcgagagcgcgtcgctcctctgtcactgctgcccccgaggaactccggctgcttctcatcccggccgcctcgcggggccggacgcagtgcccgaggcgccctgcagatggggcgggcagggaacgggcgctccagctgcgggtgacaggcgccggcccgcccgcctgcctgctcagcgcagtgaccgggcgggcagaggatgccaggcggagggacctgggagcgggatctgagactgccggaggcgcgctacgctccaacttgcatggcctagagaccgctccagctcctgggaccgcttcaccgagtggagtgaagctgcgcgcgggacctggaggcggagacctcaggcagcggctgcagaggggcgagccgggcgcaggagggggcgcgctttctccctgcgggtctcagtaatgaggagactgagtttgtggtggctgctgagcagggtctgtctgctgttgccgccgccctgcgcactggtgctggccggggtgcccagctcctcctcgcacccgcagccctgccagatcctcaagcgcatcgggcacgcggtgagggtgggcgcggtgcacttgcagccctggaccaccgccccccgcgcggccagccgcgctccggacgacagccgagcaggagcccagagggatgagccggagccagggactaggcggtccccggcgccctcgccgggcgcacgctggttggggagcaccctgcatggccgggggccgccgggctcccgtaagcccggggagggcgccagggcggaggccctgtggccacgggacgccctcctatttgccgtggacaacctgaaccgcgtgga

SEQ ID NO: 12275 - DNA, 6000 bp, Homo sapiens
ctgctgaccgcgctccccccttgctggagctcgcccatgttggtcacctcacacctggccacctgagttggcagggccctgggcaggtcaccacctgcggaggccaagccgggcctccaggccacaccctcccgaggacatgccagggggctttgggtctgctgctcccagggtcacccagccctggagagcgggccccaggagacactaaccgagtcccgctggacgctcccgtcccagggtctggcacacctgcttgaatctgactcgacaacgtcaactgtaaaacatcctcctgcaacgagtgccacatttccttggaggaagcaagaatctgaaatttaagtaaacatgtaaaacaaagacagagacagtcagctgagaaacccaagacacggtgacaagactgctaccccagggcctggagggtcactgtgagctcggtccccgcttggaacttgggggcgagagtacaggttgacaacgaggctgaggttccacccccgaaaggccccaccattcctgaatcaggctgtgcatacccaagggcctcactgcaaatgctgggacccctgacctcacagatgacaacacagtttcattccccacacaggtcctcagccccagcactcacggggtcagccagagcccccagagccttggagaggggagaggagcctctctcttggagacgtgcagagaaatgatctagggggtgctcagccagggaggatcaggagaccccaactctcccccaaattggcacggagcatctcggcaacccatcaatgaacaggactcaggggcacaggagggctggaaaggaaggcttgctcctttccaggaacagaataacaacaggtaaggcttgaacaaatcaggaagtgccctgccgaaaacgtggcctgctctagccgtggagacccagagggctgaaggagacggggatgacaggggacacactgcctgcaaggtggtgagatgtcccatcaccgtgatgccggaggactgacggcgtctacccttacaactcacagcgtgctgctcctgactgggccccagggcgctggcaagccgcaggaactgcacagacatctccaggaccgaggccatgtcctcccgccggccatcgaactggggcagcagggcccgcagacgctcacagctcaacgacatccgcttcctggttccggtcaagaaacaaatacctctgggccctcctgccctccccgagaagggacagcaactgctagaacctgccagatagaccctgggcgcttgtcaggcagagggggctacaagatgactcagagctgcccccgtggtctgaagccccgagatccacatcagagcacagcctgggcctgacccctggacctcggcgacaggctgtccagcccaggcccaaaccatggctgctttgcggtgtggaaaagacagcgagggtcagaggcagtcagaagcacagagggtcacaggtgcacagcctcaagaggccaaggcttcaggataaagaggggctgcaggatgttccccaacagggcttttctggtttacttggagatgtgcagtctgtccttctcctgggcacaggccacgagcccctcccagctgcctgacacctggtggcagccccgaacataatctcacccgctccacccctttacagcgccctcacccctgggaggcaccaccactcacctgcgctccctctcgctgatcacgttccgccgaaggcaggagctgggaccctcggccaccgtaggggccttgggcgggcccgagccccgggccgagtcctcgcagcaggagagggcaccagacagggagccgctgccgagaaagccaagagcaccgggccctgagaaccccagaaaaggccaccaggagtcccagatgccagaatgggcgtctttggggtgcgggtggaagccaagactgggtcacgtagggacacggcccggccctctctgcaccccttcccctctcccagggtccagggctccgccccaggaggcccaggatgggtggagcccagcaacttgcggaagaacccctgggtacaggccttgggcccccaaccccttggccgccagcccaattcctcacttgcatcccctgacggtagggattctggagacctccgggtagggctcggagcaccgggacgccatgaactcgcagctgcggagcgaccccacgcgcacggccccttccgcaggcagccccgccccctcacgtgtgctctgcccacctgccacgtgctttccacctagcccaccccacccccacttgcaatccgcccccatagcgcatgcgctctagccctccccacgcagccagcccggggcccacgtgacccgcgttcctgcaaagaaggtgctggaaagggactcggggggtccacccactctatgcccccgcaggacgccaggggaaggggccccagcccaggtggccctgcctctacccttaccttcccgggggtcgcctcggttcccacttatgcggtggtctcggtgcccttgggcactttggagatgcgggctctgcccttaggagcccagcccctggtgggagtgggcgggctgggctgagttgtttagcccaggcctgggggacccagggacacagggagggggaagggtacccgcctgctccccagtcgcccacgcctccattttcccccaaatctagtacgcttgcagacgctgcgcctcagggtagggtcaccatccacacttctgggtcgcccagaaccaggggcatcttgtccccaccccaggccaccatcgtccgtgctcttcctcccgctgagctctgccgggcaccctcggaaccgtctgtcccttcacctggccctgcccaagcaccatccccgctttatgccctggggccccagctcgacccctcacctcacactctcaacaggtttctgcgggatcgcgggggtcctgcccatccaaattcagaaagctccggcgccaggtgtttgctcacctccccgctgaactccaggagccgccctgcgctgggcttgagtcccccagtacatacttttggggggatgacggagggaagggggaggtggagacccttcctctttcacggaggttgcggggggccctcagggaagcagaggggacgagggtggggggtgaggctggactgttgggaggacatccctggcctggctcgtgctgaggtcgtagcgggaggaggtggggtgggtggcaggggctctcctcccgagaggggaggcaagaaggagcccgggcaggtgccaccacacggggacgtctgtccggggtgccccagtctcctgtggagaaggcgcggctctgggcctcgggctggcatcctggactttgggccaaagatgggtgaagggtgtttggagcagagggaggttatgtaatataaggtggtgtctccatccctgctccgcccagccttggctgcaggtcagacatggaggaggacggggttggagaggagggcaaaagctctcggggacctgggcccctctcccggccctgcccctggccagggagggatggacgggctggcgatctggggctcctcagtggcagagtggggccaagtttttgtttccctaaagccctcggaatgtcatcaaacctgtgactctcctgccgttgacaacacgtgtaattactgctaattaatcacagatgcagatggtgcggcctctcagttttttctgagttccccaggcaggagggcgttggcagaaaggccaccatcttgccccggcggcacccgcccaggggtggtgggaccccggcagcagcaccggccaatctagggacctgaggaaaaacccccaagatgcccacgagctgtgtggcgggggcacaggctgaacctctgctggggacttagcatcctagacttccccgagtgttccccacccacccctcaaaagcatctgtgttcagcctgctgcctcctggagaaacagggaaggaccctctggagagacactggggaggccagggaccacaaagtacatggcatgcgccctccaaatggacctggccctccccctggccctcgtgggcacagtcctggcttagtgaggggcctggtccaccctgcaaaccaacaaagctctggggacagaaatcgcagttctccagagctctgtgtgaggctgagccagggtgacgcatgtgtaacagtgtgagcacgtgcacgggaaagggggcccgcagggggaccctctgcttcctagtctttggcctgcagcatcttaagttggggcccctccccacccgtctaaaggtgctgtgtgtgcccgtctgggtgagagcacagggcggggtgcagtcatccccctcccccaggccaagcccaggatgtggcgcccacccacagatgccgcagcctgcggggggtgtgggggcgggggggcggggagtcgtcttgaatctggcttgtgttcaatgaccagtgttgaccacggcagagcagcacaagcgggaggtgctgacggtccctgggcgcagcggctggacgctggcggtccgagcagcgcatgtgccctgctgcccgccaaggacccagagccccctgagcccccgcccaccacggagccctcccaggggtgtagggcccggtggcggcgcgcttgggcttttctagccattgacgaaccccgtcctgtttttcggagttttgagggctcagagggccgcggcgggagcggatcgccctccctaccccgcacccccgtcccagcctgggccagagccgccgcgggtcccggcgcggccggcagggggcgcgcgcggacagacgcctgcacccgaccctggaactggcgtcttttcctcgctaatctgcgaggaaaaaaaaaatgtttttcagggcaacgcgagggaagaaggtggcggctcccactcgcttctccctcgggtcgggtccgagctgccaggccgcatgccactccctgacggggcgcggaccccggggggcgtctgccgggaggcgcgcggcgggggctacaccaaccggaccttcgagtttgacgacggccaatgcgcccccaggtacagtctgctgcgccctccccacgcggggaggccccggtctaacctaagacccccaagttccccctcaggctcccgcaccctccaggacccgccattcccagggccatccaacttccccaggacccgcgagtgccctcccaaccaccttggggaacaggggcgcccctcagggtgggccgcactaatcagcaggtgccgaggcagcagcgtccgtccccatctgtcctcgacctggtaagaagctggggggagcggccgtggctacatgggggtcctgagcatctcccaggtgtggggagtggcagggaggctgggggcggtgcagggccttccatctcccccagcccctgccccaccccagcttggggaggaaggttccatccttcttgtgtggcatggcagtgctcggccagggtggggtgcccggcgaggttaccccacacagtagggggtttccagagcaaccttccaaggaagagtccccagtgggaagtgggctaagtggctgtcagatgagggcgggagtcctgggttctggtcactcctcgttccccgctggcctatccctgggaggagagggccagttgagaatggcattcaggtgacctggagctagctgttccctgtgcagtgtcctgggatgccatgcgtctgccgtccacccagtgaccagtgcagaggcacggaccggcagctgagtgggacagtcctgagcggaggttgccccagggtccaggttccccatcctctcccccatccctcagctcttgaaaacaggcaagtctgcccctcaccctgtccccagagccagactccagggaaccctgggcagagccggtcactgccttgggcgaacccctccccaccaggacagagccctttcttctggatcctgcccagtctcaggctgtcctgaggccag

SEQ ID NO: 12276 - DNA, 6000 bp, Homo sapiens
taaaaaggattatacatcgtaaccaagtgggatttatttcaggaacattttgaggatttttgttgttgggttttttgttttgctttgttttgtttttgagacggagtctcgctctgtcgcccaggctggagtgcagtggcgcgatctcggctcactgaaacctctgccccaccctggattcaagtgattcttgagcctcagcctcctgagtagctaccacacctgtctaatttttgtatttttagtagagatgggattttgccatgttggccaggctggtctcgaactcctgacctcaggtgatccgcctgcctcggcctcccacgtgttgggattacaggcgtgagccactgcacctggccaggaatgtaaggttttaatattcaaaaatgaattgatgttatgtactaagttactagactgaagcacaaaaattacattatcatctcaagagatacagaaaaagcatttgacaaaatccaatacctgtttacaataaatatttttaacaaactaggaaaatggtaactttttttttttttgagatagagtttcattcttgttgcccaggatggagtgcaatggtgcaatctcagctcactgcaacctccacctccagggttcaagcgattctcctgcctcagcctcccaagtagctgggattacaggtgcccgccaccacacctggctaattttttttttttttttgtatttttagtagagacagggtttcaccatgttggccaggctggtcctgacctcaggtgatccacccgcctctgcctcccaaagtgctaggattacaggcatgagccaccatgtctggccaggaaaaatgggaagttttaaatgcttttccagtagcactggagacagggtgagatgtctgctctcatcatttatattgtcacggtgctgggtttctatacagtcctctcaggcaagaagagaaataaaaggtggctgggcgtggtgactcaccctgtaatcccagcactttgggaggccgaggtgggaggatcccttcagctcaggagtttgagaccttcaagaccagcctggacaacacagtgagatcccatctctaaaaaaaaaaaaaatacaaaaattagccgggtatggtggcttgcacctgtagtcccagatacttaggaggctgatgtgggaggctcacctgagcctggggggttggaactgcagttagctgagatcatgccactgcactccagcctgggtgatagagcaagacgctgtctcaaaaaaaaaaaaaaaaaaaaaaaggctgggcacaatgactcacacctgtaatccctgcactttgggaggccaaggcgggcagatcaactgaggtcaggagttcaagaccaacctggccaaaatggtgaaaccctgtctttactaaaaatacaaaaattagccgggcgtgatggcgggcacctgtaattccagctactcaggaggctaaggcaggagaatcactcgaacccgggaggtggaggttgcagtgagccaagattgcaccactgcactccagcttgggtgacagggtgagatcctgtctaaaaaaaaaaaaaaaaatccagtcaggaacaggaatgctaaggaatcaagagcagcaacaacaagctagcagaagtaacaactaacgaacaagttcataaagatcacagggaggaccagaagacctgcattcactgtcaattttatttatacttattaacaataaatggtctgaaaataaaattaagaagacagcttcattcacaattgcatagaaaaataaaatactttagattaaaattaagaaaataaatgcaaaccttgtacattaaaatctacaaaacattgctgagagaaagcaaagacagcctaaaaaaatggggagtgatcctatgttcacagattagaagattcaatattgtggccgcgtgtggtgactcatgcctgaaatcccagcactttgggaggccgggggcgggggggggggtggattatgaggtcaggagttcgagaccagcctggccaagagaccagcctggccaatatggtgaaaccctgtctccactaaaaatacaaaaattagccgggcatgatggtgggcgcctatagtcccagctactcgggaggctgaggaaggagaatggcgtgaacccaggaagcagagcttgcagtgagccgagattgcagcactgcactccagcctgggcaacagagtgagactctgtctcaaaaaaaaatatatatatatatatattatttttatttttagtagagacagggtcttaccatgttggtcaggctggtctcgaactcctgacctcaggtgatcctcccatctcggcctcccaaagtgctgggatgacaggtgggagccgccgcgcccggctgggaggtgttctttctagacctcacctgggagtcacgcaccattacctctaccacgttccatttgtaagtgcaggccatgtatgcctggagggaaatcaatcttctgccgaacagggtggtgttcaaagcaccaccggctccaccacactctgccttttattctgcattctgtttcttgagaccacgcgccgctacgtggaatggtctcaggagctcatgtgtttgtgctccatgaagtcagaaagtccagcctttgcactgccacatacccacccttagaacagcgtctggtacacggtaggtgctcagtgaatgtgcctagtggagtaaacgtgcggtgcggtgctgcctgcggtcggatctgtggggatcctgtgatggggaagacggctaccaggaaaggtggaatttggaaagtcaggacagggagagaggagggactttgtggaggcaggaaggtatgggagccagtccagcacaagggctggcgggaaagcctcgtgggtgtcagagactatacctctgtgagggtccctgggctcccccaggtcagggcagaggtcctgaccccagtctagctctttagcgggggccaggcccgagatggccagctccgtttcccctgcgtggcctggcagcccctccaggagctggcacgggaagcaggcctgtcctccacgcccttggccggccttggctgcgatgggtggagacgcttctgcccgccccacccctgtctgtctgcctcctcctctcaagcaggcttcctctcgacagaaatgtgtctgcaggtggctcttgagccccagttctcagggattcacctgcagaggatgtagagccggggtcccttccctgcttctgatctgcccaaaatcctagggagagccctgattggcaacccctcggccaatggactgaggccagggcgcgtctgcacccgggttgacagccctgactagaaccgcgaggctggggtcagggaggagcagccgcctcccgccggggccgcagctgtcagagtgggcaaggggatctccacagagggagactgtcccacagtggcccggggtagaacagcgcttccctccccacccagcgcctgactgctggccccgggcccatcccagggcagtgccccaggtctctggtcctccccacagcctttgtctcaccaggtctcagaggggtccgagtccaggctcatctgttgtggtaccactgccccctccctcatggttgtggaagaagcccacggggggaaaatgcagagcagaatccaggaaagactcgctcacaggaggagctgtggcctggagacgcggcctccaccccatctccatcatggacaacctgccaaggggtcttgaacagaagcttggggacgcacatacggtccggtggggcagtgacccactggcagaccagctccctgagtagaaaagaaaaagccctggtttgtggggtttgatgattccgtggcagcagagataatcccactgtggccaatttcgaagcctgactgtaacagctgctggcaggtgtctgaacatttagcgatcagctctccagggtcagcgggagtcgctccagcaccccacggggtgggggtgggtgggtggagccagggcctctgctgcagcctccaacccctttcttccacgctgatgaggcgctgtctgggctcaggtctacccccacgcagctgccaggctctggcctgcctgaggcggatacttttttttttcttttttttgatggagtgttgctctgtcgcccgggctggagtgcaatggtgcgatcttggctcactgcaacatccgcctcccagattcaagcgattctcctgcctcagtctcccaagtagctgggattacaaatgcctgccgccacgcccggctaatttttgtatttttagtagagacagggtttcaccatgttggccaggctggtctcgaactcctgaccttaggtgatccacctgcccttgcctcccaaagtattgagattacaggcatgagccactgtgccctgccgaggtggaagtttggagatgggccacaaactcctggagatagggccagctcagtccccctgagcacccacacacaccctcctgagagccaacagaaggagtgagggccccgaggcggatgacccgtgtgcctcaacccgaacggggagaggcggggtctgcagcagggtacgggcaggtgatcccccaaggaaagattttcctgtattgagagagaaggggccaagaggaggagcttgtcaaacaccacagcccctccccctcctctcagctccagggggtccctggtgccagtgttcggctgatggagagaacggcaagcgggagagagagtgtgacccctgtgggcacatgacttcccttgctgcactgctgcacatagcagaggtgtggtgacgaccctgttttgtcccattgggggcgtttgctgttaggtctgcagaatcctcagttgctattggaaatggtgacatcactggcaggggcggagcttcagccatccttcaagttagggaggggcacgcacactccaggggtggagggggacaaagacagggtggtgtggaccagagggatgggtaaggctctggaaaagggggcgctgggagcgcattgcgagggggctggagagggagagaggagcggaagctgagggtgtgaaacggctggccccgaacacacctcgcggcgctccagtgattcctggtgtccgacctcagccccagtcagtgcgggtccagtttccaggctctcgcggaaggcctggctgagcacatgcggcagccacggtcaccctccctattcctcttagcccgaggaggggggtcccaagttacatggccacgcagatggggcctctccctcatttctgaaccttgtggggaggggaaccttgaagggagcgccccccagagccatggcttagggcctcccccacccctctggagctccagtctgcaagagtcaggagccgaaatatcgctgactgtgggtgacgactcttgcgcgcacacacacatacaagcgggcacgacgcgttcggtcctattaaaaggcacgcaagggtgcgggctgcacgcggtgacacggacccctctaacgtttccaaactgagctccctgcaggtccccgacagcacaggcccctgtcccaggacccctccaggcacgcgctcacacgcacacgcgcgctccccggctcacgcgcgctccgacacacacgctcacgcgaacgcaggcgcacgctctggcgcgggaggcgcccccttcgcctccgtgttgggaagcgggggcggcgggaggggcaggagacgttggccccgctcgcgtttctgcagctgctgcagtcgccgcagcgtccggaccggaaccagcgccgtccgcggagccgccgccgccgccgccgggccctttccaagccgggcgctcggagctgtgcccggccccgcttcagcaccgcggacagcgccggccgcgtggggctgagccccgagcccccgcgcacgcttcagcgccccttccctcggccgacgtcccgggaccgccgctccgggggagacgtggcgtccgcagcccgcg

SEQ ID NO: 12277 - DNA, 6000 bp, Homo sapiens
caagctgagatggcaccactgcactccagcatgggcaacagatcgagactttttattttttttaaaaagaaatgaatttcaaaagcatgtacaactgcacaataaattgcacgtagatgtacagagagaaagggaacggtgaacacaaaattctggacagtgatgacctctgagatgcggaagtccgggaggggctgcaccgtgcttggatgctgggatcctctgtgtcttccacagagccctagtgcctgttattatttgtagaattaaatgttaattatataaaaagaaaaaaaccctcctagttctcctccccgcttccccataaggggacccagcacacagtgacagagttgagatctacaggggacatcgcaggaacaactgaagaggtgctgggcttgcaggtgctgtgctgggagggtggggtgcaggagcctagtgtggagggcggccggggtgtggctacaaccaccacctcccaccgcaagggctgtgaccaactttgggacccctggaggagtttctggggaaccagagtgacaccagtctgtccaatttgtgaccttccccagtggcgggagcctgggtgggtgtctctggaggttccagatgggaattctgccaggtgagaaagagggtgagggagtgagggatgggggtgggggacagggggcagcagaaggactctgaggttggagagggatgggggaggggctgtgagcaagtgtgctggagggtccggaggaagatgggaccctcgaggggtgacaagctcgctggtcgttggcttagacactgcagcagtgcccaccacgcagcctgtcctggacttagtcacccccagctccagacttgtcaactctacacatttctcttgtggattctcttccctatagccctggatgagcatttcaaaccctctcctccctcgccaacctgcaaatgcccccttctcactctcagttgcttgttttgtttcttgtttcactgagaaagtagaataatcacaataaaaccctcatcctcccccaaatgaatcctccagcccacctgtgcctgcaatcgtgcgacccgcttttctttccctgcctcgagtgagctgtcccaagtctgatgccctcttgcctggacgaggcaagacactctttttcttgcatcagcaatttttctttctgttgagtcattgccatcacatacgaagtccaataatatcccctaccttaaaaaacaaacaaacaaaaaactccttaatgctgcatctgtgttgttccctgtctcactggacaagctgtctacacctgctgtagggacttcctcaccgaacgagctgtctacacctgctgtagggatttcctcaccaaccgagctgtctacacctcctgtagggacttcctcaccgaccgagctgtctacacctgctgtagggacttcctcaccgaccgagctgtctacacctgctgtagggacttcctcaccgaccgagctgtctacacctgctgtagggacttcctcaccgaccgagctgtctacacctgctgtagggacttcctcaccgaccgagctgtctacacctgctgtagggacttcctcaccgaccgagctgtctacacctgctgtagggacttcctcaccgaccgagctgtctacacctgctgtagggacttcctcaccgaccgagctgtctacacctgctgtaggcacttcctcaccgaccgagctgtctacacctgctgtaggcacttcctcactggacgagctgtctacacctgctgtaggcacttcctcactggacgagctgtctacacctgctgtaggcacttcctcactgaacgagctgtctacacctgctgtagggacttcctcaccgaccgagctgtctacacctgctgtagggacttcctcaccgaccaagctgtctacacctgctgtagggacttcctaactgaacaagctgtctacacccgcagtaggcactgcctcactgaccgagctgtctacacccgctatagggacttcctaactgaacaagctgtctacacccacagtaggcactgcctcactgaccgagctgtctacacccgctatagacacttcctcactgaccgagctgtctatacctgctgtagggacttcctcactgaacgagctgtctacacctgctgtaggcacttcctcactgaatgagctgtctatacctgctgtagggacttcctcactgaacgagctgtctacacccgctgtagggacttcctcacaactcattctcttcaatccgccccactcgggctgctcctctgtggaaactgctgtccgggtgatgggcacctctgtctttccactctgatggctgaatgtcggtcctcatctctatggactacacgcactcctccctcagctccgggacagggcactcccccgaccccccacagccctggctgctcctcctcaccggcttcattcttggggagtggcagcatcctctgtctctgacttcggtcgcttcctcggtggtgatgcatcaggcaggatgacacttgcaagggaccatctaccacaatctgtgcgatctgtgcaaggcgcagggaagtcccaagggccaggattcaccatgcctgcgtgatgccatcccccgctggcaggaacaaggggaggacgcaggaactggaactggagagagagaaaggagagtggtgggtgcctgacagggccggagcttcaattgaggtgcacagccaaccctcggtgacctggcaggaggaagtcaggggaatagtagacaccttggccttgctctttccttccctcaagggcctttggtgctcctgttgggctagcataaccagaaaccacaggtcaaggaacaggctgatgtggctttcaaaggccagctccagcgtcacgcagcacggagggaagggcagagcagatgtggcgagcccagcctccaggcgcagggctgcagcagtggcctctcgtcttggcatccctcgagaaactccacccctgcatagcatctccacttctgtccccagtaggcaattcttaatttccaccctgtgactaacaagctcttccctctgtcttccccatctcggcaaagggcatccccctcgactcagtcactcagaccaaaaatgaagagcctgtgtttctatctctccttcacatttacactggacgcactctctctaagagaaagaggcactgctcatggcccccatgttcaaaccacatcatctctctctgtgctgctgtcaaaacccctccctgggctctgatttttctctgtgacaggccagttggcagcctccccgacagccttagcacctgcttcccagctaagcgaaccctgattttgtttggggcaactatgtgctcgcctagtgggggctggccatcctggtccactttgacacatgttcactttcccaccctgttaaagtcagggccggccacatggcccatggcctaacggggttaaagagacacttgcagggggagcctctgagaagcttttcctttgttagaaaagaaaatcgtaacctgattcacaaagtggtcatcctttgtacacctgccacttccttcccgtttgagatgctggtgtagcggtgtgatgccctgtgctatgacagccaccctggggcatgaggcaacaggcaggaaggcagaaagtgtatgtggggattttggagggaggagagatggtggcttcgtattcagtgagatcacaatggcatcgtgcaagctgctgctagctgggaagcgggttgttcgcctctgaatgcatcctaagtgattcagcaccccagcctcctgcagtccacactccacacggcagcccgagggacccttcagaggcctacgcgcctctgctcggaactgtgcggactgcctccctctcagaaggcgcagcccgcacccggcctcactctgcactcagcgccttgcgagcgagcttcaggtccgagagggtcccttgttcccgaaggtctccccgaccccggggccgcctttttggaggttgtgaggacccacgggcctgcacgaagtgagcgctgtgtaaatggttgctgtgctttgtacaaaacggtcagctccgtgagggcagagctgggagcccaggacaggcccggcccgcggtgggcgctcaaggaggcctggggaatggcagtgaccgtgacaggttccctaacggggcgtggcctgcaaggcggtcagaggcttctctgagctgagatcccggagccagccccgtgcgtggaaacagcaggtcccgcacccgggctgggggcccccgacagaagcgtccgcgtggcaccaaggccgcgagccgagcgcacccggagggttgggaaggccggggacccggcggggacggggcgggccggcccaggcctggcgcccagctctgggctgcagccccagggctggtggcgcctccgggcggagcgaggggtccgtctgggccgagtttgaggagccgagggcacccaggggcggtgcggccggcagagtgggctccggggacggcccgggctggcgctgagcggccgtcgaggacccacaggctcgtccgctcctgggcccggcccagccccggggtgggaggcgcggggcgagggaggcgcagccggaggggccggggcggggcgggggcggccgcggggcggggccggcgcggcagggtgggcggggccggcgcggattggccgggccccgccacgtgaccggccccttatagggcgtggcgcggggccgcggagtcgggtgaggcggcggcggctgcggcggtggggccgggcgaggtccgctgcggtcccggcggctccgtggctgctccgctctgagcgcctggcgcgccccgcgccctccctgccggggccgctgggccggggatgcacgcggggcccgggagccatggtccgcttcggggacgagctgggcggccgctatgggggccccggcggcggagagcgggcccggggcggcggggccggcggggcggggggcccgggtcccggggggctgcagcccggccagcgggtcctctacaagcaatcgatcgcgcagcgcgcgcggaccatggcgctgtacaaccccatcccggtcaagcagaactgcttcaccgtcaaccgctcgctcttcgtcttcagcgaggacaacgtcgtccgcaaatacgcgaagcgcatcaccgagtggccatatcctgccgggcggggccgggcggggccgggcggggaccggggtgggggccggggccggggccatcttcccggtggccgggagggcgcgacctggggaggcgtcgggagacgggcgaggggggtacggagcgccccagggcccctcggagcggcgggtgcgggagcatttccgtgagtgcggcgggcgcggggcggagcccctctgctccggactcgtccctccgcacgccgggtcctggggatcctggtcggtgcacagtgcgcggctagcctggagggcaccgagggcgaagccgcgtccgtgcaggtgcgagcgctgtggggacgcggccgtgcgcgcgcctggctgcaggtgcctgcgtgtgcgggctgagctggagcctggcgctgcgcgtgcgtgcgctcgcgatgcgggctacatgcatgttcacgtgcctgtgtaggtacatgtggctgcgtgtctggagggagcagcgtgcgcctgcgcggggtctccctccagcctcgcctgggggcgctcggccccctcccctcggggccctggagtcgggcggagccgggccggaggcgctgtccgcggtgctgacggccgcccgggtgtgccgaggggctggcggcccagactgcggaggccccgcctcgcggccgcccctagggatgggggcagggagtgagggagaccaggccgcttccgccaggagaggggctccggacccagttgtctcagcccctccggagacggcctagcggtggctgctgcactgggctctgctggcgtcggcctcgtgtt

SEQ ID NO: 12278 - DNA, 6000 bp, Homo sapiens
gaaccaggaaagtatgttttttgacaaaaatgataaattgccataaagttcatgagacaaatgattttttgaaaaaaatagtggttctcggtctttgaggaagcgccacattgtcttccacaatgattgaactaatttacattcccaccaacagtgtaaaagcgttcctgtttctccacagcctcgccagcatctgttgtttcttgactttttgataattgtcattctgactgttgtgagatggtatctcattgtggttttgatctgcatttttctatttatcactattcagtgatgttgagcttttttccatatgtttgttggctgcataaatgtcttcctttgagaagtgtccgttcatgtcctttgccccctttctaatggggttgtttgcttttttcttataaatttgcttaagttccttgtagattctggatattagacctctgtcagatggatagattgcaaaaattttctcccattctgtaggttgtctgttcactctgatgatagtttcttttgctgtgcaaaagctctttagtttaattagatcccgtttgtcaatttttgcttttgttgcaattgcttttgacatgttcgtcatgaaatcttagcctgtgcctatgtcctaaatggtattgtctagattatcttctagggttgttatagttttgggttttacatttaagtatttaatctaccacaatcccattagtggtatgtatcccccaaaatataaatcattctattttaaagataatgtacacctatgttcattgcagcactactcacaatagcaaagacatggaatcaacccaaatgcacatcaatgatggactagataaagaaaatgtgctacatatacaccatggaatactatgcagccataaaaagaatgagattatgtcctttgcagtgacatggatggagctggaaaccattatcctcagcgaactgacacaggaacagagaaccaaacaccgttatgttcccatttataagtgggagctaaacaatgagaacacatggacacagggagggtaacaacacatacgggggcctgttgcaggaggagagcattaggataaatagctaatgcatgtggggcttaatacctaggtgatgggctgacagtgcagaaaaccaccatggcacacatttacctgtgtaacaaacctgcacatcctgcacgtgtatactggaacttaaagtaaaataaaatatttaaaaaagaaaattcaaagcacaacaaaattaataaaagaggccaatcattaagcaagcaagacgttaatattaagactacaaaacactgaagcaaacgaaagtgtctacaaaggctcaccactgggcttgttcctggtttttcccctggttgcttaaatatcatccttctgcactaggtgcactacatccatatattagagcctgaaaatatatgtacaattgatgtccagatacctatgaattttaatgttgtaataataaactctgaaaaattacattgcaacactgttattttagtgttgtttgcagaaaacacatttcagagggaggcttttgagttctctgtactacctggtcactgtgtcatttcctttttgttttcttaggttttcatgggtcagctccttttacatccaaaagatataaagaagacagggtgcaaagtggtacaatactatattgagggtgctatgacttttgaagagaaggaacgtggtcttcaaaagaaagaattcagaagggctatacaatggccgccttgtcagtattgagaatgagctcaaatttcatcatgattctttggtttcgtatcatttacacagaaaataaaaagggaagataatcagtggaaagtgggcttttctgtagcacgggagagaattagagttggctcaaaggcaggctttggaatacagaaatctgatatgccctgcttgctattttttaggatactgaaagctagtatgattatttcagagttttaagcctgctagaatttgttctgcagatatgtagacatctacattcataagatttataagtaagcactttgaatttgtgagatgctaatatctggggctgggcttgctcctctctgcttttttttttttttctcattagacctctctctaaaactggggaaggcatcttctatgtgaaaatataatttcttgaaagtagagagaagggtcttgaaaacccttctttagatgttttgatagcaaacaattctggcacaaagcgtccccagtgatggaagaaaaactgcctctcatgcactgtcatccttctttgatcttttacctcttttgcagtgtaatctccaaatcaattccctgaaggttttgtgcttttctcctctaattgccattagagagggctgtgaatcctcctacttcctcactctgcatagtttctaacagttctctttgaccaaagttattcagtaaaattaaaggggataggatcaaaggccatgtgttttcagaatgatgctgtcatttttgtggggtccttagcattttgaaatactgcagggcagggggtaggcaattgcagtttttcagcattttcatggagcagagatctcaccacctcaacagaaccacttaagggcgttcatttaaaagcttagaaaggctggagccttccccactaaaggcagcatctcgcaactggatgaataccacactgcatgaggaaaaccacgctgcccttgcagtctcccaccttcctctttaccccatttattaaactcatagtaactcacaagaagcattcagttttaatttgtcttgcttgacttcattacctactaccatatgtatgcatgcttaatgaaaattgtcagtgggcttccagctcagaatcagcacatgctacccagaagatggatcatggtacaggtatttagtatatgccaggcactgttctaagtgctttgccaatattagcttatttagtcctcacaacaaccataggcataagggtttattttaatctccattgtacggataaggactccaagacacaaagaaggtacgtaaatctcccaagactagcttcaaaattggaatttgaaccatgcagcttgattccagaattcatgctgttaactaatacatcaacatcagaccaaagtaataatctgaaagaaatgctgagcgtttcttctttaaagtctttaactcttatgtaagattaaattaccaaaaaacagaggcagtggttttattcctgaagtcccttttgaaagaaataggagacaagagaaagcttgtctttacagcctagtagactggtttcaatccagattccagttatactagtatgttagacttgttactaatttctctggacctcacttgcttaatctgtgagataagaaaatgaccataacacctactccataaggttgacatgggcataaacctatgcaatgcattgtgctaggtgatacatgtgagccgttattattttaatactgccttcaatcctttgtggaaatagaatagtaacagaaaatgaatcagctgtgtatgagatctattaaagtgatattgtttggtagataatcagagacataaattttactatacgaggtaggtcaatggtctgccttccacccgtggactagttttctgcaatatctttcttaaatttttgacacaagaccattgtgagtgaaatggtgttgtagcgcagtgtgtcaggtattgatttcatgctggggtgggcctgtgttgtcccggttctgaattacagcagtgtatcacatctgcttgcaccactcccagttcagctctgactgcataatagtcatggagctgggatttaccaatctcttcaagttaattagaaatggaaaatcagcatggtcacagaggaaaaaataaataagatggcgatgctccaaggatgtggggattctccccataggagttgtcaggtcaactgctcccactgaggtccgatgcctgggggtacatgggagccgaaggggggttgtgtcaggaactcccttctcatctcaccgtcccaacttactatgtgaaattatccaatttctaccttcaaattgaaaaactgtcctttaattctctctctcaccacaggagtcctaaagactatacattccaactcagcaactatttcatacagcctccttagaaaatgatgggggtggacaccccacttgaggaaaatccattctttatagacagcatcccatgtggcactttatgggttaaacttgtgttgcagagaagcggtatcaagtggctttccaggagataacccccatttaaaaactgccatctctaaaaggtgagccaaatgcccatgagtttaaactgctttgtatgaaaggaacaacccagtgtgtttgagtttgcttctgtctcagtgtctgtcatctatgcaaccgattatcaggatgaagactgtcaatcacggttaataaaaacctcagaacacgacacagatctcttttactatagatgtatttgatgatagcctcactttattatgtcacataaatcaaaagggaagcatttatctcatcattcggaggcaccccttctctccctgtgtcctcacccctccccccgtaccagttctcagtccctcaaagatgctttgtgcaagaaagtgcaagtttcccgttctggcttcatttttgttcccttttgcgatcctcctggctcccccccaaaccaagctagcaaagcaatggccccggttcccccccaacgcctgacctgcgtttactgggaggagagcgggagagggagcgcgcattctggagcaggctgctttgactccgaccacaggctgttttgtgcaggctgtccctcttcttcaaaatcgtgcatcccctccccgaagcagcaggcagtgtgcctccattcagccacatttggtatgcatgagcacggctgcagagagaggggaggtggctgttttaagaaggttcaggggctcaggcaaggctacttgactagtcttccaagttccaggaagcctctgccctaatggaatttgcaggtgtggagatgaccatgggatgccagagccgtgggggaccgtttattttctaggcattgctcaggttttcagtttcttgttttcctggtggaatttggaaggggtcatgaatcaggctgatgctcctcgacccctaaactggaccatccggaagctgtgccacgcagcctttcttccatctgtcagacttctgaaggtactgtaacttgcagctttgaatggcgctaattgtgctttttagatttaaatacccaacttggggacttgggctgggacgcacctttgggggagcctaaatgcatgcagtactggctctgtggtccgtggctggagagaggttctcagtactcctgccctccccccacgccccccacccacaccccgtggtgtcagagacaagaggctggtgcgaaccacactcgagaaggagattttggtctcagagaatgggctacctggtgctcccccaccccttttaaccattcctaaaacagaattaattaacttctttgggagggtgggaatagtagtgggagtgaaatctcttactcccttgtgtttggctcctgggcttttctttctctctccctggggaagcccttcgacccactttccctttaaatggaaccagagagaacaaaggattctcctcattagtttaaaagctttgtgtagttaggtggccagtcaggtgaagatgaacaaagaatgagcctcctcagacagtgactttttttgtgtccttgtttttagaaaaggcataaaaatgtgagtctcctgagtggaatcagtagtgggaaagtattgttaaacatatattgaatgtcagctctctctctagctgtgagtcacacaaaagaatggcactacacctgagcaggaattgccaccgtgtgtctgcagcgcttctctttccagaagcaaatgcattaaagatactgaaaaagt

SEQ ID NO: 12279 - DNA, 6000 bp, Homo sapiens
tgtgttcttccggctgtgggttcaccatggtcaaggtgctcacttatcacctgcacagagtagaggccgaagttggcccctgccttagagcagccagagggattaagttaacatagggaacccgaagccagaagaaagcaggatataagaccgtgcagacttgtgggtgacagttgagagagaggaagaaatgtttgggggatgatggagggatgaagactttagtggatcctcaaagagtcatttgggttggatagatggagggagagaggaggggagatacccatgtgggaaggggggtggctgaagagcattaaggaggctagcttgaggggactaggggtgtgagctttgatggtcagggaagatgacatttcatgtgttggtggggtggccctaggcagggaaggggttaagaccagacaggatttttagaaatagggaccttggggctgggtgtggtggctcacgcctgtaatcccagcactttgggaggctgaggcgggtggatcacctgaagtcaggagtcgagaccaacctggccaacatggtgaaaccctgtctctgctaaaaatacaaaaattagccaggtgtggtggtgcatgcctgtaatcccagctactcaggaggctgaggcaggagaatgacttgaacctggggtgtagaggttacagtgagctgagatcgccccactgcacttcagcccaggtgacagagcaagactctgtctcaaaaaaaaaaaaaaaaaaaagaaagaaaaagaaaaagaaatagggaccttggaaagtgtcaagtttgtgtcatgctcacagtggtgcttcaagagggccattttggtagttttatctggaggagggcaaggagaagggagggccagaatcagcatgcaccactgggcagggaagtgtgaatcctttacagagagcaggagggctgagtgctgcctggaaaactgtagacttttggttcaaggcaccagaaagtcgacccctgcctcttgtgccgaattaaatcttccacaaaatacttccttgggacaaagggccagggagtgggaatgccttcaggaggctcaagtcctcttcagcctttgagcattgggctgaaaaaatgaaagactggaagtccatttagtttttggccttgatccctggaggcagcagaatgtagtgaggtcagacagattgaagcgctgtcattttgtgcctgtgaccttggccagatggcattaacatctgtcaactgttttcttattataaaatgaaaagaactatctacgtctaacgtttgttgtgacaattaattgagaagatgtatattagggatgtctagaattgtgttgggtgcacggtgtgtctttaataaatgtctgtttctttccttcctttttccctcctttggtacagtgatcatctcatggttgtggggtaggaggaggggagggactctgggaattgtggtcgttcacttaactcttagtgtgaataaggattctgaggcttatgcaggtcaggaaaaggggagagaggatcaggtatgtggtcttctgcggggtaggaatggctgggagaagggagaccagcagagcagagggaaggaagagaggtcagagaaggaccttgaagaagaatccgtatagagagggatccattaggggcctgaaatattacctgaaatgtcctgttgcctctgttgacctttgcccaccacctaaattgcgtggggttctgtgcagcgctataatgtatgctccatgggaggtatgagagtctttgtctttcttattccctgctgattgcccattttagtaagaatgcaacaaccctgagcttgcttatagtagcagatgacatttctactttcaaagaccttgaaacctaggatttatctggaggcttttgctgactatggagtcaattccagtggactggtaacatttattattctaaggagaacccatataaaaacagcaaaaacaagaagccacctatacacacacacatacacacacacacacacacacacacacggaagaaagagaagacatgccctcaagaaactcaaaattcttatgtatcaagctgatcttcatacctaacatacttatgagggaggttggctaccatatttgtatttgttgttgatttgatcaaaaagggatttatttttgatggcatgaaaatacttaactagtggttgatttatttgacttttttgttttttctggagactgagtctcactttgtcacccaggctggagtgcaatggcgtgatatcagttcactgcaacctctgcctccctggttcaaacaattctcctgccccagcctcctgagtagctgggattacaagcacctgccaccacacccggctaatttttttctatttttgatagtgacaggattttaccatgttggccaggctggtctcgaactcctgacctcaagtaatccacctgccttggcctcccaaagtgctggaattacaggtgtgagccaccatgcccagcctgtggttgatttattttattgcttttcagccagtcttcttggtgactctggcaaacccttgttgttggcagagaatactttaaaaaaaaaaaaagactcacattataaagttgctgtaggaatccctggctttcagccatttgaaatgtggccaatgtcagcttctgttttgtaagactctaaggatgtgatttcaagataggaaacataggctctgatgcctctgtatcttttcgtaatccaagtctcaagggagaagagtgctctttcctggaatgtctgttctaggaacttttaatttggaggtctaatattgtattcctgcctcaccctgggaccttacagtagaagcagctctctagtgagatttctcagcaagaattttacatttttttctttttaaaccaatttttattagtgtatcagtaagatttttttttttttttttttttttttttttttttttcagaaaaagccataaatatatttgattttgtgggcataagttattatttcaagagaagtgggccaggtgtggtggctcacccctgtagtcccagcactttgggaggctgaggtggatggatcccctgaggtcaggagttcaagtccagcctggccaacatggtgaaaccccgtctctactaaaaatacaaaaaagcagccgggcatgatggcgcgcacctgtaatcccagctattcagggggctgaggcaggagaatcacttgaacccaggaggcagaggttgcagtgagctaagatggtgccactgcactccagcctgggcaacaaagtgagactccataaaaaaaaaaaaagtgtacctaacagaaattgaattctcttcctcttccacaaaaatgcccatattaatttttttttctttttcggatggtaaaagtattatatacttccacattcaggtaatgcaaagaaagcatataacagaagaaagggacagttttctgtaatctcactatcaaaactaaccattcttaaccttttcatatgtatattttcacaaattttctacacacacatgcagacgcacacacacacacacaagcaacatcttttaagcaaaaactggggtgatttcataatgcttcttttgtagtttttcccctgccccactaaacacggtcctatttccatgtcaatgagtataatttagtacattttaatggctgaataacgttttattgcacaagatacaaaaaattcacttacaagtgtttttattccaaaatcaataaaatattaatcgaaattttcttctattacttttgtgccttatactatttttgccgcctcatttggcttttataagactatttagagaaaccctatgtctattagttggtacatcatagatatgctttttagtgatatggagaaaataatgaggtggaggtgtatggaaaaggagtagaatgtcaaagcaactaaatcgatggagtgaagtttttggatggttgctaactgacccatccctaacatttgagagcctgacacaggatacacatggaagaccacatactatacgtctagatatttaaatgccttaaatctagataactgtataaaatatgtcctagccttttatcttgacacatatagctggaaggccagacttgagtttggaaaccttggatttttggaagtacttagcaacgtggtgttctttgggcatcctagtaagctggggagggagcacaggcttcccttgacccttgaccctgtagatgtctcaccatgagggcaggggtgtggccagaggaaggccagtgtgcgcccctgaaaacatggggctcagagtaaagtcctcttttgctcaggggtgagtgtggcattgcttgccaaattttcttcttttggaaaataaaataaaatacagtgatttaaatgtagtatatcaatatatgtgtggtgtgaaaacataaagcaaataagaaatctacagaataaatagacaaggtcccttttcaacattttcctaaaccttcccttctcttttccactgttcatagtgtgatgtgtatccttccagaattttctggtcatttatataacatgctatacatacaggtatgtgcatatatacatataaaatatgtatgtaagtatatttttaaaaaatatacataggataatactgtgcatattattctgtaagcttttttgcttacatcttttttaaaagaatgactctgcagttattcctttctgttctttctcccttactttaagaaagtaatatatatataggcttgggtcacgtagtctgcaagaaaaaaaggtaatatatagtcatgataaaaaattcaaacaataaaaaatgaaataaatggcaatgcaaaagtctttgagtgttgtcatcctaccttgttcctagaaataaccaccattaaaagtttatagagtctaggtgtggtggctcacacctgtaattccaagactttgggaggctgaggcaggaagatcacttgagacaaggagcttgagatcaacctgagcaacatagggagaccccatctctacaaataactgaaaaaaaaaaaaagctaggtgtggtggtacatacctgtggtcccatctactcaggaggctgagacaggaggattgcgtgagcctggtaagtcgaggctgcagtgagctgtgatcacaccactgcattccagcctagctgacagagtgagaccttgtcttatataaaataaataaataagtaataattaaaatgtttgttgaactggttaaggttgttcatttttggagatgagtgatgaacacattgggatctattatattgttctgtttacttttagatactttgggagtttcccgtaatggaatacttatttcttaagcaatacttatttttttgaaaaattattgaaagcctttttacctggtaaaagcttgaagatgctgtcaccatatttatgccacattttatttgaagtccaagtttctggcttggtcttgatctaagcaaaccagggtaaaatgagagaggggccagtgtgaggaatgaacataggtggtaattgagagacttgtgtctggaagtcaaaacggccgactggctgagctagggattctctaacagtgtggtattgtttgtggtctggaataggctcaagacaaggcgtgccggtcgtggggctggtggtggaaggcggtcccaacgtcatcctgtcagtgtgggagactgtcaaggacaaggacccagtggtggtgtgtgagggcacaggtagggcggctgacctcctggccttcacacacaaacacctggcagatgaagggtgagttgttggctcttcttttttgaaactataggggctgtttattcctccattttagttcttttggctgtgcatttatgtgagccagatattcttggattatagaagttgagactggatttcatttctcagtgactgtgtttgttgttcaacatcaaaatgcccttcagcgatgagagtt

SEQ ID NO: 12280 - DNA, 6000 bp, Homo sapiens
aatacaaaaattagccgggtatggtggcttgcacctgtagtcccagatacttaggaggctgatgtgggaggctcacctgagcctggggggttggaactgcagttagctgagatcatgccactgcactccagcctgggtgatagagcaagacgctgtctcaaaaaaaaaaaaaaaaaaaaaaaggctgggcacaatgactcacacctgtaatccctgcactttgggaggccaaggcgggcagatcaactgaggtcaggagttcaagaccaacctggccaaaatggtgaaaccctgtctttactaaaaatacaaaaattagccgggcgtgatggcgggcacctgtaattccagctactcaggaggctaaggcaggagaatcactcgaacccgggaggtggaggttgcagtgagccaagattgcaccactgcactccagcttgggtgacagggtgagatcctgtctaaaaaaaaaaaaaaaaatccagtcaggaacaggaatgctaaggaatcaagagcagcaacaacaagctagcagaagtaacaactaacgaacaagttcataaagatcacagggaggaccagaagacctgcattcactgtcaattttatttatacttattaacaataaatggtctgaaaataaaattaagaagacagcttcattcacaattgcatagaaaaataaaatactttagattaaaattaagaaaataaatgcaaaccttgtacattaaaatctacaaaacattgctgagagaaagcaaagacagcctaaaaaaatggggagtgatcctatgttcacagattagaagattcaatattgtggccgcgtgtggtgactcatgcctgaaatcccagcactttgggaggccgggggcgggggggggggtggattatgaggtcaggagttcgagaccagcctggccaagagaccagcctggccaatatggtgaaaccctgtctccactaaaaatacaaaaattagccgggcatgatggtgggcgcctatagtcccagctactcgggaggctgaggaaggagaatggcgtgaacccaggaagcagagcttgcagtgagccgagattgcagcactgcactccagcctgggcaacagagtgagactctgtctcaaaaaaaaatatatatatatatatattatttttatttttagtagagacagggtcttaccatgttggtcaggctggtctcgaactcctgacctcaggtgatcctcccatctcggcctcccaaagtgctgggatgacaggtgggagccgccgcgcccggctgggaggtgttctttctagacctcacctgggagtcacgcaccattacctctaccacgttccatttgtaagtgcaggccatgtatgcctggagggaaatcaatcttctgccgaacagggtggtgttcaaagcaccaccggctccaccacactctgccttttattctgcattctgtttcttgagaccacgcgccgctacgtggaatggtctcaggagctcatgtgtttgtgctccatgaagtcagaaagtccagcctttgcactgccacatacccacccttagaacagcgtctggtacacggtaggtgctcagtgaatgtgcctagtggagtaaacgtgcggtgcggtgctgcctgcggtcggatctgtggggatcctgtgatggggaagacggctaccaggaaaggtggaatttggaaagtcaggacagggagagaggagggactttgtggaggcaggaaggtatgggagccagtccagcacaagggctggcgggaaagcctcgtgggtgtcagagactatacctctgtgagggtccctgggctcccccaggtcagggcagaggtcctgaccccagtctagctctttagcgggggccaggcccgagatggccagctccgtttcccctgcgtggcctggcagcccctccaggagctggcacgggaagcaggcctgtcctccacgcccttggccggccttggctgcgatgggtggagacgcttctgcccgccccacccctgtctgtctgcctcctcctctcaagcaggcttcctctcgacagaaatgtgtctgcaggtggctcttgagccccagttctcagggattcacctgcagaggatgtagagccggggtcccttccctgcttctgatctgcccaaaatcctagggagagccctgattggcaacccctcggccaatggactgaggccagggcgcgtctgcacccgggttgacagccctgactagaaccgcgaggctggggtcagggaggagcagccgcctcccgccggggccgcagctgtcagagtgggcaaggggatctccacagagggagactgtcccacagtggcccggggtagaacagcgcttccctccccacccagcgcctgactgctggccccgggcccatcccagggcagtgccccaggtctctggtcctccccacagcctttgtctcaccaggtctcagaggggtccgagtccaggctcatctgttgtggtaccactgccccctccctcatggttgtggaagaagcccacggggggaaaatgcagagcagaatccaggaaagactcgctcacaggaggagctgtggcctggagacgcggcctccaccccatctccatcatggacaacctgccaaggggtcttgaacagaagcttggggacgcacatacggtccggtggggcagtgacccactggcagaccagctccctgagtagaaaagaaaaagccctggtttgtggggtttgatgattccgtggcagcagagataatcccactgtggccaatttcgaagcctgactgtaacagctgctggcaggtgtctgaacatttagcgatcagctctccagggtcagcgggagtcgctccagcaccccacggggtgggggtgggtgggtggagccagggcctctgctgcagcctccaacccctttcttccacgctgatgaggcgctgtctgggctcaggtctacccccacgcagctgccaggctctggcctgcctgaggcggatacttttttttttcttttttttgatggagtgttgctctgtcgcccgggctggagtgcaatggtgcgatcttggctcactgcaacatccgcctcccagattcaagcgattctcctgcctcagtctcccaagtagctgggattacaaatgcctgccgccacgcccggctaatttttgtatttttagtagagacagggtttcaccatgttggccaggctggtctcgaactcctgaccttaggtgatccacctgcccttgcctcccaaagtattgagattacaggcatgagccactgtgccctgccgaggtggaagtttggagatgggccacaaactcctggagatagggccagctcagtccccctgagcacccacacacaccctcctgagagccaacagaaggagtgagggccccgaggcggatgacccgtgtgcctcaacccgaacggggagaggcggggtctgcagcagggtacgggcaggtgatcccccaaggaaagattttcctgtattgagagagaaggggccaagaggaggagcttgtcaaacaccacagcccctccccctcctctcagctccagggggtccctggtgccagtgttcggctgatggagagaacggcaagcgggagagagagtgtgacccctgtgggcacatgacttcccttgctgcactgctgcacatagcagaggtgtggtgacgaccctgttttgtcccattgggggcgtttgctgttaggtctgcagaatcctcagttgctattggaaatggtgacatcactggcaggggcggagcttcagccatccttcaagttagggaggggcacgcacactccaggggtggagggggacaaagacagggtggtgtggaccagagggatgggtaaggctctggaaaagggggcgctgggagcgcattgcgagggggctggagagggagagaggagcggaagctgagggtgtgaaacggctggccccgaacacacctcgcggcgctccagtgattcctggtgtccgacctcagccccagtcagtgcgggtccagtttccaggctctcgcggaaggcctggctgagcacatgcggcagccacggtcaccctccctattcctcttagcccgaggaggggggtcccaagttacatggccacgcagatggggcctctccctcatttctgaaccttgtggggaggggaaccttgaagggagcgccccccagagccatggcttagggcctcccccacccctctggagctccagtctgcaagagtcaggagccgaaatatcgctgactgtgggtgacgactcttgcgcgcacacacacatacaagcgggcacgacgcgttcggtcctattaaaaggcacgcaagggtgcgggctgcacgcggtgacacggacccctctaacgtttccaaactgagctccctgcaggtccccgacagcacaggcccctgtcccaggacccctccaggcacgcgctcacacgcacacgcgcgctccccggctcacgcgcgctccgacacacacgctcacgcgaacgcaggcgcacgctctggcgcgggaggcgcccccttcgcctccgtgttgggaagcgggggcggcgggaggggcaggagacgttggccccgctcgcgtttctgcagctgctgcagtcgccgcagcgtccggaccggaaccagcgccgtccgcggagccgccgccgccgccgccgggccctttccaagccgggcgctcggagctgtgcccggccccgcttcagcaccgcggacagcgccggccgcgtggggctgagccccgagcccccgcgcacgcttcagcgccccttccctcggccgacgtcccgggaccgccgctccgggggagacgtggcgtccgcagcccgcggggccgggcgagcgcaggacggcccggaagccccgcgggggatgcgccgagggccccgcgttcgcgccgcgcagagccaggcccgcggcccgagcccatgagcaccatgcgcctgctgacgctcgccctgctgttctcctgctccgtcgcccgtgccgcgtgcgaccccaagatcgtcaacattggcgcggtgctgagcacgcggaagcacgagcagatgttccgcgaggccgtgaaccaggccaacaagcggcacggctcctggaagattcagctcaatgccacctccgtcacgcacaagcccaacgccatccagatggctctgtcggtgtgcgaggacctcatctccagccaggtgccctcccccacctccgccacccacctcccctctcctccatcctgcaaccccacacccccagtttcattccatcctttccgtgcccccttcctccctgtaagacaccaccccagagtcagctggctgcttccgggaggcctcgtctcactaggaaccaaacaccagggtctgctggctcccctatcttggcctgagaccagtcacctgccaccttggctggtcctcagagggcccctggggctccaggccctgactggtgtgtgtagacgtggggctggagtgtgtcagtgtgggggtgggcattccgggtaagagagtagaagcgcctgtccagctacatgcccgccctgcagagctttaaacaggacggggcctggggccatctttgtttctgcttccaggttctcctgccctttctttcgtcccttccccctaccgatgggtccgcctgggaagagaaatggctcaggtgccacggcaggacgctttgtgggggtgggagtgggggtgcacacgcgagaggcatcagggcatgggagctgtcggcagccagcgctgcgggggaggacgtggctcctgggattttgcctgtcggagctgtccgcccctgggccgagcgcctgctgaattccaatgaggctgcaaggatctgcaatgcagccctttatgtaagaggcaagacagacatccagcctagcaccgctcacacgtgcctacctgatggacacaccacatctgtg

SEQ ID NO: 12281 - DNA, 6000 bp, Homo sapiens
cctgatggaagtggccaggtgcagttaggccacctgccctgatggaagtggccaggtgcagttaggccacctgccctgatggaagtggccaggtgcagttaggccacctgccctgatggaagtggccaggtgcagttaggccacctgccctgatggaagtggccaggtgcagttaggccacctgccctgatggaagtggccaggtgcagttaggccacctgccctgatggaagtggccaggtgcagttaggccacctgccctgatggaagtggccaggtgcagttaggccacctgccctgatggaagtggccaggtgcagttaggccacctgccctgatggaagtggccaggtgcagttaggccacctgccctgatggaagtggccaggtgcagttaggccacctgccctgatggaagtggccaggtgcagttaggccacctgccctgatggaagtggccaggtgcagttaggccacctgccctgatggaagtggccaggtgcagttaggccacctgccctgatggaagtggccaggtgcagttaggccacctgccctgatggaagtggccaggtgcagttaggccacctgccctgatggaagtggccaggtgcagttaggccacctgccctgatggaagtggccaggtgcagttaggccacctgccctgatggaagtggccaggtgcagttaggccacctgccctgatggaagtggccaggtgcagttaggccacctgccctgatggaagtggccaggtgcagttaggccacctgccctgatggaagtggccaggtgcagttaggccacctgccctgatggaagtggccaggtgcagttaggccacctgccctgatggaagtggccaggtgcagttaggccacctgccctgatggaagtggccaggtgcagttaggccacctgccctgatggaagtggccaggtgtcctgtccctgtcctagtggtggtgaggcccctgccgcccccgccctgcccagtgcttccttgctggcagccagcatggagctgggctcagtctttccacgagcactgtttgctgctggctgtcagaggcactgatgtctcctggggcaagaaagcatgctggatcctgcatccatccgcggggtggaataagatgtaagatgcagatggtggccgggcgcgctggctcacacctgtaatctagcactttgggaggctgaggtgggcggattccctgagctcaggagttcgagaccagcctgggcaacatggtgaaaccctgtctctactaaatacaaaaaattagccgtgagtggtggcgggcgcctgtagtcccagctactcggtaggctgaggcaggagaattgcttgaacccgggaggcagaggttgcagtgagccgtgatcacaccactgcactccagcctgggcgacacagcgagactctgtctcccaaaaaaaaaaaaaaaaaaaaatgcagatggcaggtatccatggtgtcacaccagggctgcttcatattgtcagcagttccgggttgtctgagcccagagacctcaaagcagggccacagagcgccttgaggccacttccaagtcctgtagttccccacagcacccagctgagcatggctgagccctcctccctggaacagctgggttgtgcctaccagctgaggccaggacacaggggtgccagtcgtccatgtgacttccttaaagaacccttttaaaccaggactttgcctggattaatcaccagccacacttcactctaagttggtgtggatatgtgccagatagagcaaggacagagacaggggccaggggaggtgcaggctgacttaagacaccatgcagagaggcccggcacgcagattcagagacctaggggatacctccagagaggaacttggtggtgctggccgagtgagggcagatgcagacagtctctggtgacgttagggctgacagtggcagataggcccggaaggaacaggccaggtggaaccagtggggctgcggggggcgggcaggtgccctagcgtaggctgctcagcatgttgctctgcctgggtggtcacgggggagcctgccagcctgacagcgccctcagcccagcagacagcctggcctttccctgctccaggtgtttcctgggcgagaaggagccacacctgaatgcaagggtgagggcagagctatatggtctggagcccaccccaccttcacacagaccctgtgcctctgcatgttccccatggtcctcactgcctgtctttttggaactgcaatgctggtccccaagattcacggcttcatcagagcgggccaccctgctgaccaagtggctcagagcccaggcccctctcgggcactggagtggactgggaggcttgaggcagtgaacagcctccgccctcacagggctcctgtgcctggtgcaagcccctggggctgccttctgttttacaccactcagcactgttggcagtagagcccttttgtcttggtcccagctggggttggtgggtcttctgtgggtcagttgtagggcacccctgggagcaggggcagcacagtttaaatgcatcagggatacaggtcagggcctggggcttcaactgaggctgggggtctgcagacggcccctacaggtagccctgcctgcccccaccccacccaagctcccaggtgagacacagacaccacacttccgctttcattcgtgcaaagtgctgcccctggacattgctcccactgcagcctggacttctacaaaggggcaggatttattgttcacctgcctggggtgggccggctgcagggactgggctttcccacatctggctgctctgtctttgcaggtcagagtggtgctcagcggctcagggccccggagctggtggccgccggcctgggcctctgcaggccgtggttgtagcctgtgttgttagtgcagttggggtctggccaaggactcgtgtcttctttagaaatgtttttcctttttgcccttgcctgtgtctgatcctgactcactgtgggaccctgagcaagtaacatcctctctctaggctcagtatcttcatctgtgaaatggggacaagagtagcacctgattcttgaggtggttgtaaggactggatgaagtgggcactgcgcccagagcaccacgtggcagttgcaggacacagatgccatggccctcattgttggtgtagtcactgctgccgccaaggccatccagcagccttggaggctccagggcgggcctctggcctcagatgaggtttctccctggcgatggtggggcttagttttgggataataagaccttatccaaaggtggtcttactcagcagaaggcccagaatgcaaagggcttcctgtgcactctgggctatggagccccatgtgtgatgtgtgaatagaggaggtgcttgggcccatgacattggagtaggggtcaaggccttcggtagcccatgcagtgagggccgagcctggaccactggccatccctggtgctggagggctccgaggaccatgttctggctctgctcccagtagagggaggggctctccatggagtcaagagagaggagggcattggtggccacgggaggtggcatttccagcttcagacctgacttctgggctcctggtcactgagccagggggcagctgcggggctgcggctgaccacctcggggactggcagaggctctgcgtttgctcctgaaagggccaggtgctcccttggctgctgtctgctctgccacagcaactgccctctgggttccctggcaaacagccttttcacctggctggtggcctgcctcctggaggcagcgatggggaagtgcctctggagaaggggccgcgtgtcccgcccttcctgtagcagctgtgctggtgctgcagcaggggccagctcccagggaggctacagggcctccctggctcctgcctctccatccgtcctgccctttgtaacatgcccttccctcccgcggtggccttcctggccagccgcccacccacctgcttggcctgtctggtgcattcccactgtcctgtacccctcggcctccttgagccccccagggtcctcctgacaggctggtgctttcaccttgcgggtcctgtgggacaccgtggggggggggggcggcggggctgaattcggttcccttgggcgttccccacctgatccgcgtcccccgaggggtgtgggggctcccgcggccacgcctcccacctccctgcgccattactccattgctgtgtgtgcattgtggcctccctggagagcggcgggcgggcggcagacggggccgcgctcaccgccagtctccccgcagcaggcagcagaactcggccaaggcgcgctcggtgtgggagcagcgggccagccagctacggctgcagaacctgcgggccagctgcgaggcgctgtacagcgagatggaccccgaggagcggctgcgcttcgccactacgcgccacctgcggcccgacatgaagacgcacctggaccggccgctggtggtggagctgggccgcgacggcgcgcgggggcccgtgggaggcaaagcccgacctgaggctgcggaggcccccgagggcgtcgaccctccgcgcaggcaccaccggcaccgcgacaaggacaagacccccgcggcgggggaccaggaccgagcagaggccccgaaggcggagagcggggagcccggtgcccgggaggagcggccgcggccgcaccgcagccacagcaaggaggccgcggggcccccggaggcgcggagcgagcgcggccgaggcccaggccccgagggcggccggcggcaccaccggcgcggctccccggaggaggcggccgagcgggagccccgacgccaccgcgcgcaccggcaccaggatccgagcaaggagtgcgccggcgccaagggcgagcggcgcgcgcggcaccgcggcggcccccgagcggggccccgggaggcggagagcggggaggagccggcgcggcggcaccgggcccggcacaaggcgcagcctgctcacgaggctgtggagaaggagaccacggagaaggaggccacggagaaggaggctgagatagtggaagccgacaaggaaaaggagctccggaaccaccagccccggtgagtccgcggctgggcggggtcagggagggaagggttggccggggcggcgcgggccccagcggtggctgcggccatggggtccacggcggaggctgcagccccggccacgctgccatgtccagagccgtcggggctggggtctctgcatgccgttcacgtggggtggtgacaatcctgccttgcagggttgacctgtaaaaggcttggcagggcgtgtatgctccgtaaaaggcttggcagagtgtttgtgctccgtgaatgccagccgttatttaagaagggagggcttaagggggaattgttgcgactggcttggaaagaacaaagtggccctgggagaagagaaagttggggattgcagtggaggaaggagaggcagaagggcccaagggaagcctgagcaggccagtgggctgggcgcagagcggggtgtgggggccaggctgtgtgaccatgacagaaagaaccccagctagcccagcttgctccctggggcaggactcaccaaccccgtgagggcctggggtaacagtggtccagtggccaagaccagcagtcgccaggtacccactggccacaaaccaaccagaatacttgccgctggaggccccagcccagggtcaacccagccgccgccctgtctttgtgtgtgggtgggtcagccccatccctgcctttcggactaaagacacggaggtgtatagagtaatttaaaaaacgtacagaaggccagagtagcagagcaggtggttatggatttagttggtctgcatggaggcttaagggttttggttgataggattttgctgatgtgcattattattattattattggagacaggacc

SEQ ID NO: 12282 - DNA, 6000 bp, Homo sapiens
ttacagtctttcattaattataagcattcatttctgttgggtatataccttggagtagaattgctgggtcatagagtatccatatgattaactttagtagatagtgctaaatggttttctaaagtggttgtaccagcatacattctcaccagcagtgtgtgggagttctagttgctccacagctttgacaacatttagtgtttttctgtttgcttaaattttctgtctgcagaaatttagtcattcttatggggattttatgtcagcatatatttattcacttattttagaaattatttagtaataggtggacatttagctaatttatacctgtctttcttctcttttctattctctctctccttttctccctaattttaatggttatattatttttgattctattgttatttacctttataactttctaccattcacttgaatcattatctcttaaccctgaaataagattttagaaaactatttacctatagatttagaaagggaaataaactttatataaatatgaatttatgcaaatgcatcaatgaacaataaaggaaagcttatactaaaaactcctacaaatcataatattagtaggaaggctggagaattggaggattttgctgggggaatttggtttgttctatgctgagagaaagggggaaggaaaaaaggtgaaggaaggaaaagggaggaagggagagaaagagagaaaggaaggcaggaagaaaggaagaaaaaatgagagggaaggaaggagggaaaaaatggaggaagaggaaaagaaaagagtgaacttgtgtagccaggttctctggcctgcagtgacttctgctgggaggacttgacaggatgtgtaaccattgaagacttgtcaacagatgccgcagggaatatatgagattgtttttttcctaaaagggagtataattttcccatagctatacccagataatttcatccacatagatggccaatttacttaaaccaagataaccccattattccttttcttgattaatagtcatgggctttgggagatttttttgcttgagttacaggaataactgtttcaactctcatgctttttggtttctgtgggtctcagccctcaggtctgcagaagagaatttaattatgactaaacacaaattctgcatcctatctcctgctttgtaggtattgactaatcccacttcacagtgagtctagtcatagtgattaagcttttagtgaattcacaaagtagttgctccagattcattgaacacccaccattttccaatttatcttactatgtgagggtgctgactcttactttgttccccaatgtgtgtaaggacttgacagaaaaagccacacattgtttagcttaataaaagagaaattttaggggactttaaagactgtctcaattacttgatgattatcatgaggaacacttgtttaaatagtgtgactccaaccccccaccagaatttaaaataaaggtagaaggcttggggttcagcttagtttataagaatgggctttctaatgcttaaagctgttttacaaggaaatgctctgcttatgagaaagaggatatctaatgccaaaggctgattgtgtaggaagagagttaatggtagcttgttggatttttaaagtcagatctattaatgtctatttcactccgagactctatgaatcaatatgctgcattacactgaatctgagataccatctatgataaaatgcatcctgatttcagagaggtttaccctctctgaaaaattgaaggtgttaaagttgatgaaatatggtttatattctcttatttcacaaggagaaatttttggatcaacattaatttgcagctttgattattttctctgtttgccctcccctttcacactttgctgggttaagttagttcccgggtatacctttgggttttcatgtcctagagataaccaaaggaatatatatttcctataaactcttttgcagtgaagcacatgactgcatacctagagcaaatggggtttcaagagtttcttctgattattaattcattcacagactagtagaaccatgtaaacttcagatcaaagagtacctagggctaacagaggactgttgacatttgacagtgtgttgagatctttttttgtggtttttagaatactatttaaagtttacttttcagaatatttcaaaatgttatattttgattgatatacaaataaaatttatatatttgcttttcattttacaaagaatagctattatttaacagtatggtaatttttgctttaatcttaccacattaatttgcacattatttaatgcctagagactatgaagaaaaaaaggtttatgccctacttcccatttaccttttgaaatttattaacatccaccttttgtaattgcagtgactcttctctagtaaagctaagttgctctagaaatggcttctaacgtgtattccagaatttgaatgctggtgattttcaatgtgttcttagctttggtgctgtgattctccattaattttgtaaaaaatatgatagactttcactttattcttccagtttctggctattaggaactttggaaagacaaatgaatatcagaagaggaaagggtcagttttctggttgcctacaatcacatctaatttagcctcatatgcagttccaagacatttttggtacctgtcaagtgcaaaaaagaaatgcagagatcatcttcaaacaagcctttaaaaacagtgctttaagagaagggcaattgaaagctcatttttagactgaacagctaaaaaatatgacacatgcagtcactactcatcattacatttttctaagtacatctaaaaatctcatcagttgctctgagtatgcactgatgtgctggaacagtctttcatgacagataccctttatggcagggtcattttccccttcatgggtggatgtgggtgaaccagggtctcttggccctgcacagtgaatgttcttggatgatgtgccttgatatatctgtttaggtatatcttgatatacctaaagagtgaactttcaaggcatccaggttaaaacacaggcttttcatctcttagggaatttatatagtcataccgatatacccctttgtaagcaactaaaggaaaaagtaaatgtttactttaaggaataatatgctgacttttattctaccccctagttggtatttggttttcatacctgtgtaattttgtaaactaagcataatcattttgatttgtttttgcgagggggaggaatctggactaaattacggtatttccatgaaatgtcactaataatttcaaatccatgaacttagatagggagtgagaaaatgtgaaatggagcctgtggttttctcattaaatggcgttgtgtgctgcaaacattgtttagagtcttattttgtttaatatgggtgtgtgatttctagacacagagggttgtttaaaaagataggatgtatgccctgtgagtctcttttacttaaaatggcaggattaatattcatgtaacactacacacaggggcacagctgtgggattttagagctctgtattccattcccgtaaactagccagtttcagaacctctgcttaatcacactgaccactgcaactcagattatgatttttacagctagtgccacaacaccaattttcccacagcatttctcaccctctccccttccctcttaatccttcttcacctttgcctcctgggaagatctggcaatattcaaataggacagagaatgcttgatttcagaaagaaatgaaaatacatctgttgccattgcaacagataagcaaccagacggcccttttcaaccgggagagattttaggcatcactccctttaatggtgagtaaagccattgttttcaggttttgttaatttgtgatgcccccaactgccctctctcatttgatcaaggacatgtggacagctcagtctggtaaaataactgacacaaaactcatgagggccagccggctgtcctaatgagcagaaggcaaaaacatgaaagaacaacaaggtgcaggggtcacagaatacacaacacacaggagctccaccacgaatccgtctcatgtcctcctcgctgcttaaccgcccagggtgagaggggaaactgaataccccattcctaccccggaaagagaaatgagttgaggtaaggagaagtaacagccttcccttcccaagaatcctcctctgccttaccgccacagtacaggcccttgaaggcccttaattgctgatggggatggagcagctagaatcaccttgggagcttttaaatatcctgattcccaggccacagccaggccaattaaattagactctggggaatatcaccatttaaaaaagagaaagagaaaaaagatccaggtaactccagtgtgcagccaagtctgagacccagtgggctagtctgagcaagctggagaagaaataagtgcggcatctgacaaggggatgaagctccactctccccaaggatacttaggagcgagttgttgttgcagagagaggggaagaaagggagcaggaagaacaaagttgccccttcctgtctttttctaagtcaactgcagtctccacccatccagtgcgggtaacctaggcttccacacgcagctcggggtggggggaagtgggtcccctggtctggggtcctgggcagggtgaggtgaccgctgggagcgctaccctgcggcgcatcaacagcctcaggcgtgggccctgcactctccagagaaggcggcggctgccgggtggagagcaatttggggacgcaaaagaaagctggctcgggcgcaggtggcgctcgcagccccagcccacagttgagccaatcgcgggcgcaagcgcagcctggtggcggcggcggtaacggagcgcggggctctggcaggagccggcggaggcaaaggcagcgccaaccgagagccgcgcgcaggctggagggagacccgcggcgaggagccagcgagagcgctcggcgctgggctgtttcccggccgagggaggcgaacttctcatggggaagaagtggagggatgcggcggaaatggagcggggctgctccgaccgcgaggacaacgcggagagccgcagacgcagccggagcgccagccggggcaggtttgccgagtcgtggaaaaggttaagttccaagcaggggtccaccaaacgctcgggactcccgtcgcagcagacgccggtgagtggccgggggagagccccagtctttgctttcttttctcccttcgcacgcgacttgagccctttccatggtgctgaacttgcctccctaagggtgagagccagggaacttgtggcgccgcttctaatgaaatagagtgctgggggctgtgaggaagggcgagaaggaacgtcttccctcccttcagcaggggagggtctcctgacgtctctggcggctctgcaaaaattgaaaacatgttcgagaggcgagggggctcgctgttagatcataagagttttgcagttaacagagcgtgtgagacgttgtcgagtgtattgtgactcctgtgtacgttcccaagggtctgtctgtgcagcatgtcgaaggtactcggcctccgctgaatgagggcggaatagaaagggcatgccatatttttactctcttagcacttgctctttccatcccacacccccaccattttaatgggagcgtttaattgtttgcaggatgtcatttgcatacagagaatagcaagaatatcccaggtgcttgtaatcctactgcttaacatatacagcgttcagacaagttttcccatgtgtcagctcctcttcactgtctaattagtgcaataaaagcactccagtgaaattaatataggcatcatatgtgtgtagagaagtgcagttgataaaaaactttagctgcatttgcattttgagtatgtgaatattatgtttt

SEQ ID NO: 12283 - DNA, 6000 bp, Homo sapiens
catcttactttctatgctgaggctgtggggtagaaatcacagtgatgagtactacaaattagcaaattggtttgaagattatttcagatgccaatattatcagtctaaggatcttgaagaaaaataatgataagcatcaaccttagcattttctatgggtcctaacctactcccttaggagaaatttgacaaattaatttacacaaatatgacagaagtaaacctacttagcaattaaacggcactgaagaagtcattctctaaaacagtttcttaatcatgactaatcctaagaatcaactagaatagggttacatatacagattcctgggttctaccctagaccaattgaatcaggatcatcaacggaggggcctgagaatctgtacttttagcagacatagccagtgatacacagggattatatatgtttggaaaatgcttcaaggagataaagccaaaaaaatcaaggagaaaaatctcatggaggaattatttgaatgcttctgactaatcaaacggtagtttcttccccttatttttattattattttttttgagacacggctccctgaatcacccaggcagcagtacaatggcatgatcacagctcactgcagcctcaccctccaggcctcaagcaattctcttgcctcaggcccccctccacccccagtagctgagtctataggtgcgcaccaccacgtccagctagttttttgtattttttgtggggttttgccatgatgcccaggctggtcttgaactcctgagctcaggtgatctgcctgcctcggcctctcaaagtgttggtattacaggtgtgagctaccacacccagcctcctctactttcttcaatgcactccctcactactggggcctctaactaatgtttcttcctctagtctgaccctatcccacaccctaaacaagttgctttccataccattgtcacagtaaaagaaactggatgtcaggcctctgatcaaaatctatcacaagtccttactatggttcacaggataaaatccaaagccttagcatgacatcctagactccagctaatccagtccttgcctttcttcttcagccttacttcacattgttagtccatttgaaccccacccttgaatcaccctgaatcccttccattgccttgaatagatactgctgttttgcctttgtgccctctgctcaccatggttttccttccctcttcccctggtgtatcagtcaggttaacactaggttatgctgaggtaacaaaatctcagtagatgaagatgacaaagatttactactctctcacccgttctatgttaggggttggcaagtttgtttgatttttttttttttctaaaggactagatggtaaatattttaggctttgggagcaacatacagtctctgttgcacactattcctcttctttgtaaaactctttttaaatgtaaagatcactcttatttgtaggccatacaaaagcaggtgactggctagacttggcccatgagccctagtttgctaacctctactctatgtgaccagtgctaaagacacatagacagcagggaactactcacatgggtagttctaaatgaatcgaatcactcggagacctgggctaatgcagcagccacctcttaaacatttcttgtcaccacgcagacacaaagagagggtttcacataagcaattaagtgctccggtctgaaagtggcaccctgtaacttaggctcacaaataattagccaaagttagtctttcgaccccatccaaccataagggggccaggacgtccaatcctaccatgtgtccagaagtagggagaattcagatcaccgggtaaaaattatgaaaaaagctcagagacaaacgctctgtgaagccttttctgataccttcatcctgcagccagaatagctgcttcttccttgcaatcttctagcactttaagcatctcttaatcagagtgctatacatagggtactacagttgcccacttgcctgcctcccctaccagatgctgagcttcctagataagcacttctgtatgcccactactttgcacagtgcccgttagccagggatgctcactatgtgttgcttcaacaaataaatgaatgtggtggattgtaggagtgaatgggattgcctctgcatttacctgacggcgtcgggaatccagcagtgtcaacttctctgaacccagttagttcaaccatttcagtctccacttatgatcaattagctctgttagttcaaccacttcaatatccacttatcatcaatttatctttttagttattagctactttctatcataatccaatgaatttctccatacaacctttttcttctaataaacaacaccttgcagagagctggtccttgaggccacggagcactttgatataatgtggcttggctttcttttcagtttacaggccaaaaggcagacacagagaggcacagtgatttttcccaagttacacagtcaatcagagatggagccaaaagttatgctttcttttgagtcaacaaaaaagctacaggattgaatacagagctgcagctaagttcactgaaagtttatttatatcccttggagaattagaaagtactcacacacgtttttcaaagttaagtcttattataccatatcaatgtatagcttgtagtatacctgtatctctgagtaaagtattaaaaacaagtcatatgactgtttattaatgctgcctctttttgtattgattccacccatcccttctactcctttcctcttctgtaaagcagtagctcatcagatggcatttcagaaccctgagaatatgaaagacatcatgcactaaggttttcctatcacatctcaatgccattaggtgaataacaccggcatgcatcttcactactaaatgtcatacaaacaaatttcagttgtttcacatgcaacctgtgtggctgctgcagtttgtatcaactatgtaaccacagggtgggcaaaatagcattcaaaatgagctatagtgcaagataccatccatacgtagagttaagccctttcatgcttagcagtcacaatcaggatatctttggcccacagaaacctatcctgactggaattttcctctcctgtgtgtctcctggatatagtaagttcctaataaacatctcctctgattgctagccttgacaaatttccaggagaaccagggcaaggagaagacagtgaggcagtgcccgctgctcttcagatcaccaacagaatagagtcagaatatgatattattgaaaccttccaagtttgaattaagataaaaacaactttttcaaaataccaaaaaccttttatttaagaaagtgaaatcgctcgatgtgccctcccactctggttagatgctcaacagaccacagcagacaatgcacctcaaccagggctaagtgtgcaagaaaactgaagtacacaaaaagcaaattatagactcaggtactgtcaggcacaaaagaagaaccaaccctttctaggagtcttgtctttgcttcctttattctttcctcgattcttgtaattgaatgttacaaagtatatcaagaggaataaacgtatggggcccctctcttccaaacaagaaaaggttaagcttttaattacaggccctcaaactatcattttgtgcaattagcaattaactataatcgttgatgagcaaatgcaaagctgcgctagcaatttcccttctcctcatcccaggctgggttatttcagtcttgttctattacagaggaccagccacaaccgcgcgcactctctttcaaacatacacactctctcacttaaagacacatttagttttcggcaaaacggcatctcagcgtgcgattgagaccggcatcccaaaccccacttttgagcagcccaaacgtttggagcccctccgcttcatcactttctgagtggatagaggaggcccgaagaagatgctacctaccagcctctctcaggggcgcaggagagggtggtagagagatgcttgttgcccctggaaactgcaagtaccccccaggtgcacgccccgtcagtggggaggcggtggcaacagcaacgatagttgcatcagcgctaactgctgctgctgctgcgtgttctgccggaggctgccgggagggtacagtaatgactgtagggagcgcacagccgctgcggcggcaggttccctggatcaggaaattaggacaggcacccgggattggaggcgagggcggcgcgcgagccaaccagcggtcgccccgggcccccgtgagccccaggcgaacgcgcggagcagccgggcccctagagcggtccgggtggcggcggcggcagccacgaccacgaccgcggtcactcacgcacgctcacactcgcacgctccccgcgcgggcacccggctgcccggcgcgtgcaagaggagcgcgtcgagggaaaggagggccgaagccgccgcgctcccgcccgcccgccgcgcctcccgttgaccacgccccctccggccccctccccgctgctcaccccgctctccggccgccgccggtgcgggtgctccgctaccggctcctctccgttctgtgctctcttctgctctcggctccccaccccctctcccttccctcctctccccttgcctcccctcctctgcagcgcctgcattattttctgcccgcaggctcggcttgcactgctgctgcagcccggggaggtggctgggtgggtggggaggagactgtgcaagttgtaggggagggggtgccctcttcttccccgctcccttcccccgccaactccttcccctccttctccccctttcccctccccgcccccaccttcttcctcctttcggaaggactggtaacttgtcgtgcggagcgaacggcggcggcggcggcggcggcggcaccatccaggcgggcaccatgggcacgtccgcgctctgggcgctctggctgctgctcgcgctgtgctgggcgccccgggagagcggcgccaccggaaccggtgagtgaggacgcgcccctccgccggcgggcgggacccagccggggcaccgggagaccccgaggcgtaggtctccgtttgcccacccgcctcctaggaggcgcctctcggttctcctcgccttccctccctcccctccgtggtggcgcctctgagctgtcagcgccgaggctaaagggagccgggcttggggaacagcggggttcggggtgccccgacgcctcgcctgaactagtcttctgcccctcactccgcctcccccagagccgctgcttcgcctcgtttctcgccctcttgacgggcgccgaggtgcgtgggcttctgagcattgaacaatggttctgcctcctctgccaggcgcagtgttgggaaggaggcagagggccaagacgtgtgcggcagcctcgggcgcaccctcgaaccccggggagtgcgggagcggacggggggagaaggtgagcgcctccggggacgcggagcgccaggggccggccgggcttcagagtcttccggcggccgcgagctggcgcacgttcggtgggcggcggccgggaggctccgcggagccgagggcacccggactgcgactcccccggcgcggggccgcctctccggcgtgcggggtaggggagcggcggggctttacgcaggactctgctctgggcgcttctcctctcccttttccccgcctcgggcggcgtttggaaaccgctcgggtctcccgtgtagctgaacgcggagggggagtggaggggagacttaatcaggttagtttgctgaccctccttcccggtgacgtttcctcgagaggaattgagtcctaggctagtgactgtaattagccttcattctacacaatagctcaaaggagcagcgcgagagcgagcgtgtggccctgtcttgttgggaagggcggcggtgactactgtcgggtccccagactctgccgcgggggcctggggg

SEQ ID NO: 12284 - DNA, 6000 bp, Homo sapiens
agtactaagcacttgagatgcattatcgcactgacacctcaaggtcaccacccaaggagggagatggtattttgcttgtgttttactaacgaggcagtaggaatagagctggggttggaaccacgggttgtctgaagacctgctcagcactgccataccagggccccagccttccctgtgcgcaccacgtctggttcagggatcccaatagcagaggaagggcaggggaggctggaggcccacctcagaaccatggacttttcaggagggaaaccttgttctgagctccttgaatctgcgggaaaaggaggccatgctagtgagtccccatacctcaccagtctctgcagacctgccagctgtttctgcagcttcccagggtcccaggcacccccactgcagctcactaaagtcaacagtgccagggtggcagcggaggtcagacagatggccttcactgcccagctgagcagctcacctgctctaggcaggcagtgcctggacaaccctgggcctttgtagcacttgtgagatggacacaaagcatcaggcttagctgggaatggagtctggtctcctgagtatagggtggcatttgtgttaccagctcatgattggagaaaaatcaaactggctataggtaatcactggtgaggccctaccaacttctgcctagaaacgtctattctcccatctcagtaaaccatgcttgccttcatcctgctccctgaacacaccaggcttcttcctgcctttgggaacagcaccgtgtccccaggttgttacatggtgagctccttgtcattcacatctctgctcaaatgtcacagcagagatgtcttcctgggcttcctgccatctaaagcagtccctagtccccctctgcctctctccatgctatcatcttctgtttattattatttattttttgagatggggtctcattctgtcacccaggctggagtgcagtgccactatgacggctcactacagcctcgacctcctgggctccaggatcctcttgttttagcttccctagtagctgggcctatggatgcatgccaccacgcctagctaagttttttttgtttgttttgtttttttttgtttttttgttttgagatggagtctcgctctgtcacccaggctggagtgcaatggcgtgatctcagcttactgcaacctccctttcccagggtcaagcaattctcctgcctcagcctcccaagtaggtgggattacaggggtgcaccaccatgtccagctaatttttatttttagtagagacggggtttcaccatgttgaccaggctggtctcgaaatcctgacctcaggtgatctgcccactttggcatcccaaagtgctaggattacatgcctgagccaccgtgcccagtcaagtggtttcttttttttttttttttttttggcggggggagtggatggagtctcactctgtcgcccaggctggagtgcaatggcgtgatctcggctcactgcaacctcccacctactgggttcaggcgattctcctgcctcagcctcccgagtagctgggattacaggtgcctgccaccacgcccggctgattttttttttaattgttagtagagatgtggtttcaccatgttggtcaggctggtctcaaactcctgatcttgtgatccccccgcctcagcctcccaaagtgctgggattacaggtgtgggccaccgggcccggctttttttttttttttttcttttgtagagacagggtcttgctatgttggctcggctggtcttgaactcctggcctcaagccatcttcctgccttgacctcccaaagtgctggtattccagatatgagccactgcactatgcccttattttctttagagcattcaccactctgaaattattttgttggtagagcttggcggggggtggctcatgcctggagtcccagcactttgggaggcctgggggggcagatgacttgagctcaagagttccagactagcctgaacaacatgatgaaacctcgtctctactaaaaatacaaaaaattagccaggtgtggtggcgcacacctgtagccctagctacccaggaggctgaggtagcaggagcacctgagcccaggaggtgaaggctgcagtcagctgtgattgtctgggcaacaggagtgagaccccatctcaaaaaaaaaaaattaaaaaattttaatgacaatactgtgatgagcgtgacaccagcacagtgagcactgagtgagggatgacctattccatctcacttccacctgtcctctgtgcggccagctagactgtaagcaactgaaaggcaggctgtcctgttctgtgttgtcttgcttctccccctcaggcctgatccaatgtccggtggtactgctttggtttctccagtgtgacgagcctgactgaaggagagcaggtggctggtcaccagcatcctcccgctaactctcacctgcccacttgcatatgacctcagtagttgatgtggaagtactcatgattatactcacgaatcctggtgtgcataaggtcagagcctccaattcactctccctttcattcattcaagaaatgttgtgccaggcgcagtggctcatgcctgtaatcccaacactttgggaggctgaggcgggtggatcacgaggtcaggagatcgagaccatcctggctgacacggtgaaaccctgtctctactaaaaaaaatacaaaaaaattagctgggcctggtggcgggcgcctgtagtcccagctactcgggaggctgaggcaggagaatggcgtgaacctgggaggcggagcttgcagtgagccgagatcgcgccactgcactccagcctgggcgacagagcaagactccgtctcggaaaaaaaaaaaaaatactccccacaaatctccacgctgaccctgtgaggtattattaattagtatgtcccattttttatatgtaagaacaaaatgaatcttgacctttcagctgagaaggcgaactcaatgctcatgcccataccactgcacattctgcctcctgatggtgatacccatgaaggatgtggtgctggaatttactcaagtccccaaaaggaggcaccctatattccagaagaaataggtccaaatccttatcagaccaaaatttcatctttatttttattattattagttttctgagacaggctctcactgctctgttgctcaggctggagtgcagtggcccaatctcggctcactgcaacctttgcctcccgggttcagtgattctcttgcctcagctcctgagtagctaggattacagacgtgcaccaccacgctcggctaagttttgtatttttaatagagacagggtttcgccctgttggccagactggtctcgaactcctgacgtcatgtgatctgcccacctcaacctcccaaagtgctgggattacaggcatgagccactgtgcccagcttatttttattttttgagacacggtcttactttgttgcccagggtggagtttagtggtgcaatcacagctcactgcagccccaagttccagagctcaagcaatcctcccacctcatcttcctgagtagctgggagtacaagcaagagctacctggctaatttttttttttttcctgtagaggcagagtctcactatgttgcccaggctggtcttgaactcctggctgaagtgatcctcctgcctcagcctccaaaagtgctgggattacaagcttgagccaccacgccagtcccagaatcttttttttttttttttttttttttttttttgagatggagacttgctctgtcgcccaggctggagtgcagtggcgcaacctcggcttactgcgacttccgcctcccaggttcaagcaattctcctgcctcagcctcccagggatctattaatgtttaaggacaagtggcaactgtggatgcccaacatggttacttaacaagaaaccaatttttcagaggccaagagtcccaacagggccgagaatctggccactcgcctatggctctggaggtggcatgacaaataagggtggcatgacaaatataggttaactgatttgttgcagggaccagagatcatagatggtgaagttaactaagggcctccaaatccgtgtcctttgtgccaacaggtgtgccaggctgctcacaagacaccatggtacgagaaaggatttctcgtagtcacctagacaccaggtttatggctgtgtcgcagcaaagttgggtgtgacttatgattttcgttctgaaccttatttgttagataggtcctggagtccttaaaacacgcaggtgaaagtcagggagtaggagccatcaaaattcgactctggtgggactcgaacccacaacctttgaatgaccacactaggctcagctagaagtccaatgcgctatccattgcgccacagagccggctgcggaacccggccgccccgctcacctctgcctgaaaccgccctcttagcgagcttctaggtgtggtgctgggtgtttgctgaactcggccggggcccgagagcgtgctccgggttttcggctgtggtgtggactggggtgctcttcctacatccgggcgctggggacagcagggggcaagggccggggtcggcagggaggaagggccggggtgaagcccgcctgtctcctcgcggactcgggggtctcctcggctgggtggggccgcgcggcgtggactacaactcccagcgtgccgcgcggcggcgccgcccgaagccgttgcgcgagcagggcgggctggggccgagcggcgtcaggcgcgctggggctgcgctgcgccgccggctctgtggcttgccggcttcggggaaggtgcggcaggcggtgctgcggcctggcacagcaggtttggggtgcgggaggcgggcggggtaggagcgcggcgggcggggccgggcggcgggcggggctggcggggcggccgggccatgcagggcgcagagccggctaaaccctgctgagacccggctccgtgcgtccaggggcggctaatgcccctcacgctgtctacgctgctgcaaccgggccgcatctggacggggcgccgcgcggcggagccgacgccgggtgagcatagaccgggctggtgggttcccgggtggggacatgtgccaggccgagtcgggcgaggtggcggtgcggaccccaggtggggggcgcgccctgcggcgctatttccccgacagacgcactgttaccttgctgtctaggggcgagggcggcacgcgtgacccgggacaggggcccgagggaactagtcaccctcttctggcctcttcttgccccagccttccaggacaggttcctgcccctctgctatggcgggctatgggaggccagagatctgaggaccctggaccctggcgttggggttgaggactctggttcagttcccccgcccccggcttttgcttttcgcgagggggagggggagatggtctcccagggcttcttgtggtccagaccattcccttttcctggcttggaggctctcaggccatttcacatttgtgaccttcatctactcccaagaacaggaaaactcggagaaaaacagtcccatcagatgtccccttgatcgagtcctcaaagctccaggaatagaacccaagagtcctagctcaacccagcccctgaagcacagtcaagtcattcgccttcccctaagccctagaccccaaagattcatccgagtggctgtgtgtgtctgtgtgatgggtggtggtgtcttcaaggtcctcctcgcctccctcaatcagctttgccccctgggcggtcacctttcaagcacttccaggctctaactcgttttctgggtcgccctctatagaccaacagacgcactgcgatacctgagtctatgggcagggaccaagcagggctccttttccagggagctgcccctttgacttggcctggtcatccacagaacctccctgggttctgg

SEQ ID NO: 12285 - DNA, 6000 bp, Homo sapiens
gcacactctaagctctgagagttctacctgctttaaaccagtgatttgagaaacagtccctttcaaatgttcatcaaattgtgaatttttcacttatttaccttcacagaatatatgttatagaggaatgttttaaaatagaaattgggtagaaggtataagcatataggcaagaaagaatataatctaagaaagataagcttagggtatcctgtgtggctactttatatcaagattcatcctgctccgtgattccttcatgggtaggataatcaagctgcccgatttgcttaggacagtcctggtttatgcttatcttccagatataattaaaagtgtcccctttctgctgagactgtcccagtttggacaaaaaattgcatggtaaccctaagtataggggaaagacctgccccaggaagaattagcaacagaatcaattcctctccttaggctattttaacattagcaggcagttatggatattagcactgacagcttcaatgacttttagctggttgatgttagcctaccccttggctagaaaggctaaaatcttctctcccttgaattctaagtacaacatctcttgttacactgattgagttttctcccctttctacctgatgagtttctttgcccctgtagaccagtatgggtgacaatattcagtactggggtttggccttcattctccacactaaacacatgtgttgttaggggatgccccttgaacagtatattagtcagctcagactgctgtcacaaaaataccataagtgggtggctgaaacaacagaaatttatttctcatagttgtggaggctgagaagagacctgccagtagatctgatatcaggtgagggctgtctttctggtttgcagatgaccatcttctcactgtgtccttacatagtagataacaaagagagagagagtaagcgctctggtttctttttatgagggtgctaatcccattcatgggggctccaccctcatgacttaattacctcccagaggccctacctcctaataacatcatgttaggggttaggatttccacacgtgaattctgggtggagacaaacattcagtccccagcaagcagttctactatgatccagtcagaagatggaatgtttagctgttaaatgaagtacttgaatgacttggaagaaatgcatgtagaaaatgaaagtgttacttaatctcaacattataaaacaggcaggaagttaaatgtaaggtatctccgagttgtaagataatgggcaacctctgtctgaccttgacttcagtttcctccaagtctctcaaatgagcatcttcctcctctgaaaaaaaataataatttttctgaagtttcccctggatattggcagttgagtgcccattgactcagcttttttttagagcaaaacatgccaaaatgcagtatgagccctcatgtgaagctagggctgtgggtaaatgacttcaactttaacccttcaaataaacgtttgtagtaaagaagacgtgtgctgaatctgacttcgtgtgcaacaatggccagtgtgttcccagccgatggaagtgtgatggagatcctgactgcgaagatggttcagatgaaagcccagaacagtgccgtgagtgtaacttgctttggccttgaactttgccaagttgttcggtgtctaacatttctaagtattgcttaatctcctacttggtattcatttttctttgcctgccttaaagtttaggtcaattgactccaagggcagtcaaatcattaccagtttatcagcctcctttaaagaatgttctccctggtccaacaagactgacattctcttgggtagcttcactattgaatacttaaaactgaagtcagcagattcaatcaagaactccttgactaggtgcatagatttcaaatgtctgtttataataactgagcagatggtactctggtcctggaagctaagtcaagaagtgagggttccctatgggccaagcaaaagcttttagaagcacagcttatcatactattaaaaagctattactgaagaggtaaggtagctagtaattgggtgatatagtgactcctgacacacatgtaacctcaagttactaaaatggagatcttacagcatattcttaaataagagaaacttcataggtatgcaagtatatacctgtgtccttaggaaaaagtctatgagaccataaagaatgatggtttgggatcatataaattgagatcacacgaatgtcaaggcaaagaaagtcttagagtttgagtcagtagaggcctgcactggtagaaacactaaaaaaggactaacatgaacacagtttaggtctaaagtgtgattatgaaagaaaatcaaatagaaaggaagataaggctgttactttcaattttctagataagaagtgaggggagtaatattggtcaaggcaagtgagttcaaggcctgtgagctaaagacaggttgtgtaaagattcagcctcaacttttagtggagaatgacctggtcaagtcaagcattagggcatgcttctactttgcaagatgtcaatctaaaggacattgtgaaggaggcccataaaggaatctaggcaatagaagattttgtaggtgtttgaccatctgacttttcatgtatttgagattagatgacaatatctaggtgtgcccacttgacatccaacagataaatagtggtctaggagcaggccagccaataaacttcaccacgccaagtaaaacaaaagccagaactgagcacgccatgggaccttgaaggagtgacgtggtcaaagctgtcacgtacactgccaggtagcataggttggcacagcttctaaggagtggagctgatgaaagagctccccgggcttcagccagttagtagaatttcaccagtgtgccaggctactgagtcacaggtattagcgcttccaggcagcacaggagcagcagctttgcattgatcagttctgaggctcttttgagactgtatatcatcaacagatatgagaacatgccgcatacatgaaatcagctgtggcgcccattctactcagtgtatcccagtgtcctggagatgtgatggtgaaaatgattgtgacagtggagaagatgaagaaaactgtggtaagaagatcagtgttgagtgacgtaacccaaagacccttttcctaaaggaagggtgggcaggggaaactaatctaagcctgaagacgcactgacattgactcacttttcagtgacttcactatctgctcaattacttgtccttcataactgccctaaaaccctaaaagacattcatgtggcaattgaccatcgcttggtgtttcttttaggcaaatagaaataagaaggtaagtcattcaaggcacttatatatagaagtagctcagggaagcagcaattgtgtgggcttttgttttgacagtaattcatgtgtcttttgcactttggcacaataaaattagaaggtgagtagggttggcaaacacattcataggtctaaatttgattgggttattggaataaattatttgagtattatacaagcatttctttgcccatgaactagattctggcataactttcccagaaaaaaaaaaaaaaaagacacagaagcatgaattaacatcttgcctcagatacccaaagaaaagtctacccaactggtgatacctttgtctcctgttgcagttcctgtctctgaaagctaactctgcttcctattctttcatgtttctggtcttggaaaatctttaataaaatgctgcatgttgaaggtgagggcctgggaaaatcactaggttgaacaaacagtgctttgaatgttctttcaagctactgccctttttatagggcctctaaaacctacagctcccaagtctgacaagcatgggcctcctgatatggtagtagtcaagggagctcagggcacttacagttgaaacaccagtcttgtgtgtagaagtcgcctcctgaggtcaataccactgcacctagtccaatgagttttagtgttcaatcctagaattgggttttctgtattggtaagccctggtgctgccaagtgtttcccttataaatctagactttgcttcccaagagagtcgtggtctctattctaattgccaccaaattgtgaccttgaaacatttggcaggaatttaagtcaaagtaccaattggctagtaggactagcttatcattgtcagcatacctgattgttaaatggtgattatagccctggcagtgactttttcaaaatggaaagtgtttaagacttgttattcctgatccttatttaaaggaccaaaaagaggaaccatatatggtggtatgtggttcacctcttttggtgacaaagtcttaatgcttgttgtgagtattacgttgcatgatattctcaactagtgataagatctgacaagcagtatgttgattcaaggacaactcaatctctgccttccaaattgaaatcccttgttacagtttgttatttatgatggccacttttagaatcaattgtggttctcatctcaaattaatttccagtcttcaactattttcttggttctttatttctgttcttcttatttattgtgtgccttcattttttgtacaatgagactgtacaaaagttcttgatttaactccattgtagcctttaagttgggctagtaagttaggattaatgaataaagatcaatgtattagattttgggacaagaatcttgaacggaccaatcttgatgcattttcagtggggcatcctctctcttaataggcaatataacatgtagtcccgacgagttcacctgctccagtggccgctgcatctccaggaactttgtatgcaatggccaggatgactgcagcgatggcagtgatgagctggactgtgccccgccaacctgtggcgcccatgagttccagtgcagcacctcctcctgcatccccatcagctgggtatgcgacgatgatgcagactgctccgaccaatctgatgagtccctggagcagtgtggccgtcagccagtcatacacaccaagtgtccagccagcgaaatccagtgcggctctggcgagtgcatccataagaagtggcgatgtgatggggaccctgactgcaaggatggcagtgatgaggtcaactgtcgtaagtagctttctagcatggcatgttcagttctcttccctgtatcaactgggacaatttgctggcttcattccatggtgtttcctccctttgtagcctctcgaacttgccgacctgaccaatttgaatgtgaggatggcagctgcatccatggcagcaggcagtgtaatggtatccgagactgtgtcgatggttccgatgaagtcaactgcaaaaatggtaagggtttcttcttgttggttaagcaatggattgctctgaccagacccactcatggaatctctcttctttgtttctctttgtagtcaatcagtgcttgggccctggaaaattcaagtgcagaagtggagaatgcatagatatcagcaaagtatgtaaccaggagcaggactgcagggactggagtgatgagcccctgaaagagtgtcgtaagtgtacttgttgttcaagtacagatcctggaagtttgacacaatccagtatagctaacactgtgtggaccccccgtgatggctagttaaacttttgaatgtactgaagttcaattgtagacttcagagtgaaactttatgacttaaaagcccaggtaggacaaactagtttatagtttttgtttttgttgttttttttttttttttttttttgagatggagttccactcttgttgcccaggctggagtgcaatgatgcaatctcggctcactgcaacctctgcctcccgggttcaagcagttcttctgcctcagcctcctgagtagctgggactataggcgcccaccaccacgcccggctaatttttttttttttttttgtattttt

SEQ ID NO: 12286 - DNA, 6000 bp, Homo sapiens
aatcctcctaaaaaaaaacaatgacaacaacaactaggtgtttatttaagagagagacaaaatgggcaaataaaaataatacaaataacaggtaaaaacaaaccagctgatcaagtccaactattcctgatgctgacgccagggagaagactgtcctgtggctcctcatagaaaattactatctaatgtaataaacaaccctctaaacatcctttatgtagcatcttttatattttttggattaatttataatttttctaaaatcatccaaaaatattacataaaggatgttacatttaaaaataatagatggccggtcacggtggctcacgtctgtaatctcagcactttgggaggccaaggtgggtggatcacctgagatcagaagtttgagaccagcctggccaacatggtgaaaccctgtctctactaaaagtataaaaattagctggacgtggtggcaggcgcctgtaatcccagctactggggaggctgaggcaggagaatcgcttgagcctgggaggcagaggttgcagtgagccaagattgcaccattgcactccagcctaggtgacaagagcaagacattgtctcaaaataaataaataaataaaccaaatttaaagatataaatatttgataattttgctcctaatccctctgttatttttgaaacttaatccaaccttgattttatttctagacgtgtgtagattcctacttttaaattcaccctgaacgtatgttggcaatagaacgcttctgaaaccagtggaagcttctggaactctcgaccttgtttggtattgaaagatctttcggtttcttttagtggatagttttccctccgctgtgcctgagggaatgtaatttgccatctgtggctgtttgggaacattgaagagccccttgcttgccctgtggccttcctggtgcctaggaaggctggctcctcttccttcctctgtcctgtgccccctccatgaagtagaagcaggaagagaaaacacacccgtaacaatgtgaagttggtctcactgtatttttccagtgataggaggaatttcttctttgtctaagaaaaggaagaaaactgaaaaaggctttccctccaaaagtaatctccaatcaatcacgaggttaaataattttaaagcaatggtattttcctcagcctcggacgttgtcttcagctattatgaactgctttgacaaaaaaagtttcttagaacaacttcctttcaaaacatgcgtatctactggatgaggcatttttaaagatacaattcagatagaaaacatctgttttaagagacagctttaaagtgcttttactacattctcaaagacagtaattagaatacctgtcccccactatagaattccagtttttaaaaaagcggtcttccagtttctctacaccctaccttcattggcatcagcctgtgaagaaggggagattcaggtagacaacaggagaaatgtgttcaggctggattgaacacaatagaaaagtattttttccgtgtcatgcaatatgtaaatctttcattctagattaaattcagcttgtagcaccatgctggaatataattttagtgattcatatgtgacagaattaggaacctttctcatttcaattttttaaaatttatcgttatttacttattaatatttttttgaggcaggatctcactctgttgcccaggctggagtgcagtggtgccatcatggctcaccgtagcctctgcctcccgggctcaagtgatcctcccacctcaccctcccagatagctggtaccgcaggctaacaccaccatgcctggctgattttttttttttttgtagagacaggggtcttgctatgttgcccaggatggtgttgaactcttaggctcaagagatcctcccaccccggcctcccaaagtgcggggattacaggtgtgagccaccgtgcacagcctgtttataaagttaccctggcaatataactaatatcccatggtctcccttttgtaaaaatgtaaaattctagcctctttacaaattaagcattttagtggtgaaacaaacaggaggtaattagaaagatattcattttaagacttctcccccttgaaattttaggtgtccttcatttgttcctttatccttccattcactatataacatatttattgaatttctagtatatgccaggcaatgtttctggtggactgaacaaaaatcaagaacaaaagatacgggatctctttcttcttggggcataaaatccagctggggagagagacgttcagtacatttttaaaagagctataataactgaacatcacagagtgagccctaatgtaaatttgactttagtgaataataatgtatcaatattggttcctcagttataataaatatactaatgcaatatgttaaatatggggaagctggtgagtgggtacaaatatgggaactctgctttctgctcagtttttctataaacttaaaactgctctaagaatcactctaaaggaaataaacagaatgttattagaaagtatagtggagtgacataatttggactggggagtaaggaaagacctttctgcaaaagcgctgcttaaacccagaactagaggataagtgggctaccacgcaaagaagagatggaaaagcattctcagtgaagcaaagtggtatcatttgaattacctttggacgtaccattctggcttctctgtggaggatggattctgggatggcaattgggaggagagttgggggacaaaggacaaacgagacaagaggcaattaggatgggtcacagcttttgcttcctacttagcaaaatcctagaagagcagagtgacagtaggctgtttcctttgttcagctcatgccggaaaccgttaggttatccatgatctgggtgctaggaagaaaggagactgtgtcagtagcagagcaagacagggtttccaggtctcagtttctaagatctttccagtggttcaatgggatttatagaattaagaatgtgtgtgtgtgtgtgtgtgtgtgcgcgcgcgcgcgcgtgtgtgactgcaaccagttaaaaactgcaaagggaaaaaacttttcaaataactagtacccagctgttaacaacagctttcatataagtctgtaagatttaatttgcaatagttgtctttattcctgttactggactattggaatttattttggattttgtttcttccaagactgtatgttgaaaaactgtatttaagcagagcactgttttagtacatcaatattgaatggctcatatcacagtttctggggatcgtgaactcccaaggaaaaaaattctagtgggtaaaaggaagtgcctgccaagatagatttctattgattgtggaactcttattagcagcataaaaggttgaagagtttaaagttctctttccctttaaaattaagcagctcagaataatccacttcaccatttataattatttacctgcctatgtgcaagatttccaaaccattaactatttatatatatttcctttacagtaaaaaattgtatatgatggctgtacagtctatactaaaagatataataacacattgaaaaatctctagcaaatgagcacacatttcgtagcacttagctattataataatgacgcaaaatggttaacacgtctatttatattgctctctagatttcaacttttttgtattcctggaaacagtaagaatccctcatttgagcagacttgttgtttgttttaggaaatagacatacatcatccgtgtaattttaagtagtccagttatgaatatggaatgaagggataaattcctgatgtctccattaagctcctctgtgtaaaatactccatggcaaagttgctgctatttaaagtagtgagtttgatcttggctttgatctaaaccttttgatcttgaaagaaggatggagtagcaataaagagagggcaagacagattttctttaaagaaatgtgataaagttaaagggatggtcaagacccagcaagcaacaggacaacccgactctccgccccggcccgccctcaccggcaggcgggttccagcaactgctgatgcggatgagaaggcctttggcgggtggaggaaaatcttggggtatcgcacatttttataaagtaagtgtaaactttctccctaattatgaaaacagattgaccccttctttttaaattctacccagtggttctgggggtccacggcagtctgagggctgcgggtccacactcgcgggagcgcggggctgggtttctctgcgccctggcctcgccccccgggaggtcacctgccgctgcccggagccccgaggggccactgggaaacgtctactcgagggcgtagaacccggtcccggagaaaactccactaggaaagttactttccctgcgcgaaagccaccgggaccaggtttccgactccaggagcgcgctacgctggctacgggcggggttccttccccgccaccgctccctccagcctgcggcgggcggcgcgggcccctctcgctgccgggaagccgctcgcagggcgcggagccgggggaggggtggcgggggcaaggtgcgcgggggcgcggggcggccggagcccggggaggggtggcgggggcaaggtgcgcgggggcgcggggcggccggagcccgggagcgggagcacgccgttcgtggggagaacaatacaatgccggcgcgggcgggagggcgacctgcgggaggcggcgcggccgctatacctttaaggcaggccccgcccccgctcggtgcccgcccgcccgcccgcgccgccgcccaggccccgcgcccgccgcccgcgccgcgcctgaggtgatgcggaccccgggcgggcgcagggcgcgggctccggcgccgccgctgcgtcctccccggccgcgggcgaggtacggggcgggcacgccgagttagcgggcgcggggcagggaggccggggccgctcccgcggtaaacttgactgtgtcctcttcccccgcagccgctgcagagggagcgtcgcgccggggcggagtgcgggcttgcgcggcaagtgcgcgccgaggtgagtgcgggcggcgcggtccctgcgccccggtggcgccggcgcgagaccgcggctggcgagaggccctggctctgcgctgcggcgcgcgggtgcggggactacccgccaggctccggctcgggcgcggggagcggccgtgacgaaggtcgcggcccctgcggtgaggcgcccggcgagttccgcgggcgggcgcgggtggcctcccgaggtgcggggaagaccaggtcgcgaggccgggggtctctgctttctcgcgctgggggatggccgtcaggaccctgtcgccttctttgaaatgctgtggtttttgaacctcaggtcacgaaatggattggagtgaaccggagaccccgaaaacggaagcgcagggagaaggaagaggtgtttgaaaaggtaggggttcccgagacggtactcggtgcaggtcttggtaaatccgcttctgccccgtgaggacctggtcatgacaatagagtagtgtttaatttaaaaagtttttgttataataaaccatagatttaatatatggggaaattctacagaaatattggtcgataaggctaatgatcatttatatagtctcattaggagagagtagcccatgaaatttgtttcatgctcattaaatacagcaatcggacttaagtgggttccattattattttagatcagcagtgtttattatctcagtgttaaggtacctctgaaaaatgaaaagtgttccgaataaatcgcccacagtattaggtttccatgctgtactttctctcacctagactttaaattggagtcatctaagaaatagagagagaagaagaaagaagtggattacttttaaaacactaggaggaattttatttactgtaaagcagatgagaaatttgtttgccc

SEQ ID NO: 12287 - DNA, 6000 bp, Homo sapiens
gccaggacagggtctttctcctggcaatattcaatagggggacccagaggctaagagatgttggcactgagtatcatcagtgactgagagaagtgcacacccacctgttgctgctggccccagaaatgctctacttgctttccttgggtcttgactgctcaacttttcctggctttcatgagattccctagtagactttcagcaaattgctcattttgcttaagctgcacagaacggttttctattacttggactccatgttactattttttttaaagggtccattcaacttccaaaattcatttactctgtgatttaatggtacctgttactctttaacagagatgttgaagagcaatatggtgaacttaagtgctgatgaccacagacaactgacagctatggcattggtgggtgactacagttttagcagtccttacgctgaagaaagttagaggtattcccataataacatcaggtttttaatctggtaagtttgtacttgttatacatggagaacatttttagtttactagtttatattagtggtatgaatgacgattatagaaaaggattttagtttccagtgcaataaataagtgagccatgtcaggttttccaagacacaatatcaaaggcactattattagatacatgctgagtctaaagagttgagtgtatacttgaattggttgcacttaaatctcatgcactggcatctaattgtactgattgaattcagtgggtattttgagggcaattggtgctctctagctaattctccttgataatcctgaatattaaaaaaggttgaattcaaattacatatactttgtcttaaatgtcacatattaatacattatcatttgatacagtgtggctatcaagtgcttatcaaaacaactttagaatgaaaatgccagaccaagatactaaggtttaggagtgcaattggtccctttaatatgaaacttgcaaatcggggactctaaggtaccttaaaaagttcaatagcgtggtagggtgactatagttaacgatagtatattgtttatttcaaaatggctagatgagatgatttgattgatagacctttaagattcaagagagaaaaacaaaaaagatgatttgaaatgttcccaacacaaagaaatgataaatgtttgaggtggtggataggctaaatgccttgatttgattataacacgttgtgtgcacatatcaaaatatcacatgtacctcataaatatgtgcaagtatgatgtattaataaaaaaataaaataaaaagttattattatagatttcccaaagtgaaaggcatgccacttagtgggtagaaagcagtattgcagggaagaaacagctaggattgcgtgtatgatactgggtttcaggatattgtcagtttgacccaggaagatggatgtgtaaactgaaactaagaagggttatacaattattctagaattaaagagataaggaacattagtgacatgaccatattgtttgtattaatagaggcatatattgttgaagaaagcatttattcatttatagcagtagttctgaaccaggggtgatcttgtgtcccccaacccctgcccctgccccagaagacatttggcaaagccaagacatttttggttgttgcaagtggagtgtgtgtgtgtgtgcgtgtgtgcatggtcctggcatctagtaccagtgatgctgctaaacatcatacaatgcaagcacagtccaccatgacaaagaattgtttagccccaaatgttaatcatgctggtgctgcaaaacctggtttataaaaattagattcacatatttttgaactaaaaagtgcctccaacaggtttagtcaaaactcttcttcaggccgggtgcggtggcttacgcagtaatcccagcactttgggaggctgagcaggtggatcacctgagttcaggagttcgaccagcctggctagcctggccaacatggtaaaaacccgtctctactaaaaatacaaaaaattagctgggtgtggtggcaggcacctgtaatcccagctactcgggaggctgaggcaggagaattgcttgaacctgggaggtagaggttgcagtgagccatgattgtgccactgcactccagcctgggcaacaagagcgaaactcagtctcaagtaaacaaacaaacaaacaaacaaaacaaaacgaaaaaacaccccacagaactcatttttggatattaatacaattagaccagtttggcttcctaatgaataagctatactttgtaaattggattcattttatcaccaataattatgtaattttgtatactgcttccaaaagtcaggaaaactttgaatcttcacatgtaattctcccaaatcttgcctttccttctcaccaatttaaaggtaattggtaattaaaatgcaattggtccatttaatgtaaaacttcctaattgtggactctaaggtactttaaaaagttcaatagcatggtaatttaaaggtaagaaggaaaggggtctttccatcctccatttcctcctacaatgctcattttaatagactaaataactcaaccactgaccagaagcaaatacggtgagcgcatttaaaatgtagatggaacttgccttttttgtgagattaggatttaatttcccctagacctttataaggaaatttctttaggctctaggcagataggaccaagcttattcttactgttttgaaatgcaacaattttcaaattatctttagagtctgagataattaattcctttctattggaattattctgtttaagcaagtaaagtgcttgatttacttccttaaaaaaacctctgatgttattcattttgccttattgatgttaataatggatttaatggtaccccagaataatactggtatagacacacaattcagtagtgtcttaaagattacatcatatatttttttaagtccaaagactaaccatatattttgcaaaatttaagactgttaaaatgtaaaatatttaaagaaataatatccaggctgggtgtgagtggctcacgcctgtaatcccagcactttgggaggccaaggcgggcggatcatgaggtcaggagttccaaaccatcctggccaacatggtgaaaccccgtctgtactaaaaatacaaaaaaaacgtggtggcacgtgcctttaatcccagctactcgggaggctgaggcaggagaatcgcttgaatcagcgagttgggggttgcagtgagccgagatcgcgccactgcactcgtctggcaacagagcaagattacatatcaaaaaaaaaaaaaaaaaaaaaaaaaaaaaacaagaaaagaaaaaaaagaagtaatatccaaactctgagcctaaattcgcaaaactaaaattccaaaaataagcgaatgtgtaaaaagtatggaaagaacagacttaaacaggaaagtataaatattcacaggtggtttttttccccttagttttgctagaaagtgtgctacaggtctaaagacttttctctacgggaagtgcttgcttagaaaaccacacgtgaaaagtatttgaacaagtctattctttcttgataagtaatgaagtgtagagatttactacaattttcctacgttttaaacacttagtgtttagggcagtatttctgacatccagcaaaatgctggttacatagtaggcacgcaaaaaacattttgttaaatgaattaaaattaatgaatacatattcagataaaaaaaattctccttttgcagtgcatacacccgtgaagctgtcacctacctagcagctaatcacgtttctccaatttcctggtgccagcataatctgttcacacatcaaataagtgtgccaagctagttttttttcttacccaaacctattccttcttgtttcctatttatcagaatgcaaccacaatcctcctactcacccgttcctcattttatttgacaaatgcttcctttcccgcctgtacagactgacactcactgacgatattctgcttctacccatgtttcccacaattggtctcaatttctgctgccacagcctccactaccttttgcttggaccagtgaataccctctgattttccgttgtcagtcgcttctcatcaatctattcttaatcttgttgcttcgttgcacctctactccctcaccttccaccaaacaacccagttagcgtagagattaggagaagagattctggctctgagcttaacatagtgattgatcaagaatttaacctctggagccaaactgcctggctttgtctgccattcgaggacttttcccaacctcatttctcactttgtagtcaacccaaaacacctccctccatctcccacctagcttgtgtttctcacttaacttttaaagtccagctcacatgtcactttactcacttcccagaattgtaatcttcgtttcgaactgctctcgcacggcagctatacttctcagtacctgcttttgtaccattatgtgcgttttttctctttttataaaaaatctctttcagggaacgcatagttcttgaggtcaggatattattgttttatttttatatctccagtaagtcacagtgtgacttgcactgtggttgctcgataaatgttaggtgaatgacatcaatttacagaaataaatccaactctgagcgtctccccttgaggaccgtgttttgttcatctgcacgctctccaggtcctgcactgcgcccaggaccaagaagacgctggacccttactaggagaaccgaggcaagagccggctggagccgcggggaacccgctcgccccgcccacccgcctagcgccggtgagcctgcggctcccgcgaagcgcggccccgccccctcggcgccagggcgcacgcgcggagctggagccggcgcggaggagcgggcggccgcggctgtgccctctcctactcctcaccgcgcgagcgcggggaaccagtagccgcggctgcttcggttgccgcggtcggtggtcgttatggattctccatgggacgagttggctctggccttctcccgcacgtccatgtttcccttttttgacatcgcgcactatctagtgtcagtgatggcggtgaaacgtcagccgggtgagtgcggggcgccgcgggccggacccctcagagtgctcctgacggcgaggaccgtctaagtcgggtgggtcgggtgggtcgggtgggcggctgagtggccgctagcccagacagttcgatggtagagttggaggggcgccaagggccggttggtctgacttactgagtgcagatggggaaacagcgtgggggaggacggaggctctagtactcctcaaaggaggcgtgacctggggtccgcgaggccgtagcctgggcgagcagggccgaccttgccaaccgcccgcagaagtcccaggactgacagaagctgccgcagcgtttcggaaccacagatatccgcgccagcccagggcttgggcggcctcctcgcggtaccgccactcgctcgcagtgtcgccactcgctcgcagtgtcgccactcgctcgcagtgtttgaaagtcatgtgaggagacagcaggtttctgactcagtctcttggagtaatagatggttgcggactactctccagttatgaaagttgtacaagcactgaaacaaaaagcctcctgtagccagaccaggattccccttcacgcagtgtcctaacaccctgcctagcatgtgagaagcgagtgcgttccccttttcacagtcacgacggacactgtacaagcaagagttacctggcgtagtttcactatctgcagaatggggatatagtcttgaaacagcattttgagttcttttagcaatgcgatcaagggacagtagttgtattttattggattttacaccagggtgcgtttgctctaatactgctttacttttgtagttattctactgtgcttttagttgtatggacctcttctttcttt

SEQ ID NO: 12288 - DNA, 6000 bp, Homo sapiens
ttgaggagctaataaccaattgaatttcacctttgtaatctgtatcaaccacaccagtatgaatttgaactccctttagatttaaacttgatcttcctaagatgagtcctacagtcccctcgggcagtgggccgtatacccctgaggggattttttgtgggggctcccctggaagcagagagactgctggtataacacataaatctactgctgcactgccgcttgtggcgggggacaattgttgtattgtggtaactggcccgttccctgaggcacttgtgacagtggaggttgttgtccctgaaaaccctgaggaacaaaaggctgaatcgggaacgccccagtttgttgcgaggcctgaggctggcccctcttccagttttccgacaatggttgcccatttttatcaaatttagaacgacattgattagcccaatgttttccttttccacatcttggacacaggccaggtggctctttatttttggctgtagtagtttgatttgttatattctgtttatttaagactgggcaattcttttctaaatgaccaatttgaccacaattataacattttccctcaaatgttctaacttgtcctcctaaagcaaccccagtttttgctggagccattagcatagctttatgcatagcccctccaattccatcataggcttttacatactctgagactacatctgaccctgctgggacattcccttttaatggcttaatggctgattgacactcaggattgtcgttttcgtatgccatcaactccactatgaccttacgggcattctcattggccattgacttttgagcagcatcttggagccttgccacaaaatcagggtagggctctttagagccttgtcttattgtattgaatgaggggcaggtggttcccgggtcttggatttttttcccaggctctaaggcagatagctctaacttgctcaatggccacatattgtattattgcttgttgattagtagtgctccaattttgacctgttcctaatacttgatctgcatctgtgttaactggaggattggcagccctattttttcggacctgttcttgtgtcccatcaatccaccaggtcttaaattgtaaaaattgaggtgagagtgatgatttggccaaaatctcccaatcataaggaatgagtctatgtccatgagcagtggaatctaataatgttcttatataaggggagttgggtccatactgttttactccctctttcatgtcttttagcattttcatagaaaaggacccatttctggcatcagctcggggaggcgctccctcttgggcccctcttccaggtggtatgggttctaatattaccggggtctgccacgcgtcagtatccccttgttttgtcttttcaataattttatgtaatgcacgaccctgtccactaggtggtgctgtaggattacgtctcatagtgggcggctgcggctatagcgccctgccctgcggtgctggaaacatcctggccatccatactgatactctgggggcggccgatactgaagtttggctggcggccagtattgataggctaccggcagttgggtcttattttctaccagctgatattgtggatactgcatctggattggcattgctgggatagagactctttccttttctatttgatattctcttggggtttgtacttgtctaacctgcatttgaggttgtaatgttacaggcatctgaaccgcgggaggaggagttgatggccatcgtggtttagactctgatggccccaataattctggaccttttccccccaattttagtggtccagaatatattacctcctgtaattgattgtagtcaacattttgcgctgaccgaggcattacagactctgctacatatttacaatgtgaactttccgttcctttctcgaattctgtccctgcctcttcttcacaatctattacacagctttcaggggcatcagaaactgaaacgctatcttctcctgtttgaaatgattctaaagctgctttaataatggcccaatcattccatactgtaagtgggatgattttaccttccctatttgcttgctttaattctttgccaattttttcccaatcttttagatctaaagttccttgttttggaaaccatgggcagaattgttctattgtttgaaatagtgtaattagattttctgtagaggctctaactccccctcttcttaaaaaaattttaatgaagctgagataagaggcatatttactttcagtttgtcccattgttaccctgggttcctccgagtgcacaagcttaccgcgaagctgaccacggacgtactcgttttgtcctaaactatcacaccatagcgtatcttcaccttacagaacggaacccacgatgggtgccagatgaagggggcctgcccctccacacctgtgggtatttctcacaaggtggagacgagagactgagaaaaggaaataagacacaaagtataaaggaagaaaagtgggcccaggggaccggcgctcagcaagtgcggacccacgccagcactggtctctgagtttcctcagtatttattgatcactagctctactatctcggcgacggggatgtggcaggactatagggtaatggtggggagaaggtcagcaggaaaacatgagcaaaggactctgtgtcataaataagtttaaggaaaggtgctgtgcctggatgtgcacgtaggccaggtttatgtttgactttacacaaacatctcagtgcagtaaagagcagtattgccgccagcatgtctcacctccagccacagggcggttttctcttatctcagtaaatagaatgtacggttgggttttacaccaagacattccattcccagggacgagcaggagacagatgccttcctcttatctcaactgcaaagaggcctccctctttcactaatcctcctcagcacagaccctttatggttgtcagcctgggggacggtaaggcctttcccttcccacgaggccatatctcaggctgtctcagtggggggaaacctggacaatacgcaggctttcttgggcagaggtccctgcggctttccgcagtgcactgtgtccctggttaatggagaatggagaatggtgatgacttttaccaagcgtactgcctgcaaacacattgttaacaaggcacatcctgcacggccctaaatcccctaaaccttgagtcaatacagcacatgttcctgtgagcacagggttggggctaaggttacagattaacagcatttcaaagcagaataatttttcttagtacagatcaaaatggagtttcttatgtcttcctttttctacacagacacagtaacagtctgatctctcttttccccacaaatggcattaaattatttccatatattatagagtaggtccttccacattttgaagagtagcaaatctagcttttttgtacagacttataaattatctaaagacttcagccttttttttttttttgaaacagagtctcactctgtcgcccaggctggagtgcagtggcacgatcttggctccctgcaacctccacctcccaggttcaagtgattctcctgcctcagcctccccagtacctgggattataggcacctgccaccacgcccggctaatttttgtatttttagtagagacggggtttcaccatcttggccaggctagtatttaactcctgaccttgtgatccacctgcctcggcctcccaaggtgctgggattacaggcgtaagccaccgcacctggccaagatttcatctttttacctcatatttcttaggaatttaatggttatatgttgtcttttttcccatgccttttggctcaagcaacacgtatatcagtgttgactttttctttctttgatctagtttaaaaaaaaaaaccacataataattctttgaagaaaggaaggggttaatttttttccctagcactttcttgaagatcagggactttatcgatgaaaaagtagtaaatagttatttgtaacctgtgtgaagcagcagcctgacttgaagtcctccgttcttgctaatggttacaccagtgaatactagtggaattgtttgggctgattttagtttctcttaatcaaaattactagatgatagaattcaagaacttgtacatgttattacttggtgtatcgataattatttgaaagtaaagactctttgtcatgcaaaacaaaaggagtttgaggctcagctactaagctgctggttacagaaccactttgctaaacagtgattttatacatccccactccgtggtggcttatgagaaattcaatccctgattgtagtcctcaagcaaaataacactgacaatcatcaggcctctgcaagtgtgggaatgaggcccggccggggggaggagcgcacgctctcagccacgccccgcccggtgcccgccttcgccccgcccagtcgtcgccggaggtcacagggcccaagctcctagaggcgtggccaggccccaggccccacccctctcccctgcgctctagcaggctcgatccatgctccgcccccaatccaaggccctggcccctccgcctgcacccggcaggacccgcctcttagaacccgacacctccgcctgcgcaggcccgctccccggtcctgtctctcaggccccgcccccaggtcgcgtctccaaagtcccgtctctcaggccccgcccccagatcacgtctcccaggtcccgccccctccgcctgctgccgcgcggacccgccctcaggcgccgtctcctaggccccgccccctccgcctgttccagcgcgggccggtccctaggcctcgcccccagatccgggccctgcccctccgtccgtaactgcgcaggcctgtcctctgggccacacccccaggttcccgtcccgcccttccgcctgcgcctgcgcaggcccgctccccgagccctgccaaccatggtgaacttgggtctgtcccgggtggacgacgccgtggctgccaagcacccggtgagaaggccggtctgggacgcgggcctcaaaccccagaagctgacctgagcgaggcggggggccggggcgtgggggtgccctcgtcagggaagagtggcggaggctgggggcactctcttgctaaggggctcagggcgtccgggtgggcataggggaggtgggacgtgtccaagcgcccagggtctcactcctccacagccagggtgtgcccagaggagggacaggagaggcggtgaaggaagagggcaggggatcgagccttcacccgcctctgccaccccagggactcggggagtatgccgcatgccagtcacacgccttcatgaagggcgttttcaccttcgtcacaggtaggctgcgtccaggtgtcctgcggctgggagagaacgcaccctcccgccctgccctgactccccagcagggggcgccaagtcacctgcccgcaggtgctgggggcctggcaaggtgggccctggctatccccgggtacaggttgatggggacctcggctctttgcaggcaccggcatggcctttggcttgcagatgttcattcagaggaagtttccataccctttgcagtggagcctcctagtggccgtgggtgggtactccagggcccctgcctgggctctttgaggggtgggtttctgctagggttggggctgtggttctgcgtccctgactctgacatggagccccaggtctcggcgggagccccacctgagcccacccaccacgtctgtcaggaagtagcctgtgcccggttctcttagcctgggaagcacagaggccccagccctcttccatttcctgctccacagttgcaggctctgtggtcagctacggggtgacgagagtggagtcggagaaatgcaacaacctctggctcttcctggagaccgggcagctccccaaagacaggagcacaggtgagagagcctgggggtta

SEQ ID NO: 12289 - DNA, 6000 bp, Homo sapiens
cgaactctttctatcttgctgctttcctctaatgctctgagggttgaattatgatctaaaatggctacctagacaagccaacacatctgcatttcaatcaaaaggaaggatgatggaaaaaaagaagacaaacttttgtcttatctgtttggtaaggatggttgccacaccttgctacatgatactttctcttacagccattacccagtgcatagtcacagggccacagctagctgcaagggaggctgaaaaatgttgtctttcttctgggtggccatgttagaattagataaagatattttattacctagaatgtgagcgttctagtattatgaaacaacaacaataaaataacaacaacaacaactggatattgaggaccggccagcaatctctgtcatcctctcctctattgaacttagttcatctgggctaattctgtcagaaattctttgaactttaatccaatgcactaaatctcggtgaggatatgagtagatttcatggagctgacagcatcagaggggaaaaaagtcactaatgaaaatcatatctcaacccattaatgaaaatcatatccactagggagtacacattcctaagcccagaccttaggggtatatctctgcttgcgacatgaatactcatcaatgtaagttttgcaagtggaacacttagtattctcaggagtaaccaaatgaatacaagatgttgactcatgtcactttgactccatgaggtgttgattttgtatatataaacacaaacatttaaatcaaaattatatttgcatcaatgatttgcatcaataaaagtatgtcctggagcaaatttcattttgtaaatttataaaaaattcattttaatattttatgttttaaattttatattacatacaaactgttatataacatttatataactgtttctcatttttctacttcactagaattattttcactggaatcatttccagttcttttacatgtaagcttcccattgaagttacaatttagcattattttttgacttcatgacaaattatagtcattagagtttctgacattatgagttttcttttgtggttaattaaccaagaccagttgtttttccgctgaaactttgtagatctaaatcttgtcaaaaagattttattgattttttcatcaatttaaaataagtgacacattttaccatgtctgtttttctcaatttttccagttttcttttctttttttttttgaaatggagccttgctctgtcgcccagctggaatgcagtcgcgcgatctcggctcactgcaagctccgcctcccgggttcacgccattctcctgtctcagcctcctgagcagctgggactacaggtgcctgccaccacgcctggctaatttttttttgtatttttaggagagatgaggtttcaccgtgttagccaggatggtcttgatctcctgatctcgtaatccgcccgcctcggcctcccaaagtgctgggattacaggcgtgagccaccgcgcccggccaatttttcctgttttcaatgttaccaatcagcagttatttttcagtcagttttaattttataactaaattgtgttcagttttggccactgttaatttcattttgtatttatttctatcaagtccagttttccctgtcaacctggtcacaatatccttggcataacaatagccaggcaaaataacaacaacaaaaaacccaatgagataaaaccccaaattccaggcaactattctgacatgtttggtggctataaagatggaaataaatacatcttaggaatcttctagttccatcttctcattttataagtgagaaaactgaggtttcccaagaaagatgaagtcttgagccagtgcaagagttattaaggatggaggtgatgagcaggtgtgataaatactgattggactgtgggatgacaaagagggacaagtctaggatgatcttggatttcaggcttgggtgactgggtggatattgatgctattaactcagacaaaaatacatgagtaggtcaggtttggaggtggggacagaggacgagttcaggtttttaaatgctagcccgatgtttaagtggaatctggatatttgaataagttttttttttttttttttttttttttttgagacagagtctcgccctgtagcccaggctggaatgcaatggcatgatctcagcttactgcaacctccgtctcccaggttcaaaccattctcctgcctcagcctcccaagtagctgggattacaggtgcatgccaccacgcccagctaatttttgtatttttagtagagacggggtttcaccatgttggccaggatggtctcgaactcctgacctcaggtgatcctcccgccttggcctcccaaagcattgggattacaggcatgagccaccgcacccggcctgaataagaaatttttaaacaggtctgaatggaaagatagacttgggaattgtcagcttacaaacttacaggtggtagtcacctgacaagagacaaagtcaccaccctgggaaaatacacatcaaggaggcaaagtttgtgcaggcctgcaggcctcatatggacagcagatgtgttttgtttggtccaaaacagaagtttaataaaatgtgaattagtgagcaatgtttaaaatttgtgagatttcatgtaaatatctgtatatcgattggtgtttttttttctttttctttttttttttttgagatggagtctcactttgtcacccaggctggagcacagtggcgtgatgttgactcactgcaacctctgcctcctgggttcaagcgattctcttgcctcagcctcctgggtagctgggattacaggcacccaccaccacgcccggctaatttttgtatttttagtagagacagggtttcaccttattggtcaggctggtcttgaactcctgaccttgtgatctgcccgcctcagtctcccaaagttctaggattacaggcgtgagtcaccatacccggccctcgattatcttttaagcaggggatctgacatcaccgggtcagcattcctggttggcaaaaatcaacagagctgtggtagggaccacgagctccagatcaccacagtctctatccctgggcttcactcctttgtgttaactgcccggctgctgtaggctttggggtttgcagcctctgatggagcctaagaaagccaagggaaaaaagagctcaggaaaagggaaagtggaagccagtgatagaaactgaggaaagataggtgacaggagaacctagaggactgacttggaaacaagcaaagaaatcaagtttgaaaggaggtgaaacaaaccttgttttagctatatgatccagctatttgcttaggccccaaatttaagaattatttttgacacttttcttttccttatctcccttatctaaactcatctccaagtctgtcacatctacctcagaattattcctgaaatttgtccatttctatcatttcttacctgctcattgcaaaagcaactcttctctttgcatccttttaaattgtttctcaaaagtttcatgtatacacagcagctagcagggtgatgttataaaactagatcctgtcacttacgtgttgataactcttcactagtttccccttacacttcgaataaactcgtattcctcacaggaacccagagagtctgtgcatgatggggactctccttgccttcttgatctcatcctctgttcttcccatgacctactttctcactttctccaaggcaccacattctgccccttccctattgcttgctcacatgtagattcttctcttggctgttctttccttagctctccacagagttggctgcttctcagtttactgaacctcttcagagggcactttcttgacatctcaaatcaaaaggtcacctgtcttcctttaatttctcagcaacttattttccttctacttttttttttttttttgagatggagtctcgctgtcgcccaggttggagtgcagtggcgcgatctcggctcactgcaggctccgccccccggggttcccgccattctcctgcctcagcctcccgagtagctgggactacaggcgcccaccacctcgcccggctaattttttgtatttttagtagagacggggtttcaccgtgttagccaggatggtctcgatctcctgactttgtgatccgcctgcctcggcctcccaaagtgctgggattacaagcgtgagccaccgcgcccggcctttccttctacatttaatgtttgctttctcaactagaaagtaatccccatgagggaaggcacagcgtctgtcttgttcctggttgtttccccagcttttgttaagggtgcttgcctggcacacaggaggaccttaaattgtggtggaattaatatgtgaacaatagtcacatgcagcagaggtgagactaggctaaggaataaaattgcacatctgtatttcagtaactttttttaaattttatttgaaacagggtcttgctctgtggctcagggtggagtgtagtggcacgttcatagctcattgcagcctcgaactcctggacctaagcaatcctcctgcctcagcctccatagtagctggaccacaggtgcacgccaccacactcggctaattttttaatttttttgtagagacggggcctccccaggttgcccaggctggtgatttttttcttaagcttcataaagattttgcaattaggaatactagggtaccagggcaactctacaagccctagccagccaagctgctcgcgccctcctatgaccgcggcagctccgcgcctgcgcagatctcccccgggcggtctcgccctctcatcctaagggggcgggcctagcggaaggcgggtcaggcagaatgcggccccgggcgcgtgtggatgacgtcacccggcgcgtgccggggtagcccgtagtaaccccgagtctgcggaagtggtgacccgtgggacgcggctgagacaggtaacctgttcgctccctgttgggtccctgccttcctctcctccggcgtcgggatggcggcggggacagcatcattccgttctgaaggcgacggggaaccctcccttaccctcacttttgctcgaccagcgaggacccgcatcccctcctcagttctcccagactcctggggctgaaacccatcctggggactgggcggagcggtcacatcttaccacctcagctgtagaggtggccacgggctctggctgtcttctccccggcggcacagacctttctcagcctctgggtgcctcctccttcgtctcttgcctccaggccctcggtcacctgccggtctcggcttctagccccacagggctcatctccagtcttaagtaggcagaacagtttcgattcgattcatttccacttgcagtgaaacccatccgcctcttcttcccccggaggatctttactgagagcaccacattttgagttttggggtccctatagaacattcatactgttagtctggagttttgttcatgaacgcatgcatgggcggggagggggtggcacagtaatgtgattatgattatctattgtgataataaaatatccacttaggatccaatccactgttgagatgcatggaacagttaatagcattgcataaaatgccccttgtacctgatttctttttggttttcgtgcaatgatgacaattacccttgcaaaggtagccctcaaaataagtaacataacccgctagggatgtttagatcgcaaaaaaacaacaataaggttcatatggttgataaagaaataatatgggttattacaaaaccagacagaatagatgctgagtatatgggacgagaagcagaattctgaaatccttgatctcattgattgtttggttttgtatttttaaaatacttttagtctgttccatttttgaatagtgtatattgtgcttcgtataagtctgggaag

SEQ ID NO: 12290 - DNA, 6000 bp, Homo sapiens
ctgaatcagatgttcacattgtggtccagggacccatgggattctctgacactgccagtttaaaattactttcgtaataatatgcagatgttatctttttcactctcattttttcagaagtgtacagtggagttttccagaggctacctgagttgtgatactgtaacagaaggaagtagatatgagaatctaacagttttctatttgaagccagacatttgttagaatgtacacagtgtgattcttctcactaaatgttttttgttttggaaaagttatttttcataaagaatacattatcattattattattattatttttgagacggagtctctctgtcgcccaggctgaagtgcagtggcgcgatctcggctcagtgctgcaacctgtgcctcctgggtttaagcgattctcctgcctcagcctccggagtagctgggaggcgcctgccaccaagttcggctaatttttgtatttttagtagtggagacggggtttcgccatgttggccaggcttgaagaatacattatttatgttaacatttaatacatttactttttaaaaaatgaaaacatgaagaacaattgttgcatagtggacaggtctatgcagtcctatccccaaaggctgaggaagctgagaggctgaggaatccagtttcttagaaagaaacctttaaaagggacttaagaacagaagccatgtcttgggtggccccaaggagatggtggatcaccccattacccgacccccaacccccaaccagagatgtgtaggacagttgcttaagagcaggatttatggtaagtgaaatagcgtcaaggttgtttgacctaagggcaagatcggtaagtgtatacttttacacaaggaacagtagataaaatataaatcttagaggcaatcccagaactggggttaatcataagtcaacatggcggatgttggagttgctttagccgccacaactatttaaaattttctcagttataatttctaagatgctaagtattgatacttgtagccaacataaacaaaaccttttggggttgtcaagaaatttaagtccgattttttaaaagatgtaattcacatagaatctgttcaccatttttaataaaaagttctgtgtttttggacagacacatacagtcattcaactaccatcacaatcaagatactgaacggtttcctcacccaccctaaattccttcctgcacttttgtgtaagctgtcccctatccttggcaagcattaatctgtttactaatttttagggatgtagagggctcctgagattccataatttgagaaccacgtgattattgaatacttatatagtatcatacagtaccagtacttgtaaggaggtaaaaatgatggaattcagacacaagagtgaacagtgtacctgtttagccttttacccgaagtgtgttagactgcccatttcctttgacagttctattattggtcttcaatatcttgccattctgatgatcagaaagcaatttttcatttatgtttgtcatggtactgatgtgtttgtgcctcttattggtcatttgtatttcatgtaaattgcttaatttttttttgtccattttcttattgggctgtaggttattgtcttctatttactgtctttgtggatcatggatattcattctatttatgtctgtagtccttttttcccataactcttgctatctttaactttgtttatattgtcttttattgcagaagtttaaaaaatctcataatatttttacttttccatgaaaaaatctattaatttttttctcctatgtcactattgggatttgtgcattttaagaaggggtttctcaggcctaaggttataaaaatactcgtccttgatctttttttaaaaaattctatagttctataaaagtataggttcgtaatctatctgcagtattttttgttgtatagatgttcctttgcaagtctggtcatggctggatagaacagttggaactcaatgatctcagcagagtatgctctatgctcattgaactggttctgctctagacctttactaagatcatcccacgtgcatagacctctggaatgtccttagttcttgtttgttttctttagcgtcccattttttttttttctgtgagctactgaagtccttccaatgaattctttatggcttaagtttgttggtttttgctgcttgtagccaagaacccgggttccatttctttttctagcctcttatatattaaagagtgttttgttgaatactaatgatagtgagtgactttgtcttactcctgatattcctgaatttaatgagaatgcttttaaagttttctcaagagtgatgtttgctataggtttttatgagggacactttaaggaagttttactttattcccaactttctaggatatccctatatctttacaccatcctggtggagaaggtgacatattttatcaagtgctatttttttttcaaaatctattgagatcatattgtgtttcccatttaaaaatgtaatgtagtgaattacattattacgttttttaaaaaatgatgaatcatccttatattcttggactaaactacttgatacattattttaattcattagggattttgatttggcagtacttcatgtaaaatttttgcatttatgtttataatagaaatgagcctattaggttattttattgtgtgaccctcagtttgggcccaaggttatgctgtttttgtaaaatagattgggaagctttccattttttaagcttggaatggtttatttaataggcattgcttgttctttgatatttggtagacttcaactatgtagttttatgtttcttggtatattttaatgggtaaatcttattttttttccaatccagacctaagtcattttggtaatttatgtctctctcaggaatcatctatttcttttagacttccaagtctattggagtaaatgtttacattatattgtagaaaatttctctggattctttggtagttaattcttaaatgttatctatttcacttgaatcttctggatcttaatcactttatgtcctatggtaatttttttacactccatatatgtctttttttcttctaactcattttgaataagatacatttgttcaggctcagtagatggagtgagtagcttgtattactctctatttatgtggtcagcattcctttttcatagtcagaactgaagctaatatgtgtgtactcctcctactccaacaccacttcttttagatttttacttagaatatgtatgcattacttaattggcaactttttcctatccccccagtgattgattctctagaactcacacctacagtaaactgtaattctcatatatcctactgccagagttcttcatatatttaccctctcagacgtgttactccttgagactttattttggtatgcactctgccactaacaatacctcactccgtactttcccaccatttatatcggatcttttgtactgtctgcctagatcttaaacaatgccaccagaagcaaaatgataaaggggattaactcttttctgcctaaggtgtgaaggactgcatcccatttttgtttggttcaggttttcggctttaaaatcccaggaaagataatactcctccagccttctatgtaacttttgcttcataagcaaagacataaaagacatcaggtaatacaacaagtgggattaattttttctttgtttacctccatttgtctcgtgaacaaacatgtgaatcctcctgaacccttgcgtgtgattggctatagttttcagtttgggctgatagtataagttttttttgtttgtttgtttttcttttctctgtctcctgggcattttattaggaagttggaatatgctgttttggtggttgctagtgagaagccattttaacaggaagtttacatcattacttttaatctatcttatcttacattttaaatgtctcttaagtcttcattaaaataaacacatttcttcaatcctacattcacatcaaaccaccattttgtgtaagacttcctgactacagtaatttctattacacacaaaatgtattgttttactctaaattctgccatgactattctgctaacctctctgaagtcatacataattaattttagcaaatattcattgaaactctgtattgggcattatattagatgtttaggataccgccatgaaagatgctgttatagccctaaagagacttattggtgctttttctttatttttgatagtgtcacataaggttgcactaccttttctacacaataatagtagccatcattgattttagatactgggagaacatttcagtatgttaattctattcctcacacattcctgtaaggtaggtattatttaactcattttatagatgaggaatagttttaagggataaaataacctcccttaagtcacatggtttagtaaattatggagctagttcttgactccagatctggttcattccaaaatttcttactattctgtgccttatctttgcatgaccatttactgttcctggtttcaataattagcaatttctcaataaggtgtcacttgacatggttattttctccaatgatttctgtcgtttctatgaattaaatcctggaataaagtttgtcattgttcctttcctgtaatttgtgggagatgaaagtttgtaagtctaggatttatcagttctgggcatcctggaaaggtgacagcagtggtggcagctgagttttgcaatatctttatgagtccccatgtaaaaacagggaaaagtgcaaaagtcataaatgtacagctcagtggattttcaaacacacccatatgcagataaaaatagaacatttatgacactccccaaagcccctttgttacatgatttaaagagccagaggccatgtgcacgggttcacatggcctgtggaggaaacacctgagcagtgtttcctccacaggggtctcagtctgggctctaaagagctcctccaccaagtttctaaattttaataatttcagcctattgttcccccagagtagtaactgctttctggaactgaactctgtgataatgtagtatttactttttgccttttcaataacctagttaacaattttatacctactgagttctatttaaataatggtattttctatctcctgactggacagatacccaggagtagggtttgaacttcctactttctggtttgcatatatcttattaagataactaaagtacttgctacttgccagtcttcagacccggtcagtgtaatgtcatcagtgcagcagatcagtgtgatgtgtgatttctcaatgtgatcaaaatctctggactattttagagagcaagagtgttaacatagacctgaagcaagactgtaatggttgaacaaagcacaaagtgcttctgagattttttgcaaattaataggaagaaaaaagcatttgcttccaagttataagaattgtgttgatttgaccccgtaaaaatactacatcttgaatactagctgcaattacagtcacgacctttctgtgtttataattcatagctattctccaagatccatctgtcttatatttagatcaaacaggtaagttagtggaatgtggtagctatcaccacctttttgtctttggttgtggcaccaatttctgtggtattgtttttggttactttgttggtgaggagaggaatacctaggggcttctatgtgatccattataccatattgctccttatgccataaatcagagaatctatatgggcattgagtcagttgccaagtatgtctgttctaattactcattaaggaactggggaataactgcaaggtgagtatgtggatctacctggcccactatgattcaaacttgatctaaggctgggtgcagtggctcacgcctgtaatcccagcactttgggaggctgag

SEQ ID NO: 12291 - DNA, 6000 bp, Homo sapiens
gaacaaacatcatcgccctgattggggaggacggaggtgggggccgtggggaggtgagggagtggaatcacattttgtcatctgcgtgctccaatgaggctgccgacatgttttagttggttactcacattaattacttacttaccagaagagttccccagatcctgcagaaaatacacagctttcattcataagtaatttatagatgattcaaaagacatgttcagggccaggctcatgcctgtaatcccagcactttgggaggccgaggcgggcagaccatgaggtcaggaattcaagaccatcctggccaacatggtgaaactcccgtctctactaaaatacaaaaattaactgggcatggtggggcacacctgtagtcccaagctactcgggaggctgagaccagagaattgcttgaacccgggaggtggaggttgcagtaagcgccagtgcactccagcctgggcaacagagcgagactccctctcaaaaaaaaaaaaaaattaaataaataaataaataaataaataaagacatgttcagttacaataaatatttgttcatattgtgtgggtatgggtgtgtcccctgacaaccaaaatctatagtctccaaaatgtataactaaatgaacagaatgttcaaaatttgttcaaaaacaaattttttgttctcatctatgagattctggaatgtttaaggcagaacatgtactgtcacattgagagagggaaaggagtccaaatctagttgaaaaactgaataaaatactgtttctccctctgattctttagctttgaaacctgagactttcacatgcagcttttttgatgaccataaccggcagaacctgcccccaccccacccccaggctaaggcagagcagctgaggcaggtgaggccaactcctgagagtcagacagcagtgctgccctgttccgtatgcagggctgaggtctccacaacgttctctcgggatgtgttgccctggggtcagaagggatgtatccgctgctctgctggtcagtagctgagccttctgtatggtctgcagagctgccactgagccagaggtggtctctgtgtttcctagactcaaggtggtctccatgttttgtcgttgccatgctgtttttcctgctagcaataggccacagctaacgctaaagcaaatggtgaagctggctacagtgttttgtgtccccagcctccccttccgccctcatgcctctctcctccccagtgtcgtctgtgctgtgttttggagcctttccctggcccccatgagcacccaccttgaaccttgctaggatccaggtatctgtcatttacatctccatgtgacatgaaaccataagcctcctctgagagcacttagaagttaaaccagatcataaagctggagctcctagccttggcatcgttgtttgcttccctgacgtagctgcccactgccctatagtatcactgctacttccctaacctcagtttctctctccttcatcttgttagctgcctccccagcttgtcttctgcatccttccctttgttgtctgtccttcctattttctctgtctccctccttttgttacctatatctgctaccctcagcctgttggcctcttttgtaatgagcttccttcgtcttattttcttccctcatctttctatctgcttccttcatctccatctttatttccctcatctgctcccccagctcctttctctgcttctttccttgtctacttccctcatctttttatcggtttccccatctcattctctacggccctaattttgttatcttcttgcctcctgtagctctttgagtttgtgacctgctttaaaccatctctacttgaaaagaataccaggctttagcaaatataggtgagaggtggagatcagggagaggtagacttgtgtgtcaccctcctggggactgacctaagtacctttgtaagggcttgtctaacacatgcccctgtgacccactggggactcccagcgtaggacagggttatgaggaagtaggcattgctcttcaggggcatcaacagtggagtagtgatgcccccctatggcctctgtacccttatttcttaccttcctttcactaggaggaggcctgctcaccttgggccagttctggctatgatgtagattgagggaacagaggtctcaggacgtggttgatagcttcccattggtgcctcctgaagacagagctcctgggagagtagtgagcatgaagcccatgggcttgagctggcacagagggacgggagcccagaagccacaggtctaaacccagtgacactgggcagagtggatcagagtgaggctttagagtccagactgtgtgagctccagtcctggctctattgcttgccagctgtgtgaccttgggctagtcagtctgcctctctgtacccactttcctcacgtgtaaaatgagataatgaaattgaataatagtaacatcctgaggttgtggggtagagcaatgagatggcatgtgtaaaatacagtgcctggcacgtagcaaacactgagcagtcagtcttcagaaggagaagatgtttgggtacaagaataaggaatgtggccctggggctttcctcagtctctctgccgtagtcacatttgagtcaaaattcatttaggcaaatgagtggatgttttactattttttttttttttaattttaattttgttgttgttgttgagtcggagtctcgcactgttgcctgggctggagtgcaatggtgcaatctcggctcactgtaacctccgcctcccaggttcaagccattctcttgcttcagcctcctagtagctgggattacaggcacctgccagcacacctggctaattttttatatttttagtacagacagggtttcactatgttggccaggctggtcttgaactcctgaccttgtgatctgcccacctcagcctcccaaagtttttcagaatttttaagaaaacacttctaaccttaagcctttctttcaaactcagatccccttacacattgatcagacgtagcaagtttgcttcaagtttttggaactggtttccactttaggctactgaaggtcccatatccccagaagactatcccctcatctcctcagcctcccgtttaaagatacacactgcagtcgggtgggtgccagatgaggaaagcggaagatgctgattccctcccacgcagtctcagggccagagggaaggagggtcctgccaggctgtctgggccacccccccactttggcttcaggactacagaagcatctcctacgttaggctgcgtccaggagagagggactaagggatttcgtttagaagaaggggcaggggctgagagttcggcttgtaaatgtgtaggcgagagtgttgacatacatcacttcacacctgatgaaggaaagagaagacaggctatgaacctaagaggggtggagcgacagtttgtctccctttcagatggccccaggctactacgagtctacggtttcacttgtccagtttaaattagcaagtaatgaagtcacacaagcagaagctgctgctcatgattataagacccttagaactatctatcctgctggactttagagggcaatgagcctggttcccccctctctcgggtcttcctttgtctctatcatgggatattgggctgcacatgttgaaattgtgaaaagcgttgaatccataagaagtaccagcttgataaatgtaagtctgtatgatgcctcccaaggatctgtgtgaaaagtaaacttgcggccaggcgcagtgactcatgcctgtgatcctagcactttgggaggctgaggtgggcggatcacctgaggttgggagtttgagagggggcgggcggatcacctgaggctggagtttgagaccagcctgaccaatatgaagaaaccccatctctactaaaaatacaaaattagcagggcgtggtggcgcatgcctgtaatcccagctactcaggaggctgaggcaggagaatcgcttgaacctgggaggctgaggttgtggtgagctgagatcgtgccattgcactccagcctgggcaacaagagggaaactccgtctcaaaaaaaaaaatgtaaacttgctctccatgaggggaattggggtctgctcccgtaaaatgggaggggtggcctgggggctcttcttgtccttaagggcaatcaatttcccgtcctctgggttccttctacccctgcagcctgctggaacctgctgtggcagcagcatctagccagggccgccaagtgctgggtcgctccacccacagcaagatgggccgtgctggtcagggctccacggaaaaagcacaaataaatcaaacaccagctcctacttaagatctgatgaaattctccatttccgctccaaattgaattcctcccgaaggatgggagcagctcctgggagtaatgaaggcactccttcctcctctgctagaaacatgttttagattaacagacgcagtcttctaatctgggtgggtaggtagtgttcaggaacagccttgagaaagtgttttcagaccagacatgatatttttaatctcgaggggcaaggcggcagacatgcaatacgcttggcctctgtggaggaggcagccccagaggtggtctgctggggaagaatgacaacacgggagtgtggctgcaagccacccctgcctgccacctccttttcctccaccacttggagccaaaaagaatttatggtggggaatagaagcaagagggcttgtgttttttgagatttgaaatatcactttcctgcccatctcttatttgggaaaaataatcaactctgtgatttaaaaaaaaaaaaaaaagacaagaaagaaacgtttttaggatgaagatgtcattgaagtgattatcttccattctctgtaatgatgatgaatcgacagtctggcatttgtagaggcagttgacacagaccctttcaaggggaaaaaaagaaacagttttccagtgaggcttgtcagggggaagactgatcgccggcaggccggctcggaccatgagcacagttccaagaatgcagggatgaggaggagccgggctgggctgttgagtccaggctgaggtaggagtgcagtgttttacaggtccgttctgttttgtgggtggacatgggtagattacctgttgggaaagaaatacttaatattattccttgaagtgagctaaagagaattacttttcttcactcactgttgaagaaaagcaatctaaaaaaagaggttaaatctacttaacatgagacgttcagacatttagtgcccaagggagggaaggaaattctccttgaaagaatattctgttggtccttttatgtcaggattttgttaacagcctttgagaaaggttatcaaaaccttactccatgtttttggtttagtttttaaaagaagccttttccttcatagggaaatagccccagagtatccagtatgtcaaacccaaccttagagggccaaacgggccccggaggctttcgattcaggttcccagccggaaaattgcttttcagggagaaggtcatgttttccgcagatagtggggtcatttgtatggttaaacgcccttccttctgagccggcaggatgttcagacttggcctccctcagaggacagtaggaagtacatttacccccgactcagaagaaaggattgaagatgggaaggggaaatttaggtggaattctggcaacgctgggtcctgtcccaagcccaacaagatggactgaggccggggtcgtgtctccagaacattgaagggtggggagggaagtgtggtgcagacaacaaggactgctcaaggggaaaaaatgaaagggtgggagaaagaagtgccacccaccctccccacagctgcttttgtgcattccttcaggccctcgcagacttttatatttgcataaatgggccctggtgaggcttc

SEQ ID NO: 12292 - DNA, 6000 bp, Homo sapiens
ctatgttgcccatgctggtcttgaactcctaggctccagtgatcattccgtcctgacctcccgaagtgttgggattataggcatgagccactgtgcctggtcttagaatattttcagaaagaaaccccatacccattagaagtcactccacactcgcctccccaaacctcctggcaactcctaagaaagtccctatgtctctatggatttctattttggacactgcacagcgggcccatgctctgtttctcctcgttaggcggaccgccgctaccagagccggctgcaagacctgaaagatcgcctggagcagtccgagagcaccaaccgcagcatgcagaactacgtccagttcctcaaatcatcatacgccaacgtgtttggggatggtccctattccaccttcctgactagctctcccatccgctcccgatctcctcctgcctgaggccacttatcagggcctggagccctgatggaagccataggaactccagagttgccaagccatagctgagaagcctggtggttttcctctcccagtgaaaaaatgggttcagggtcttgtccttagctactagctctagaaaagtcccaaaagcagcagaaggtgaagcaggaagcacttggttttctccttcctgatatagtcacctgttggaagtgttaaaatttcctcgacaggccttaaatttactactacattagggtaccacattttaacttaccatgactttgctccttcctttcctgagaaaatatttccactggattttttccaccagtccccttacagccctcattgttttaggaatctctctcaggttttttctgacctaaaccagcaggaagtcgtcctgggctgtaagcaccatcacttgctttttttttttttctgatttcacaagtgtggtgttttcccaaggctcccttcccaagctcagtgcaaacctctcactcccaagtttctttgaggccacttgcccccaagcacttcacaatagaccctcgagggcttgtgtccatttggccttttacaagtgtaatgccaatttcattgatttttgtttcttttggcctgatttgtatctctggaatgcatttattcttgaaatatttgtgtgattttacaaaaagcttttgtaatcagttatttaaggctccatttgatgatttcctttacccaaccagtcctcatccctcctctaaaaaatgattaagtaaaatgctgcaggacagccagtagacatttttaaagtacttggtgcctgaaacatcaggcttctcatttcattttagctcaggttggtgctttcacattgtaatcaatgaactgtcaggagggaacaaactgtaagaaggattgcttggtgttttagggtagatcactttagctattaggaagaggatggggtagtgtacagtatatatttttaaaatgtgaattggtttctgaataagaatctgggccatttttgttcaccatttttgttcgtactgtgctaacctctgcccttctgattctagctagtattggcctgggtggtccagtcttctcacctctcagccactctgactcaactctagagaatttcttctctgttcttttttcttctggagacaggtctctgtcacccacactgagtgcaatggcgggaacatggctcactgcagccttgacttccctagctcaagcaatcctcccacctcagcctccacagtagctgagagcacaagtgtatgccaccatgcccatctaattttattattttttgtagagacagatctcaccacattgcccaggttggtcttgaattcctgggcccaagtgaacctctcattttggccccccagagtgctgggattacaggggtgagccaccacacccagccttctctgtgttcttgaatccacctaggcatctggatttcaaagaccagaaatctcttttctctaccaaattttgaggatatttatagtttccagctttcagtttttccaatgaaggtaattccagctaccactgccaaaaaaactaagcccattttcatactcttaacgtaaatagacaagaacttataataggtgaaagaccttcccgagaaaggacaattgacaaacttccaccagcatgtatatatatctgtataactcattattatttttgccaaactagagaaaacctcagtgcagggcactgctatgtaactctggtgtgagcaacacctctcttggagtcccttgctgggactctggggactcttccaacaatttttctttttaaaatatttttattacaagaagtccagggaatttttaaaaactcagaaaatgaaaattgttcacattgctcatactccagagagaattcttcctacctcaaactgagatctcacgaggtggtggacaatggaagggtcagaaagtctggggtcccagttagagccgtctctggacaattgtgactcattctatttttattgagatataattcacataaaattcactctttttatttttttgaaacagggtctccctctgtcatccaagctggtgagcagtggcacaatgatggctcactacagcctcagcctcctgggtttaagcgatctcctgcctcagccttctgagtagctgggagcacaggtgcatgccaccatgcctggctaatttttggattttttttttttttggtagaggcaggtctcatcatgttgtccaggttggtctcaaactcctgggctcaagccatcctcctaccttggcctcccaaactgctgggattacaagcatgagccaccatacctggcctagaattcacccttttaaagtgtaaatataggccaggcgtggtcactcacacctgtaatcccagcactttgggaggccgaggcgggtggatcacctgaggtcaggagttcgagaccagcctggccaacatggtgaaaccctgtctctactaaaaatacaaaaattagccgggagtggtggtggacgcctgtagtcccagctacttggtaggttgaggcaggagaatcacttgaacccaggaggtggaggttgcagtgatccaagatcacgccactgcactcctgcctgggcaacacggcgagattctgtctcgaaaagataaagtgtatatataattcaatggtttgtagtatattcaccaagttgtgtagccatcaccattatctaattctagacctagttttttcttttttcgaaatggagtctctctctgtcacccaggctacagtgcagtggcaccatctcggctcactgcagcctctgcctccagagttcaagggatcctcctgcatcagcctgtggggactataggtgcatggcactttgcctggctaatttttgtattttttgtagagacagggttttgccatgttgcccaggcttgtctgaaactcctgacctcaggtgatctgcccaccttggccttccaaagtgctgggattacggcacccagccaaccaatttcatcactcccaaaaaagaaacgccatacccattagcagtcactccccattcccctcccccagcccctggcaactagtcataaagtttctctggctctatagatttgtctcttctggatatttcacataagtggaattgtccaacatgtggccattcatgactggcttctctcagcataatgctttcaagattgatgttgcagcgtatcatcagcactttatttttatggccccataacattccattatatagatgtggtgtttcctcctgccaaacagggctggttgggattccaaagaagcactatggccgggcgcagtggctcatgcctgtaatcccaacgctttgggaggtcgaggtgggtggatcaactgaggtcaggagttcgagaccagcctgaccaacatggtgaaaccccgcctctgctaaaaatacaaaatagctgggcgtggtggctggcgcgtgtagtcccagctacacggggagctgaggcaggagaatcgcttgaacccgggaggcggaggttgcagtgagccgagatcgagccactgtactccagcctgggggacagagcaagactctgtctcaaaaaagcagcattaaacccaaaacatttattagggaagcttacagagtgggctgcagcaattctcgcgacagacagagagaagcggtgtttcacctaggtacatccccagcgaggggtcagggtatgaagtttatatgagggtttatggaatttggctaaaagcaggggtcagtttcagcgttttgggcaataacctagatatccttagtgcctagggatatgcaaggcccgtgtttggttgcaagtctgcaggaaaaaacttgcagctggctgggtcacagggcggtcaaggcactctgatacttggtcagtgcacagaaagcgggggaactcgggaaccgcgcacatagtactatattttatttatccattcaccaatggatggacgtttgggttgctttcactttttggctattatgaataacactgctgtgaacattcatggacaagtttttatatatacataggtttcatttctttggcgtattttatatatatatatatatttacctaggagaattgctgggtcaaatggtaattgtttaaccttttgaggaactgccagactgtcttccacagcaggtgcttcattttacagtcccatgagcagtgtatgagggttccagtttctgcacagtctcaaggcacagacaaattttcagcagccccggggattgggagcggtggttacctctgcggaacgtgccccgacagccaagccctgcgcgcaggcgcactggtgggagggcgggaacgcgggagcgtcgccggaggtggggcgtgcaggcgttaggggcggggctgtgctgcgcgcgcgtcccggaagcagaagcctgtgtggccttcccggcggctgattcgagggcttgtttggtcagaaggggggcgtcagagaagctgccccttagccaaccatgccgtctgagggtcgctgctgggagaccttgaaggccctacgcagttccgacaaaggtcgcctttgctactaccgcgactggctgctgcggcgcgaggtgagcggtggccccggaggacgtaggcctttccggcccctcgcgaccgaaaccttctccctagccgttggcacgttctgctcccgggaacccgtgcagtctaacaacctgcatttatttcttgacttctgtgtgtacatccctctgtcctggggtttctgtcctcttcagcctattttagcgtttcggggagctcccctgacttcacaggtgccccgcgctctgaaggcttcattgctaccctccgccagttgggcgccttctccgttctgctgttgtcaaagcaatctcggccccaggttcagttaacttactgtatgtctcatgtgctgggagctctagagtttgcgacgaacgattgacacgacctaatccattgctactagtgaaatgaccaaatttttagattgatttggcagacctggaaagtgaatgggggcgtggtcaccgtacctagcatttgcaaagctctgcgcgagaagtggagggatgtggagagttaaggccgagctcccattcccgagtcgctgctagttagctacagataaggcgttgtcctgcatcctcagacttcttgggaaacaatcctaaagtatttccctgtcttttatgttgttgacagttttgaaaaatacagaccttacattctgtaggttgactgccagcatatgtgctttcaaaccaccagaccaaggttaagcattcttggcaggaataccacagaaatgatgccatggctttctcagtaagtcacatgaggaggcacacagatgtcaacccatcccaacactggtgatgctaatcttgatcacctggttacgttattatctgcctggtctctccgtttaaaattcgtcatttttcccttagtaattgttgggaagtaataataccagtatcctt

SEQ ID NO: 12293 - DNA, 6000 bp, Homo sapiens
cttggaggaaccagcactctccatcctttcagaaagtctccaagccaagttcaggctcactgacctggctctgacgaggaccccaggccactctgagaagaccttggagtagggacaaggctgcagggcctctttcgggtttccttggacagtgccatggctccagtgctctggtgtcacccaggacacagccactcggggccccgctgccccagctgatccccactcattccacacctcttctcatcctcagtgatgtgaaggtgggaaggaaaggagcttggcattgggagcccttcaagaaggtaccagaaggaaccctccagtcctgctctctggccacacctgtgcaggcagctgagaggcagcgtgcagccctactgtcccttactggggcagcagagggcttcggaggcagaagtgaggcctggggttttgggggaaaggtcagctcagtgctgttccaccttttagggaggttactgaggggaccaggatgggagaatgaggagtaaaatgctcacggcaaagtcagcagcactggtaagccaagactgagaaatacaaggttgcttgtctgaccccaatctgcttgaaacctgactctgcttctctcatttgtcttcctaccctactcacataattcactcattgactcactcattcaccagatatttattgacctgctattataagctttacatcctcccatgttgtcctggcatgtgcagtatacacggtctaactcatctctccccagatctctcagaaccttgagcttgggaattgaactggggtcacctgtgtcctttcttatggactcgcaggattttagaaccctaatgcaccctggagggtagctgggccagacttctcatttcacaggtgaggagactggtgccccacagggattaagtgccttgcccaaggtcaggcttatctccagagggaggtgccctggactggggcccagatgttcagggaccctgcctacacctcatttccagtgtgggctgccttagttagttatgagaacagggaagggctgggaagagacagcctccaaggtcaacacttggagagggtttcacttgctctgaagaccctggtccaggattcgccctctcccatgccttcaagtcagcatcaggcttagggcaaagaccaggcctctgaagctgcctcttgtaattcatgcaggaagatgtcaaagtcagccccatcttggctgatcagggtgttcagccttaaccccacctgtgttctgaagtctcttaccctacctgctcaggactgagacagttattcactgaacatatttattaagcacttgctgtaggccaacagttaagaatccaataatgaaatggacagattcatggaacttagagtccaataggaaagtgagacccagacaatgacaatgagataaatgttaggaagggggaggtatggggtgacttccctgcagtcctgggggcctagatgggcccaagactgggtgagagtcttggcagagcctttgcaacaccttaagtggacaggactgggaggtcttggtggttggagccaacgtgggttccctgcggctccttagtcacctctgatagcagattgagggaggaaaacaggtaaggcatgaggaaatggccaggttgggttaacccactggtttcaaccagttcaggaatgaggttatttggccatgactggctgatcttgagctcaaggatctgcttcaaatgcacacaggcctagttgaagtttaaaccccagcaaaacattcctccctgtaaatggaaaatcctacttctacccccaccctgccctgttttttgttttttttttccccaagatcattagatgtcctcacccctcctcactgcctctcctctctgggacaggctgggacctttgaggaagataaagccttccttcactacccatcatattcagtgtccctgttcctcactcagagaggaaggcagaaccagtcaggcttatttcagtaagttccacagttctacaagactgcaggaattctccttaagggaggagagcaagcaggtgtggccccagcttctggaaatggcagaagagagggttttctcattgaatgggggtgggggctcgtgtgtcctgggaaaccccatcagtcccttcatttcttgagactcaactcctgggaggagagggtctcaagagttgtccctggaaggagggcgggggcagtctgcatctatttcaggttgtggctcttggttctaggactcttacttctctggctaagggctcagcttcttgggacttcaaccatcttctttctgaaagaccaaatctaatgtaaccagtaacgtgaggactgccaagtatggctttgtccctatgactcagaggagggtttgtcgggcaaattcaggtggatgaagtatgtgtgtgcgtgtgcatgggagtgtgcgtggactgggatatcatctctacagcctgcaaataaaccagacaaacttaccaacgtcttgattggtgtattttggggctggttctgggctcagcaaattgcgaactagctaatatagtaagagattaaatgagcatgtcctgtgccttttgtctgagacagctgaaattcacttatcctaaccacctccctgcaagagacaggttctattatgtcatccttgtttcacaactgaaaagtaggcttgaataagcaatgtgctgcaagccaaacagtaaatggcacaatccgacccccctggagccaacccatgaggtccaagttaagaacctctgtcggccgggcgcggtggctcacgcctgtaatcccagcactttgggaggctgaggtgggcggatcacgaggtcaggagatggagaccatcctggctaacacggtgaaaccccgtctctactaaaaatacaaaaaattagccgggcgtggtggcggccgcctgtagtcccagctacttgggaagctgaggcaggagaatgctgtgaacccgggaggcagagcttgcagtgagccgagatcgcgccactgcactccagcatgagtgacagagtgagactccgtctcaaaaaaaaaaaagaacctctgtcctagagcatttataattcactacagaaatgtattctatgaaggactttaataccatcagtcagccttatccagacgatctcaattctaatcctgtcaccaccactttctgactgagggctattggagaattttctcaacttctctgtgcctcccttacctcatcaattattattatgtatgtgtatgtgtgtgtgtgtatatatatatatatgtgtgtgtgtgtatatatatatgtgtgtgtgtgtgtgtatatatatatatatatatatatttttttttttttttttttttttttctgagacagagtctcactctgtcacccaggctggagtgcagtggcacaatcttagctcactgcaacctccaccttttgtgttcatgcgattctcctgcctcagcctcctgtatagctgggaacacaggcgtccgccaccacacccggctaattgttgtatttttagcagagacggggtttcaccatgttggccaggctggtctcgagctcctgacctcaggtgttccacccacctcggcctcccaaagtactgtggttacaggcgtgagccactgctcccagcctatttttatttactttttttttttttttttttttgagacggagtctcgctctttcgcccaggccagactgcagtggcgctgtctctgctcactgcaacctccgcctcccgggttcacgccattctcctgcctcagcctcccgagtagctgggactacaggtgcccgccaccgcgcccggctaattttttgtatttttagtagagtcggggtttcaccgtgttagccaggatggtctccatctcctgacctcgtgatccgcccgcctcggcctcgcaaagtgctgggattacaggcgtgagccaccgcgcccggccttttatttactttttgagacagggcctggctctgtcacccaggctggagtgcaatggtgcaatcacagctccctgtagcctcaacctcctgggctcaggcaattctcccacctcagcctcccgagtagctgagactacatacgcatgccatcactgctggctaatttttgtggttttgttttgttttttatagagacggggtctcgccatgttgccgaggctggtctcaaactcctggtctcaagcaatcctcctgtctccgcctcccaagtgctgggattataggcatgagccacccgcgtctcatcaattaaataaataacccctaggacgactaagatgtcttcaagattacatgagatcccacatctgaaggtttttgcaaaggacttggcacaaactcgtgcgactagacatggatatggctcttgctctggaaaggatcaccttgataggagcaaacaaagctggtcttcggtgccctttaatctcccctcccagccttccaccttccacactttaagagtcgtccctgccgaccccccgaccccgtttttctgaacctcccttcctccccttgcatagtccaaagcctctctctaaagcagccccccgaaaacatctgtcaagttccaaacttatctgaatcggaagctaccaatagccaacctacatctaaggggaactgtaagatttcagaagaacaagaagcataggtcgcttaggcgtgggccacccaagaagagagacttaacactaggtaagcccgcgctggctgcgaaggcgggagcggcaccaggaccatccagggcgcaggcgcagggacctcacggccacgccactactcagcccgagctggccaatggggagcggcggccggaagaacgcgcggcttcgctaggttccgcggcttcctctgaccaagcttgacgtcaccaaagcgcgccggaaatgcgaggtcaactgcgcgccgctggcgctgaggggaggaagtttgctgtcgagcggcctgggttccgtgggcaaggccgtgggaggcagcgttggctgcttcgacacactgagggcggcgcgatgggagacgagatggatgccatgattcccgagcgggagatgaaggtcagagactaaccggggcctccctcccttctttagtcctggcgttgccttggagcccagctgaaaggcgaagcgcggtgctggctgtcccgcctcctgcttgaacagtttaccgcgttcacagctctcaccagcgcgtctgccgcgccgctggcgtgatagccccaccgaatgcagtttcccagtcccatcctggtctcgtgcacggctgttgagttaccctagctacttcctggggcggtcacaatagtggcaataactgctgtttattgagtgttgactgtgtgccaggcactgtggtagtcatcgcggcagccctacgaagtagtcgttaacgtagaggagtaagttgaggctcggaaagtaatttccctaaagtcacatttgacgcggggctgaaagccagcatcatttaagacctttgctctcccagtacttctgtaaggtgatacgggcttgcctaacgtagagtcagggaaggtcatccatcctgcagaacctttagttgattggactaggaagactattttgacctcggtatatcagcctaaagtcaggaacctaaagggagggccaagtggtcccagtgatagcaacgtgggagtcccccagggataacttcaggatggtgtgtttaatagttcttatatgggttctgacagaatgagggtacaacagacgggctacatctgttttaaatagtgaaaagaagtaagttgcaggaagattttaggcatctgtgtgaacaataaatcactaaaatgcatttagggcatagtaataccatgtttagaatagtgatttttttttttttttgagacagagtcttgctctgtcacccaagctggagtgcagtggcatgatctcggctccctgcaacctccacc

SEQ ID NO: 12294 - DNA, 6000 bp, Homo sapiens
tatctcaagatgagcctttgttaaggtgcctgttctctgtgccctgagcgctcatgttgaaacctgtgtgagctgctgaagcattgggttagactctgtggaactgagatcaaaatgtgtcaaaaggattttttgccattgaagcattgtgcattcagttccttagaaaagcctcttaagttcttcagtttatgcttttgtaactaggagcatattaaccagtctctttttcctgattttaatatattttttgagtgtccttcagcctaaggagaaaagagggtattagaatattatttgagggggaaagtaatacatatattttttctttattataaatcattatgttttatgcttcccaaaggtaatttgcagcaaattttaaagagtaggtcaatgccaagaattattgcatcctttacagatggctaataatcagtcttctgtgaaatgatattcttcttccttttctttttttttttttttttttttttttttttttttggattttcaggcagagtatcactccgtcaccctggttggagcgcagtggtgagatctcagctcactgcaatcttcacctcccgggttcaagtgattctcttgccctagcctcccaagtagctgggatcacaggtgtgcaccaccacacccagctaatttttgtattttagtagagatggggttttttcatgttgcccaggctggtcttgaactcctggcctcaagtgatccacccgccttagcctcccaaagtgctgggattgtaggcacgagccactgcacctggccctcttcccatttttaaaataacccagaaaaggtggggtcattgaatcaatggcttgacactattagataaaattttttcactaagaaaggttgtgtttttttttttatttttaatatgatgggcaaaggtgtctaagttattacattatttagtatatttgatgtgcttggttcgttatattttaaagctagtttgaaatctgcaatttgaactttgcgtgtgtgtgtgtgtgagatagagcaagattctgtctcaaaaaaaaaaaaaggtgcagtggtacagtcatggctcactacaacctccacccccaggactgaagtgatcctcctgccttagccccccgaataactgggactacaggtgcgcgccaccacacctggctgatttttgttttttaatttttcggttttggtttttgggggtttttgtttttgtttgtttggtttttgggtttttgtttttgttttgtagaaacagggttccaccatgttgcctaggctggtctcaaactcctgggctcaaaggattaacctgcctcagcctctcaaaatgctgggatgtgagccaccatgcctggcctgagtttttatcacagtgaataatctgttctgattcacactcgcgtgggattttcttccttagctatggtgtcttcacttacagtgtaaagaaaacgtacaaaaggagagaggagatggtgaaaggagtcacaaagtttttgaactagattttcctagccgtaaaactcagttctgtcaaaatgactgagttagggcttctatttcattgtatccattgttttccctagcagtgtggggctctctgacatgcttgttggtcttggaggggttctgagaggctctccctagtcttaagtgcttctgtcttaccagaccttccttctgtcccctcacttaacagaccatctgctccggccaccattcccacatgcacatttgtcatgtgtctctactgctgcagctttgctcatcttgcaagaagtccccactcaaacttctgctacagaaagcccagccatcccccaatgggctctcaactgctatccctgtcgtatctcacacacaaactgcttctctgcttagagatcatagagtggccttactgcttctgagataggtgctttgactctgttgtcatttatcttctagattgtaaattcctgagggcggtttgtatgaatgaatgataaaatggaatattaagagggcaatattgtgccttggtttgttcctttttaatttctctttttccacttgttaggactggctttaattttgggataatcacaccaacaccgtcttctaatttcactgctgcacaaggtacagactctgtgttgagtagcattactcatgtgttttctctaaataagtacaggttatttttgcccacatgttagtatttgacttgttcctgaatcttacttacagtatctgcaataagctcagtgttgataatgtgcattagaaatatgcttaatttaagaaactgatgtgaaggatttctatttttataattaaggacaaggaaaggatttgcttctagaaaatcagggctgtgctttaacatttaaatgttaacatgtgaattaaaatttctccattttttgtctgtaatttaaaatttcttcaatttatagggtgattctgtagggcaagatagacatggtaatagatagactgtagaaatgaaagaccaaactcgtttttttccttgataacataccagcaaacacactcatcccatgcatgttgttaaaaatccatcaatagactgggcgcggtggctcacgcctataatcccagcactttgggaggccgaggcaggcggatcacctgaggtcaggagttcaagaccagcctgaccaacatggagaaaccccgtgtctactaaaaatacaaaattagccagccgtggtggcgcatacctataatcccagctactcaggaggctgaggcaggagaattgcttgaacctgggaggcaaggttgcagtgagccaagattgtgccattgcactccagcctgggcaacaagagtgaaactctgtgtgtccccccccccccccgcgccaaaaaatccatcaatagcatgtttttaacatttaaaagaatttgaagccctataaagaaaccagatctatttgttaagtgcctttcagttatccgtttatgattaagtcttttattttatttatttattttgagatggagtctcactgttgtcatccaggctggagtgtaatggcgcaattgcagttcactgcaacccccacctgctgggttccagcgattctcctgcctcagcctccctagtagctgggattacaggcgcccaccaccacatccagctaatttttgtatttttagtagagacagggtttcaccatgttgattgatcaggctggtctcgaactcctgacctcgtgatccacgtgccttggcctcccaaagtgctgggattacaggtgtgagccaccacgcccggcctcgttactcttgtatttattaaccactgttgtttgaccaggccttatgggtgctttacccatatttcctgcgatctttgtaacagcacaatgaaggtaggtattgtaatgatctagattttccaaatgggggaattgaggctcagagaggtaaagcaacctttccagattcacacaaccagcgagtggcagagtgcatagctccagagcccatgtccttgaccaccagaccgtactgcctctgtcaaatagctgacttagtagagcactaataagtagccattaattgtacataaaaatgattttctgtggactgacactttatttgctcataaaaatgaaggaagaacttccattttgaatcaagtcctggtctatcaggaggtccacaggccattgctgtgctgaggatgttattaaggaaagcacacagctagggtaaattaagggaagaggcttttttatttctctttgggataatatgttaatttcacatattctagatattttgtatttgttgtgatttaatggtcataaaaaaagtattttttccttttcacctcagacgactcagagctgatgtttgtgtggagaagcactcattccacctccttagagaaagctgctgtgagaacaaggcaccctgactctgtagagggaggagagaaactttggcttagaaacacaatcagtggaaatgtaatgggtcatcttttgctaaatccaacccattttctgatttctttttcttgctaggggcaacaccctccactaaagagtcaagccagccggacgcattctcatctggtgggggaagcaaaccttcttatgaggccattcctgaaagctcacctccctcaggaatcacatccgcatcaaacaccaccccaggagaacctgccgcatctagcagcagacctgtggcaccttctggaactgctctttccaccacctctagtaagctggaaaccccaccgtccaagctgggagagcttctgtttccaagttctttggctggagagactctgggaagtttttcaggactgcgggttggccaagcagatgattctacaaaaccaaccaataaggcttcatccacaagcctaactagtacccagccaaccaagacgtcaggcgtgccctcagggtttaattttactgcccccccggtgttagggaagcacacggagccccctgtgacatcctctgcaaccaccacctcagtagcaccaccagcagccaccagcacttcctcaactgccgtttttggcagtctgccagtcaccagtgcaggatcctctggggtcatcagttttggtgggacatctctaagtgctggcaagactagtttttcatttggaagccaacagaccaatagcacagtgcccccatctgccccaccaccaactacagctgccactccccttccaacatcattccccacattgtcatttggtagcctcctgagttcagcaactaccccctccctgcctatgtccgctggcagaagcacagaagaggccacttcatcagctttgcctgagaagccaggtgacagtgaggtctcagcatcagcagcctcacttctagaggagcaacagtcagcccagcttccccaggctcctccgcaaacttctgactctgttaaaaaagaacctgttcttgcccagcctgcagtcagcaactctggcactgcagcatctagtactagtcttgtagcactttctgcagaggctaccccagccaccacgggggtccctgatgccaggacggaggcagtaccacctgcttcctccttttctgtgcctgggcagactgctgtcacagcagctgctatctcaagtgcaggccctgtggccgtcgaaacatcaagtacccccatagcctccagcaccacgtccattgttgctcccggcccatctgcagaggcagcagcatttggtaccgtcacttctggctcatccgtctttgctcagcctcctgctgccagttctagctcagctttcaaccagctcaccaacaacacagccactgccccctctgccacgcccgtgtttgggcaagtggcagccagcaccgcaccaagtctgtttgggcagcagactggtagcacagccagcacagcagctgccacaccacaggtcagcagctcagggtttagcagcccagcttttggtaccacagccccaggggtctttggacagacaaccttcgggcaggcctcagtctttgggcagtcggcgagcagtgctgcaagtgtcttttccttcagtcagcctgggttcagttccgtgcctgccttcggtcagcctgcttcctccactcccacatccaccagtggaagtgtctttggtgccgcctcaagtaccagtagctccagttccttctcatttggacagtcttctcccaacacaggaggggggctgtttggccaaagcaacgctcctgcttttgggcagagtcctggctttggacagggaggctctgtctttggtggtacctcagctgccaccacaacagcagcaacctctgggttcagcttttgccaagcttcaggtaagaatttgtggaagctttttacttgtttccctctctgctatttgaaacattagcaacagacccctattacttttgtaattaaaggggagactcaaaacccaaaaataatctgtaggttaaagaagacagcttggagcaca

SEQ ID NO: 12295 - DNA, 6000 bp, Homo sapiens
tccctgttgatttctttgtttcttcagttactcttgataagttccactctctcatatatgagtatgtatgaaaagatacatgtgatagtgattaagatttaccaaaataaaacataaccaggtctcttgttttttatgctttttaaaatcctgaaataagttacaagaagttgaggctttttacaacaatgggatgagtatttaccttgttgaagttcattaaagttggagggatcaatagcaaagggcctaggtgacattttaatgcttcacaacccaattttataattgtgtgtagagtacacatccatggaacatgtgtgcatttgtctgcctctgttggcatgtagtgctggtaatgtgtggccaaaaacagaaaaaaatgactcttctgtgttttatttttctccaagaacccgagtttccagactcttagtgatctgtgcctctgtcgctcatttctgaagcaggaactttagtgttgctggcaatgtcagtgtcatttgtagactcactcagtaaagagatgtctctttggggctctgttatagcaccattttcttcttagaacaaatatcaagatgaatttctgatatttttcaactccatattgctaaaaagtggaataaagtcacctaagatatggatacttctgaatttggcttttctatctcttgatcatttctagctattgatttccattgttttggttcatgctcatgcaaaaacgtttgaacatatttgtttgagagtatactgtttttttctgtgtgctgtcttggatcttgataagagatttattggatctggtttgttaattggtttactggctgattgcactgaacagcatttctttgcaggggtgtcacgtggtgtgtaggtactgtgaatcctaattttgtgtatttggggatttaggatactcaggagatacatagaattatcacaaataaatagaataataattacactcagtcttattcatgcataatttactatcatgtcacaattgaattctggctgtaaaaaattttctaaaatttggataaattgctgcttttatttttatttctgatttctgtttgtctttgagaaagcatgaaagagtttcctttcctttgtaatccttgtgagctccaacctcttctctaagcaagtctgctgtgtctgtccaggtactgctcagggcccagcagtctcactcacacattcttttcctctggtacagattcagcggaggtgacgggggaacactgtatctgtattgcctgcttggtaaactatctcaggggaacagagatgtgtttctccagagagatgcatatttatagctgcttctggcttcagtagaagcatgaaacgggttttgtttcattgaacataagttcactttttcttctctctcaatctaataaagtctgtttaggaaggtccccttgttattccagcagagaatctcaatatgcttgtaaggtttgttaagctgtttgataattttcttccgtgaggcacaggcctatcttttatcttctaagttcatttttgatggaaaatatgaatcctccctaaatctaggggagttctgaaaaataaccaggtcctacaactactactgctatatataccagtcagagtagcgctgggctgacaacagataaattgaaaaaattgccgctaggagccaagaacttttgtgtgtgattacactaacaggtagttttcccatatgtgaacactagttattgaaataacagttcctcacatacagtattcacctacttcagagttaacaaaagatgatgagagctctttctgcgaataggggtatacttttcatgctgtagcaaagatgcaggttgggaatggaacagtggtacatttgaatcccttggatgctgacctggtgagccctggagatagctgctgtgagaagctaagatctctttggatagcacctttgcggtagcagcgaattggatgcataggtggcagtgagaatgcttcccatagagcctgcttgggtaagagaatcaggaatttctcgtggtctacaacagggggaagggccagggaggaggagggcttatactctggatagcaaaaagatctagttctgaatggttactaatttttttctttggattgcagaaaggaaataagttataaggccactgctttgactttcatgctaaaaacccaaagttcatttttaaaatttatccttcaaaaaaaatgtcaaatcagttgtattggggtcccatgcatctgtatcctacccaaaactggtattgtatattggacagaaggttggcttgagaatgaatgtgatttttacctagtcatgcctttctctgagtgtatgctttgtgtgtttttcagttcttcagtgccctactccacagccaaaacacctcacccagtgttgaccccagtggctgctaaccaagccaagcaggtaacttactgatttttactttttttttttttttttttttgagacagagtcttactctgtcgcccaggctcaagtgcagtggtgcgatcttggctcaccgcaacctctgcctcctgggttcaagtgattctcgtggctcagcctcctgagtagttgggattacaggcacccaccaccatgcccagtcaatttttgtagttttagtagagacgcggtttcaccgcgttggccaggctagtctcgagctcctgacctcagatgatccatctgcctcggcctcccaaagtgctgggattacaggtgtgagccaccgtacccggcctgagttttacttttaacattcatgccgtgtctgtctttgtaagtgaagaccatactgtttttaagtcttgactttgtttaaatgaaccataagtctgataaaggcccataatcccttccccacaatttatgccagtcttgacatggctgttaatcagggtaggtcagtcaggacctgatactgtcttcataggccatttaaacattctgcacctagtaatttggggtcataattctaataccatacatttttatatgaagtattttgctttgcagtttactttcacattatctcagttaacccatacaacagccgtgtacagtgggaggataggtgtttagatatgtctcactggtgaggcagcctaggcttgagtgaccaacgcaaactctcacgattagtaaatggtggaaccagagctgggacccaaggcttctgacttcctcctgtccattgctcgtttcactacacagttgagtatcaatgtctggggtataggttatctggttttctcctgcaatccctgtttgtcagagtttgcatatttttagtgatgttatgtctagcttgtctagcttcaggcttttgcctgataaacattgtcccttagaaaaataggtgatattgcaaacagttaaacaatccagaaaaaagtgataggggatggttggaaggtcagtcaggctagtgctgaaactcttcctaagaagttctggtttctctcactactcttacatctgtctctgagatgagtagtttgtgttagagatcagaatttgagactggatatcaggacttgcctatttaagttctcaaacttgcctctgttccttagtttaccataacttaaaatggcatttaagcatttagcattcgatctttcttctggaggtatttgtgttcaccatggaaaacacatgataaggcataagtcatggcgagtgaaggaacattgactggagatggataagtcagttttgcttttaaccttattgtacatgctttgagagctagaaccattttattaatttactccttcattaattcatctacctaatagtcaagtgcttttgatgtgctaagcactgtgctaggcactgggaagatagccatgaactaggccagtgtgactgccttcttggagcttgcagagtatttctattttcatcctttaatatgatcttacatatggttaacttaaattgagaccttttttttgtttcctttttctttttggtaatttatctaaaagtatttgtccttgcttattttaaattatatttttgtgtttacattttacatatttctttgttacaaagaatggttagtggtttaacataaacattttgcttgcattctgttataggggtctctaataaattcccttaagccatctgggcctacaccagcatccggtcagttatcatctggtgacaaagcttcaggtcagtttgcatttttgttttcttgaaaagtgaaagaagcactccacaataggggttattgttctggatcactgagacagttgccataggaaacaggagtcacatttgatgagatcgggagcattcagggtagtatgaccatagacaagagatcatatttgaaagccgtcagctaatgaagaatttctagaaaattagtatgcccttcaatggctatgtagacttctgaaatttttaggttagtttgaaaatgatagagcaataggagaaaaacctccctttaaattcttttcctaaaatggagcaatagtattatctttttcttccttgctggatgatcacagttgagaggaatggatcagaatgctaaacgctatttcttccactaaaaggaattaaaaattctgttggtccacagtgacagttcaaaagcctataaggtagagaaagtgaaacagatttgtaagatctcagagtatataatgagtcgatattatgagattttatggcttcacgtaacttctcctacactcactcaagcataattattcttaatttagttttcacagtaaccatgagtgttttgaccagacactttgtccaagtgtcattgcccaaaccaactttatgcagaatgtgggtcttcctcagtgtccccttttgttggctcctttattatagcctacctaatttggcgtgtattacttcctgctgcaagggtcttgtgctgtctgcaatactgaatttttacaacactgttgattctggcatttgtttcaatcatgctcttaagtgggccttcaagcaaattctgttagaaattgaacttcatacattagcagcctgcgtctcataatcttaatcatacagtcattctgactttctctgtaatcccaaactttctgattggatactggatttatctttagtagctattccttgcagaaggaagccattattgcataagccagagttgtattctagaattcggagtgatatggaaccacagttggtatcatgtacgcctcacatgagaaggaggtatctagcacttctcgaccggggcctaaagctttatgttaaaaggaaaattatatagtagaactgtcaaagacttgagtattttacaaaaaggttttgaaagatcatatactcttttttcaaggacttcattggagaggtttttgtcactcttggagttagaatcaaagaaacctaaggaactttgctttatgcatgtctgggcaagtagtgtgacttgcaagaaatttccgagattcaccattcattgctgatcatgaaatcctctcttttgttacgaggtgttcacttctgttttcacttgccaggtaatcaaggtttagaaaagaacttttttcttttggtaggaaaacttccctgaaaggtgctgcttaagagtttgcaaaaagtttctttttgaaaaagagcatttctaaaacctctagagaatagttctcttattagtaatggaaataccttcattgtttttctgattgtaaaactattacatgcccagaaaaagcctatggtgtagagatatataatgtagaatgtgaaagctgccctatagattctgtattccagagatcatgatttcatgtatatctcttgaggttacttcattgttttttaaagaaaaatatcctatatactgtatatcctatatatattgattttgtaacttatttccccttctctgccccctcttacaataaatgtcttggtctctgcaggtctgatacagatccaccttactc

SEQ ID NO: 12296 - DNA, 6000 bp, Homo sapiens
acttctctgacattggcatcggatctgaacatctggcagcaggctgataaggggtgcagcggaaacagcctctgctgccgccagcaggcccgccccctccgctgccctgcacggggtctccacatccaccctccctccacctccagctctccaggcctcggcccttcccgcttctcgttctctgcctcagtctctctctctccgtctgaatctctctcatccctactctctctctcttcctcatttcttctcgctctcatttcttctctccccaaccctcaccactctgaatttctctgtcatcctccctccctccgactgcgtctcccctttctctctgtgttcatattttctgcccaagcctctgcagcttctctctctttttctggccacctttccactctgcagcctgatgattctgtccctctctctgtttcagtttctgggcctctggtttgtttgttccttatcccacctccaggaaatgggcctggcactttgggaaagtccccagttaggagagagaccctgggctttgtttgcctggggagggaggttgggggcgcctgagtcaggactacagccctcctttgctttcccctctgggtaggtctagtggcctgggaccaccagggctagagcttgaaggaaaggacaggccacccaggggctctggcagggtggagaggagtcagcctgcaggcctgggctctggactccactgctgggatttgaacgctggtcccatcacaccctcgcctggtgactttgggaagatgcctggtctctctaagcctgactttcctcctctcttaactgctgctatcgggggttgagagggaattactacctacctcccagaatgccggagaggttcgagactgactgcaggtgtggagtggttagctggggacctggcacataggggggcacttctgagttggggccttgccattcccagcacgctggtaacccctggctgcccctgtccccatagagcacccactttggctgagggtgggagggggcagcacagaggaagggggtaccagtgactgtggccagggttggttaggggatgaggagcacccagccttgagtgacaactgatgccgtcagaggagacaggacccatggagcaggcagcagagctctacctacaagtgcggaggaaagtggtcattcagcaagttccaacgcttgctccacgcaggctgctgtggacccagagataaatcaggcctttcctggaggcttccccaggctgaggtgaggcgctcatcacagaagggcaaacggtgtccatgatgatgttgcaatctcatactcaacagggaaagggcctctgaggacagatcatccagtccttcagctggttgtttgtttgtgttttgctgacacttattgagcacacatgacataccagccagccactgaatacattacacgtattgtctcctttcatccccattttatagagaagagagaaggcccagagaggggaagtgactggtcccaggtcacacagctagaaagtggtagaactgggatttaatccagagactctgccagcaattctccttctcagggctcaaggactcaccaggagactaggacaaagccaggctggttccttctatggcgtcatggtgtggagagagacctgtttgtcttgtttaagaaggcggacaaagcagaccccacttcataaggtcgcctattaaatgaggtgcaaagattcatgattttgttattgttacatgtatgtgacatgttagtggtgggtatttgctgggatatgtgtgtgtgtgtgtgtgtgtgtatatatatatatatatatatatatatatatatatatattttttttttttttttttttttttttttttttgagacagagtcttgctctgttgccagcctggagtgcagtggtgcaatcttggctcactgcaagctccgcctcctgggttcacgccattctcctgcctcagcctctggagtagctgggactacaggcgcccgccaccaggcccagctgatttttgtatttttagtagagacggggtctcaccgtgttagccaggatggcctcgatctcctgacctcctgatccgcccgcctcggcctcccaaagtgctggaattacaggcgtgagccactgcgcctggacttgctgggatatttcttattaaattcagagggtgagtgatattagtccagaaacaaaatcattgcattaaaatagggacactaggctaggtgcggtggctcacacctgtaatcccagcacttggggaggctgaggtgggtggatcacctgaggtcaggagtttgagaccagtgcggccaaaatgatgaaaccctgtctctactaaaaatacaaaaattagccgggtgcggtggcgggtgcctgtaatcccagctacttgggaggctgagacaggagaattgcttgaacccaggaggcggaggttgcagtgagctgaaattgtgccactgcactccagcctgggcaacaaagtgagactccatctcaaaaaaaaaaaaaaaaaaaaaaaatagggacactaaggccaggtgctgtggcttacgcctgtaatctcagcactttgggaggccgaggcggccgatttcttgagcccaggagttcaagactagcctgggcagcatggcgaaaccccatctctacaaaagaaaatacaaaacttagccaggtgtggtggcatgtgcctgtagtctcagctattcaggagactgagggaggaggattgcttgagcccaggaggtcgaggctacagtgagctatgatggtaccactgcactccagtctgagtaacagagcaagaccctgtctcaaaagacataaaacaaaatagggacactaaaaaaagaatattaaaatagggagactagttaggttcagccatatgcaagagaagtatatcttgtaagaacttctctaggtgaaaaagacataattacaaggtcatgcacattgaggaataagttgtctgttacgttgtaggtggaatatattcgatcagttagctatgactgttggtgaaattatattataaaaattattattattgaattaatgattattaattattaaaaccctattgcccgggctagagtgcagtggcacaatcatagctcactgcagctccaactcctgggttcaaaccatcctcctgcctcagcctcccgagtagccgggactacagtctatcagtattattgttgtatgttcacacacaattttaagtggcataatgaggaaaacacacactaggttttattttattttattttattttattttattttattttattttatttgagacggagtctcactctgtcgcccaggctggactgcagtagcacaatcttggctcactgcaacctctgcctcccaggttcaagcgatcctcctgcctcagcttcccaagtagctgggactacaggcacaagccaccacaccaggtgaatttttctattttttagtagagatggcgttttgccatgttggccaggcttgtcttgaacttcttgacctcaggtgatccgcccaccttggcctcccaaagtgctgggattacaggcatgagccacagtgactggctggaaaacacataggttttaaatatagttggcgtttctactttttcagtggccttccatgaaaaaatatatatagggagagttggcttcacttcacttatccagaaaagtccctcttgttccagataagtgaggtgttgggtgtgatttatttatttcctccaatgaagggatatgtgggaggaggggtggttctcaacagtgactgccccatagtcaccctgtgcccctccctgctctcccaagatgaaaggcacggaggtaaatcctctgaggacagagacttttcttctctttcctatgggatccctggtgcctggaacagtgcctgacccctaagtgtgcgctcagtaaatgtgagacaaacagaggaacacacaaaagatccagtcaccgtgggagcggcacaacaccctgcaacccgggccctacaggaacaggatatttcagagcccatctgggcccagagattggatggggacgtcccaggttgtctagggaggcctagccttctagataagggccccttcctgctaccctgtcctatcctggactagcttcatacttggttcaacctggggccactatagccaccacttggcctcagaggcagtctcagcccagcctcagtttttccagccatcgactgggaacatcagcagcccacagcagatgaggacattcagaggccaccgtggcatgcacgcaccaggtgtccaggccgctcacctgctccccttccggcccccctcttcttccacctgatggaagaggaaaaagaggtggaagcagcaggccgcctagtcaagtcgccatggccttgcctccgcactggcctgtcctgactctactccaatgtccgggctgggccagaccatgccaggccaggccccagggaggtagccattcacaaggagagaggagcaggcggcaggccgggtgggggagcagcccataaatcaagccccactcccacccggtttctaacaagcggggctgcctacccgcctctgtggggtccctgcctctgggctcccacagcgggcctggaacagccagctggccaaggcctctgcagtgccttggcctccgcccccaccctcagcccccagatagataggggtattttttttcttttaggagaagaagaaaaaatagacgtaaatgaagagaaacaccaacaaagaaggcgagaggcctgcagagtcacgtgggggcagagaccaattgggcctccggtggcccccccaccagggcggggaggaggaggaggacggacggacagggccagcctgctgtccggctgccgcccgccgtggtgtgagggggtttctgcgcacccacagtcgccaccgtcccacctgggctgccggagcctccccctggacccctggtgcccactgccaccctcatccggtgtgagagcgctgcttccgcttcgtaagtgagggccttggcccaggcctctaatggccagcctccttctgcagtgcctccctgcagcctgggccggccactgcctgctccacttagtgaccggtgccccctgctctgggcagggaaggtgccaggggtctcccagactcaccctcccaccatgctaccccctcttcttccctgggctgccgatgggaggagccaggcctgtgaccacaagccccatggaggtccgctggtgtcccgctgtctctggccaggcatccaccaggctgtgtgggtctgagcctagaggtctgtgagtgtgtctggagggctctgggcctgtcttggggctctgtcccccacctgagtttctgtgttgtctctgtggctctctctgagtcttgctgtgtatccgtgtgtctgtctccggcatccatctgtcagcctgggttctgcggccgggccaggtctaggcttccctccctgggtgggtggatgaggggctggaactccccaggcggtgggctggaacctggaacctgtgggggtgggtgcctcggagcctggagtgcagaggagccatgggcttccagccggtgagagtagaaacccttggggagaggggattggagatagagggagaagggcctgagcccagcccccacccaaccccggcggctggggcctgtgtgtccagctccaggtttccaggagacctcgggtgagctctaccttagaacagccaactggggcaccccagcccatcatccaccaacccccttccctcctgcagtcactgtctgagggctccattgtggtggggagctgttcagaggcggcagtgacccccacctccagctcgggcagatgctcttgtttctcaggggtttgggggtgcggggggtacgattaacagggtctctggctctttcttccctcctcatccaagatt

SEQ ID NO: 12297 - DNA, 6000 bp, Homo sapiens
tcgtcaactttccagctcaagctatcctcctccctcagccttctgaataacttggactacaggcatgtgccaccatgctggctaatttctgtatttattttagggatggggtcttctgtgttgcccaggctctcaaactcccgggctcaagcaatccagccaccctagtctctcaaagtgttgggattacaagtgtgagccaccatgcttggtctcattttcttcatagaatttattgctcaatgggactgtctttcttgttggtgtgtttgtttccttgtgttggagcatgacttcctagggcacattcttagtttctccccatgaacattgaactcagtggttctcaaagtgtggtccttggtctcagcctccgcatcatcggataacttgttaaaaatgcaaactctcccagcctgggcaacatggtgaaaactcgcctctactaaaaatacaaaaattaggctgatgtggtggtgcatgcctataatcccagctactcgggaggctggggcaggagaatcgcttgtgaacccgggaggcagaggttgcagtgagccgagatggcaccactgcactccagcctgggcaagagtgacactctgtctcaaaaacaaacaaacaaacccaaaaaacaaaacttagctgggcgtggtggcacatgcctgtagtcccagctacttgggaggctgaggcacaaaaatcacttgaacccaggaggcagaggctgtagtgagccaagatcgtgacactgtactccagcctgggtgacagagcgagaccttctcaaagaaaaaaaaaagaaaaagaaatgcaaattcttaggccccactacagactcacaaaatcagaaactctgggcatggagtccagcaatctgtgttttaacacaccctccagggctccagggggcttagggtttgagaaccactgacctggcacaaggtacggtgctctacaactctcagctgaattaaagaaccctgtgcaaagcacacactgagtacaaataagctgctgctgcttctttttttttttttttttcttgagacagagtcttgcactgtcgcccgggctggagtgcagtggcgcaatctcggctcactgcaatgtccgcctcccggcttcaagcaattctcctgcctcagcctcccaagtagctgggattacaggtgcctgccgccacgcccagctaattttttgtatttttagtagagacagggtttcactatgttggccaagctggtctcaaactcctgacctcgtgacccgcccacctcggcctcccaaagtgctgggattacaggcatgagccactgtgcccatccacaaataagcttcttctataactagagatcccctgggaggcatcaaaaccggggctagattagtgtaaaaagtaaatatcgtgtatgttcttatggacatagactatctgaaaaacaatgcaaaaagtcagcacggtggttctaaggagatccagggagtaagaactttcattgcatcctgtgggttttgtaatgtgtgtgtcctatgtattcaaaaacgggacagagcgtacttaaaagaaatcgaagccggcaggggggattccctccccaagccctttcttgatgaactgcggccttgctctgactctaggcaggacaaggaagagcaaggctgccgtcactagaggaactctgccccctgctggctgttcccccacatgacctgataatctctggctgcctcctctttacccttctctctctcagtgggctctggtcaccacagattctcccagctcctcaaatgggccaagccgtgatctggctggccttgggaccttggcacatgctgttccttccacctgaaagccttcctctccacctagtctcacttctagtcatccctcccgattgagatcagtcaatctgacccgcctcggcctcccaaagtgctaggattacaggtgtgagccaccatgtccggccatgcctgccttgttcttagctgtatcccagtctggtcccgtctgtctgctgcctctggcctcagaaccacagccccctaagatccctccttacccttagacacattcctttccagatcttttgagtcctgcaggtggtagcagagtctttttcatctttctgaacctgtccccacatttctaaactgggggagaaagtattgatttcttaggattgttggaagaaatgtagagagattagataaaaggccccatagtaggtgctggactcatagtgagtgcttagttcattgggctgtcaatgcttaggacagtggctggggtctctagcacagtcatttcccttgtttttctcagtcttgtggtatttgactcctcccagaagcactttcagaagacatgcatctgagatttagaaccactctttaaataacattagtaagaggttccatttattaggccagacctttaattgctttgcaagcatcgtttaattctcatagcattcctgctaggtagcaactatcattattacccatccccttagaagacaggaaatagaggctcagaagtcactcacctaaggttagctgtttttatccattctttcacccagtcagcaattattgagagcctactatgtgccagatctgtactcagcagttggggttatgagtgagaataaagggatgtgactagtcagggaggtgtgggaaggtttatggaaggaagggacaacagagctgtagtctgaaggactggaggagttgtttccaggggctgagcatttggctgaactcttctgcccatctaaagagggttgacttagaatcttcatcaactaccaaaactccagggctgcacgtttctgcagtgccacttaggctctgatggcatctccagggacagagaactcactaccaccagaacctgtgacaaaaaggtagattcctgagaaaggccagatggtcctgactttttttttctttctttttttttttgagacggagttttgctcttgttgcccaggctggagtgcaattgcgccatctcggcttaccgcagtctccgcctcctgggttcaaacgattctcctgccccagcctcctgagtagctgggattactggcatgcgccaccacgcctggctaattttgtatttttagtagagacgggttttctccatattggtcaggctggtctcgaactcctgacttcaggtgatccgcccgcctcagtctcccaaagtgtggggattacaggcatgaaccacggcgcccagcaaggtcctaaagtattttagaacccacagctgagggaatggcaggccgtcctctcttagtcacagggtttagctcctgaaacactgctacctagcagaggggatctagttgtccctcggtggaaggtattaaggaagatgccactgaagaaacatttgaacaggatcttgaaagatgaataggagtttgggagtgggtcaggtgaagtcagccgcgttccagcttgaaggagccaaggattaaggttctggtgtgtgacagaatggagctggaatccccatcacttctggtggacttcatcagtgctggaaagggacaatattgttgctatctcatagagcaggtatgaggtttagacggcagagcgttaatgtaagtctcccagattacgtatgaaatacagtttcaccagggttggtaaggtccagttgcccccaagtgcagagaagcgttgcaactttcgtagcaggtgagggacggggtatggtgcgaaatgtgggcaagggtcaggccaagcagggatgcgaatgccaggacgaggacttaaaattaggcaaaaaaaaaataaaagggctaagggattggtggggcgggtggggcaggagagggcgaatgagcggccaccgaggaagctgcagcataatccggcagagcagaagtgggcaaagcaccaacgttctcgttctttgtcttcaagtgggccaggtaggccttagacccttggcggcagcagcgaaatcctttcccgatggggtcgccgaagacggacaccccggcgggcctagtgaccggtggccgcgcgccacctggtggccgcagcgggtggattcggccgggagccgctgcaaaattcgggattttgcttccggaaagcttcgggaaactgaggtgggaggggcaggggtttgcgatcttccaacttgatcctgtccttattccaacccccttttacagatagggaaactgaggaaaggggaaggcaaacaaggctgggcaagggatccctcttaaacggaaggtttcaagacacctggggtcaagagcctagggctttctttaatagccccaatggcccggagcttagtttgcccatctgttctatgggcagggggaaaatgaaaggggaggaggggaaactttagtctttgccgcccacccggaggtaaaaagtctttaaagactaccccggaaagaagagttttatatattccatttgcatacgaacgcagtcacctcgagttaaactccggtcctttaatctccggtccaatttgtcccgcagcggcagggagaggcccacgtgagtaccttcaagccccgcctccagggccccgcccacagggctgggcttcgttgcacgtgctcacccggctgcctcgcgatccacctcctcgcaaagactcattgttggggtggggggttacgaggactcttagggaactttgatcaggtagaaatcacaatcaagacaaggcccggaagtatccgcttactacatagacatcaaacgctttgtcatggttcttgatattgacagactttagctttcccttctcaggacttcttatccctccttccaccccttcagttggtgcggtcggcgtggccggcctcgctgagcggactccaacttccagcgtgccccgcagggccttgcgcggcagcggcgtgtgacgtcaggggagggagctggccagtgctgagggggcgcggcgcggaggggcgcggagcggcgcggagccgggcggctcggggcccagagagagccgcggccgggagctcgcgggctcctgacaacctcctcccctcggcggacgacgaccacggcgactagggcgccggtcatggcggagcaacaaacccggcgcggaccctaggcaccaccgcatggagcgggacgaaccgccgcctagcggagggggaggcggcgggggctcggcggggttcctggagcctcccgccgcgctccctccgccgccgcgcaacggtgggtgaggggcctgcgacgcccgggccaggcaggaaccggcttcctgagcctccgccagggatccccctcctctctgccgaccctcgccctgggaagccgcagcggccccgcggccccttagggtggcccttcaccccgttccccgttggcgcggaccctccctctcctccccggtctcgctcagggtggatcctcctccttcgtccctgttcccttctgcgcggaccctccccctgcccgggtccctgggcaccgagcttcatttccccctccccccgtcccctctgcacaggcttcccctccccccgtcccctcagcaccaatcctccctcctccccccgggtcccctccccctgtcttcccagcaccgaaccttcccctccccccgggctcctcaggttggaagtccccaccgcggtccgtcagtgggggcatcccctcactcgggttcccttaacgcagagcctctcttttcccctacaggggttcctcctcccaccgaggacgctcccttcttgccctgttgacccgactccacagcacccttgtaccgctcagctttctagagcgttttcctcttctgcagcctcgagcgttcttccttgaatactacgagccccccacctctgccgaacccccgttcgctagacatcccccagtcgtttcctttttcggaccccttcgcgcctcctgcttcccctgcgcctcaccttcctcaacgccccgcgcgctctggccggtctccgcccctgc

SEQ ID NO: 12298 - DNA, 6000 bp, Homo sapiens
tccagaggctgaggcaggagaatcacttgaacccgggaggtggaggttgcagggagcaaagatcgtcccacctgggtgacagagcaagactccatctcaaaaaaaaaaaaaaaaacactaatccatataatttgttacttataatatggctattctctctattcatatccaaattaaaggaggcaatattttatggacatttactgtccatatcgaacattcttaggtgccacagggatttcaaagatgtgtggggtatgcttttgaagcttacactttgacaagggaatagaccatggacacaagagcacaaaaagaaggcagaaaaataagaactttgtgaaagactctgtgaaagactttgtaaagtaaatctgagttcacttcttgggctagttttagaggaagagtaaatttcaattagtggagaagaagaggaaggaggggatgccataaaaaggaaaactatcaacaaatgtgggaggttgaaaggaagtttgaagaacagtgagaacaccagtttgactaggacaggaaaattctgtggaaataaaagaggctctaggtttgattttggagaaaatatccagctgctgaagacttttgaggccagaagttatataacaaaatctaaattttaggaagactaatctggcaatgatggaattgataacgaatggcaagcatgtaggtcagatagaaacttactataatgattgcaggttactgagccaggtacatctcgtgtataaatcaatgtcagctgaagttactaaattttatatatgtaccttaaatatagtatagaacttctacattgattccacaaaacttgaacttacaattttttacttttctttcctgttttcaccctaggtaacaacttctggcttagaatttttatttcaccattcctcacccaatatttgcattaataagaaatcatcatctctatatattagtaaaagcaataagattatacgtctttacttcatcagaagagcatttaaagcaatttaaaacaattgctttatatcacacataagtttcccccaaatttcatattttattttctaagagaaatagttctttcttgcaggcagattaggcctacaaatccaaaacaaaatgaaaggtaactatccagtgaatccgtaatggttaatttagatacttctttaacaggctggctgctataagcatcatgaaagcagaaacttaacttcgtgtatgtaaactagtgacatataaatgtctctcttctgttatagaaaaaggactgagccaagaaagttttcaacgtttcacagattaaggtagtcttatttgatttcctaaaagaagagataaaaaagttaataaaattttttaaaaaggaaattgagattactgaaatagtcacattacatgtgccttacagaatattatgcctggtttctaataaatccgacttttgaaaaggaatagagcagtagatactaattcaaaaaaaaaaaaaagactcgagaaaaactaattctgtttgggtcacctaaagaacagcatacgtttagggacataggattaagcagaggatggtgtctccgtctacgagacagctgtgtctctgcttccatgaatttccatttgagtttcaaaaggctgccactcagtgacctctccagcagtcagtcccccttcctaccccgagaagcactgagccacgaacagttgattggctcagggaggtcagacaacagccctcagtctaacagagcagtccaggaacagatattggccacttgataggaagaaaaggatgtaaaggagtaaggatgtaaaggaaggaacggatgtaaaggagtgaggctgtaaaaaacagaaaaggatgtaaaggaaggtggaggggagaagggaggaggatgcacagaagtaaccaagatagaggtccagaagacacacccactcaaagagaggaaactttgcttggaggttctcagccagggagaagagtttttttgttttgttttgttttaaatttaggtaaacaaggatactgctttgaaacggtcactggagcccaactcatatgaacaatttagcagctttataacaaccctgagtgggcaaggacctttcatacatattaacatttagaaaatgtagtttattgaataaattcattgaaagatgtcatgtttcctaaaaactgtacctaattttagggttcctgcttacagtgattccagttctacatgagagttttaattgaaggaggattaggggggtgagggaggtgcagaacacaaatgaaatttttacagcatggaaataaaagtatttttaaatcttcttgggggtgaagagttaggcaagaagtaatacgtggaaactgtcaagtgcttctctacacatccacccaccagataccatcgcagccggctgggggagtctccctcttcttgcctgacagcttcactttctttgagatctggagctggtgatcacactggcccgtcatggtattttcagttaacaaagcagttactcaacggggcaaaaagccacaaaggagcagagcagctgctgctgcacccgtgatgcaagtgcaggatgagccccgggccgccaccgccgcctcggctcctccgtgacgtccgggaagggtatccccggcactcaggaagtggtggccgcgggcagctccgcccccacgcgactcggggctggccgagctgccgggtggtagaaccgccgggccttccgcagggcgggcggggatcaccgtctccccacctccgtgcgcacacacatgcacgggcctcgcgccccgctgtcgcccgcgcctcgccctgctcacttctcacagcccgcgccggacgaagagagccgccagcgccccccctctctcccacggctcgcacccactcaccccgacccccggcgccgagcccggcccctcgtcgccggtcaccagacctggtcgaaccgagtccaagatggcgactccgcccccgccccctccgcactcccggcggggtcagggcgccccctcacgcggcgggctcgcgcccgagacccggctaaaaatagccaggcccgactatatttggttcggccggatcctggcgcggccgcgcgctccccgccccgccccgccccgccccgcgcgccctgccccgccccgcgcggcgttgaatggagaaggggcgggggtgaccgaggggaacctactccgctatctgcggcgcgcgccggcggcgggtcccggccaaccgccgaatttagtaacatcgcctgcgtcaatcacgcgcctcgcgtgcgtcagcgccgcgcggctccaggtcctgctcccccccttcaagcctttgaatggatacaatgtagcagcgccctccttccttccgaggctggattggaacccgccgcagtgcagagactcggttgctctcggctgggtcaactttcggggcattctcccacgatcctctccgcaccaccgtgtctgaattggaagtggaggcgaagaaagatatacatgccatatttacctatatgtagtttgttttcaagtttctggtcctagctcgaaccttcttcgattctgaaatgtgtgctgtctacaaaggaatcttgtatctcccctcggcgcagcgccccccgcccccgccacacacacacaaattgggacaggtcaaacatataaaacggtatttgtgattcaagcggaccacatggggaccactctatctgcattgtttcactcaaatattttctcctgtccaaaaattcatttctgaaagagactgcgttcactcagcagcaacctttgggactaggggtctttaactctgataaattttgttttcatcaagaaatttacacttaaatttatcatttccaggaagaaattgctctccttcatacagtcacccaggctttcggcacaccatttcatgacaaatgtgtccgaggagaccaaagcaaatcccctagcgagggactgactaataagtcctgttgattgatttcgaaatgtttaatttgggagatgtgggcggagggcatctacaaccatcaaaaagtgaaagtgctagttgagagttccatttctgacccggtgccggggaggaggaatgatttgcaatagtcagacccgctcagctgttcaacacgtgtgtgtttgttttacacacagagtagtttctgctgcagcgcgcgtgtgcatgatggatgtgcacttcgctgggttataacgtgtccagttaagaaacccacgccgtacgtgtaaagaaatcaaaccttatccccggaaccatctgcatccctgtgtgaaacacgcacccagtaaatgatgcggggaggggggattagcctgggcgcagaggaccggagcaacgtaaacagctttagaacctatgcaagaggaaagtgcagctgcacctcagggcgtcttcgggctggtgccagacgccttctgcaccggctgccaggtcactggagctggtcagaagctggctggcggagccttccctttcggaagagctgtcctctcccttacccccctcgccctggctccgtgcctcggggcagcctcggaggcgcgccagcagcactcctccaactctactccacccgagcctgacagctgggcggtcccgcctgacccgtgggcaggccgctgcaccctcccgcagacgcacgccctggcgagcggttccgctgcaaaaagagaagcccccaggccggggccggccgtgcggcggagtttccattgtgcggccgtgcgactggccgaggaacgcgcgcgcgcgcgcgcgcacacgaacacacacaccctccctcgcacacgcggaaccggctgggccaggggagggaggaggagggtgacgtagcgtcccatggcgtcacattgacgtctcgcattccaggcactctatggagaggccgctagggctcctgtggcataaatgacgtgccgagagagcgagcgaacgcgcagccgggagagcggagtctcctgcctcccgccccccacccctccagctcctgctcctcctccgctccccatacacagacgcgctcacacccgctccctcactcgcacacacagacacaagcgcgcacacaggctccgcacacacacttcgctctcccgcgcgctcacacccctcttgccctgagcccttgccggtgcagcgcggcgccgcagctggacgcccctcccgggctcactttgcaacgctgacggtgccggcagtggccgtggaggtgggaacagcggcggcatcctcccccctggtcacagcccaagccaggacgcccgcggaacctctcggctgtgctctcccatgagtcgggatcgcagcatcccccaccagccgctcaccgcctccgggagccgctgggcttgtacaccgcagcccttccgggacagcagctgtgactcccccccagtgcagatttcgggacagctctctagaaactcgctctaaagacggaaccgccacagcactcaagtacgtatgagattcgcccagttaataaggggacttgctaaaaaagttggcttgctgggaagcgtcgctcctgaaattgacaactttgagtgtggggttccctcccctgaccttgccgcccggctccggctttgctagcccagcggcccgtaggttctgatctgaaacttttcccctgtagtgggcccgcggggatctctggagctcgtgggattcctccccccactcgaagaggcgaaaagcctctaacaaagaggaggaccgggatttgtgctatagcggctccagcgatgtaattcagggtatttcggctctagttgtcatggtaatgatgctctcggcggcggcggcggcggcggcagcggcagcggcagggagttgcagctccggtgatgaacggcagtaattttcctgccttttaagtaggattgaaaataggagctctggtgggtccaagtaaatgttgctaatggtggcaccgagctggttctctggaaggaag

SEQ ID NO: 12299 - DNA, 6000 bp, Homo sapiens; identical to SEQ ID NO: 2601

SEQ ID NO: 12300 - DNA, 6000 bp, Homo sapiens; identical to SEQ ID NO: 2592

SEQ ID NO: 12301 - DNA, 6000 bp, Homo sapiens
ttaatttttttagatggagtttcgctctcattgcccaaactggagtgcaatggcgtgctctcagctcaccataacctccgcctcccaggttcaagcgattctcctgcctcagcctcccgagtagctgggattacaggtatgcgccaccacgcctggctaattttgtatttttagaagagatggggtttctccatgttggtcaggctggatcttgaactggcaacctcaggtgattcccctacctcggcctcccaaagtgctgggattacaggtgtgagccaccgtgcctggcccattccatcactcttgagaaagaaaagaaactttttatctgagaaatgccagcctcttttaattatcaggcccagagaggcattaaaatgtgacagcatgggcctggcgcggtggctcacgcctgtaatcccagcaatttgggaggccaaggtgggcgaatcacgaggtcaggagttcgagaccagcctggccaacatggtgaaaccctgtctctactaaaaatacaaaaaattagttgggcatggtggcgggcgcctgtaatcccagctactcaggaggctgaggcaggagaattgcttgaacctgggaggcagaggttgcagtgagccaggatcatgccactgcactccagccccggcgacagtgcaagagactccgtctcaaaataataataataataataataataattttaaaaagaaaaaaaaaggccgggtgcagtggctcacacttgtaatcccagcacactgggaaaccaaggcgggcgggatcacttgaggtcaggagtttgagaccagcctggccattatggtgaaaccctgtcactactaaaaatacaaaaagctgagcatagtggcaggtgcctgtaattccagctacttgggtggcggaggcaggagaatcgcttcaacccgggaggcggaggttgcagtgagccgagattgcgccactgcactccagcctgggcgacagagtatgactcagtctcaaaaaaaaaaaaaaaaaaaagtgacagcatgtaacagcagtcatatctcaccttcccccacccccatggagccaaataattaccccttgaagccacttgctatgtgggctctaaattgataccacatagccataaaatgccatagtctagacaccataactcataccctatagttcaacaaggtatagccaatcactaatcaatgttgtttctgtaagccaatgagaattcctgttaaacaattttgtgtcagcccactccttgtcctcttttgcctttaaaaacttgcttgtggctgggcatgatggttcatacctgtaattccagcactttgggaggccaaggcaggatgatcccttgagcccaagaggtcaaggctgcaatgagctgtgatcgtgccactgaactccagcctaggtaacagagcaagatccggtctcaaaaaataaaaataggccgggcgcggtggctcacgcctataatcccagcactttgggaggccgaggcgggcaaatcacgaggtcagagttcaagaccagcctggccaacatggtgaaaccccatctctactaaaaatacaaaaaaattagctggatgtggtggcaggtgcctgtagtcccagctactcgggaggctgaggcaggagaatttcttgaactgggaggcagaggttgcagtgagccgagattgcgccactgcactccagcctgggcgacagtggagacaccatctcaaaaaaaataaaattaaattaagttaaaataaagtggccaggtgcagtggctcacacatgtaatcccacactttgggaggccgaggagtgtggatcacctgaggtcaggagttagagaccagcctggccaacatggcaaaaacctgtctccactaaaactacaaaaattagccaggcatggtggtgcacacctgtggtcccagctactcgggaggctgagggaggaggatagcttgaacctgggaggcgggagttgcagtgagccaagattgcactactgcattccagcctaggcaacagagtaagaatccatctccaagaaaataaaaaataaaaataaaaaccacatataaaaataaaaaatgcttgtatcaacattccccaaggcaacttggaaaagtgtcccgagcagtcgttctctaccttggcccaaataaactctctatattaattttgcctcagcttttttttttcctcactgttgtttttgtttgtgtgtttttcttttttgagacagagtctcactctgtcgcccaggctggagtgcaatggtgcagtctccactcactgcaacctccacctcccgggttcaaacgattctcctgcctcagccccccaagtagctgggccaagtgggtggcacgcgccaccgcgcccggctaatttttgtattttttagtagagatggggtttcaccatgttggtcaggctggtctcgaactcctgaccacgtgatccacctgcctcggcctcccaaagcgctgggattacaggcgtgagccaccccgcccagcctgttttgttttttttgagacggagttttgctgtttcacactgaggctgcagtgcaatggcgtgatctcggctcaccgcaacctctgcctcctgggttcaagtgattctcctgcctcagcctcctgagtagctgggattacaagcatgcgccaccacgcccagctaattttgtatttttagtagagacagggtttctccatgttggttaggctggtctcaaattcccaacctcaggtgatccacccgcctcggcctcccaaagtgctgggattgcaggtgtgagccacagtgcccggcccctttttcttttcttttttttttagagacagggtctccctctgttgtccaggctggagtgcagtggcacgatcttggctcattgcaacatccaccttctgggttcaagcgattcttctgcttcagcctcccgagtagctgggactacaggcacctgccaccacgcccggctaattttttgtattttagtagagacgaggtttcaccatgttgcccagggtggtctcgaacttctgagctcaggaaatctgcctgcccaccttggcctcccaaagtgctgggactacaggtgtgtgccactgtgcctggccctttttttttttttttttttttttttttttgaggcagagtctccctctgttggctcaactgcaacctccacttcccaggctcaagcgatcctcccacttcggcctcctgagtagctgggactacaggtgtgcgcccccactcctgactaatttttgtactttttgcagagatggggtttcaccatgttgccaaggctggtctcgaatacctggactcaagtgttccgtctgcctcagcctcccaaagtgttgggattacagttatgagccacctcgcccggcctcagtttctttctttaaggtcaaaaatgtatgaggctacttttttccagttcctttatgttttatatatataaccatcacataaaattctcaccatgtgaggcactaactgctttataaatattaacccatctaatctcatcacaatgaagatatgtactatgaggtaggtacttatctccattccattttacaggtaagaaaactaagttacagagattttaagtaaactgcccaagatcagacaactagtaggtagcaggagccaggccttgaactcaggcagtccagctccagagtttatttcttaatcactgcacaatgctacctcttttctcttttgtttcttttcctttttgctttcttcttcctctgcctaccctttgctgttggtgctctccagggctctgtctttagccttatcttactctattctctctccctgtgagatttcatccattcttagaggttttctgtagactctccagtgagatctctaagctggggagtaggaccattgtttctagccatatccctaatggccaccacagaacttggcacatacaagtgccaacaaagtatctgaatgaatgacaactcccagctctatctccagactggagctgagcttcgagacctggacactcaactgcccactagacatgcaaaggatgttagccaaataaggggaaagtggggataggataaagggggaaagagtattccaggaagaagagatcaagccctgccaactccatttccagagttgttaagctcatttctttcttccatctccactgacacagaccttccctcttacctggcccacagtcatggtctccctgactcatcttgctcccctccactcgacagtcctgtgccactcggtggcaaaatctaatccccttcctcccttgctgataaccctcagctggtttacaaggcctcctctcacattttgtgccgcagaacagagaaggaattgtaggcccctgaagaccccaagctgtctctcctcggaggcctttgctctaggggctggtccctgtgggctggcatgccccttctgcgagctcttaaagacactgctcaggtgtcaccgcctctggaatgcccaccctggggctcccagcttgaactgcctcctctccgcttcagtcctggtaaaggcgggccttaacaatcgttgagtcccagaaggcttcacttccgggctcgtctgcttcaccagccagtgagctcgggcgagcccgtccattctgggtctcactatccccacacctatccgtatgtagagtggcgctagctaggtcagacctcgcctgaagaccctgacatctgccgctgggcgacttggccccgcccccttgcctcccttgcgcggcaccgccccactcctccgtgctccccccgaggaaatggttcaaccgaagggcggtgccaaggtgcccgggccgctccgattggtcagggcgagccgtaccacggcggtggcgggggagcgcttcgtgggcagccggcgggctccgaggccgtgagcgcaaagcctcaggccccggctccctcctgagctgcgccgtgccaggccgcccgccgggatgcagtgggccgtgggccggcggtgggcgtgggccgcgctgctcctggctgtcgcagcggtgctgacccaggtcgtctggctctggctgggtacgcagagcttcgtcttccagcgcgaagagatagcgcagttggcgcggcagtacgctggtgagcgggcagagggcagggaggggagcggccggcctgggagcggagcctagggttccgaaggcgccatccccggacctaggaccggtgccagccctgactccgccgcccctctgcctccgccagggctggaccacgagctggccttctctcgtctgatcgtggagctgcggcggctgcacccaggccacgtgctgcccgacgaggagctgcagtgggtgttcgtgaatgcgggtggctggatgggcgccatgtgccttctgcacgcctcgctgtccgagtatgtgctgctcttcggcaccgccttgggctcccgcggccactcgggtcagtgctagcggcgggccagactgggaggctggggttgtaaaggggcccatgccctcctttctgatgtttggctgggccatgcaatggcgcgaataccctgatagtgtcatgtgcgattgtcactcagggcgctactgggctgagatctcggataccatcatctctggcaccttccaccagtggagagagggcaccaccaaaagtgaggtcttctacccaggtgggtaagaaggctctgtcagagaagtgggtcccttcacgcggggggtgcccacaattgcggggagcatggcatggaaaaggagtgtgttgggggggccctcctcatggttcccttcctccaccctcccataagccacaggtgattggttggggcagagctgagggactcttgctttcctctgtcaaggggaaacaaaacataacaacttcctattaaacatgtctgatttttatctgcccaggcacaattttgcccagacagtattccaacaactgtt

SEQ ID NO: 12302 - DNA, 6000 bp, Homo sapiens
ctgttcctccctgggcagcccacactaaagaggtgaatgtgggagagagtgagggagtgcgtgagagtgaatgaggagccctgcaggccaggggatactctctgtggatggcactctttctccagaactcttggaaggacgaggtgtgtggggcctgggtcacagcccacttctgcctctgctccctcctgcagcctcccctgctttctgtggagcttgatctctaataagcatcttgcattccaaactctgtcttagcttctagctgcagacagcctacccagcctcgctctctcttacacttcctcatcacagagacagatcctttaccttcccagctatcttgaatccatccctctctttccagctccactgctcttgctttcattcaagcccttgttctttttaacttgtcctgttgtctcctacctcctctcaacttcccagagccaccccaagtcactatcaaagtggtctccataaaaggcaaacctgactatgtgaccctctctcaagccccttgtgtccatttgttcttgcattgctaagaaggaatgccagagggtaatttataaagaaaagaggtttaattggctcatggttctgcagactgtacaggaagtatggtgttggcatctgcttggcttctggtgagggccttaattgtggcaggaggtgaaggcggagcaggagtgtcacatggcatgagcagaagcaataaagagagtgagaggggaggcgccacatttattttattttattttattttattttattttattttattttattttattttattttattttattttatttttattgtttttgagacaaagtcttgctcttttcgcccagtctggaatgcgatggtgcgatctcggctcactgcaaactcctcgtcccgggttcaagcgattctcctgcctcagccccccgagtagctgtgattacaggggcctgccaccatgcccggctagttttggtatttttagtagagatggggtttcacctgttggccaggctggtctcgaactcccgacctcaggtgatccatcacctcggcctcccaaagtgctgggattacaggcatgagccaccacaccaggccgccatattcttttatccaagcaaatctcatgtaagctcagagcaagaactcacttatcaccaagggaatggtgctaagctattcatgagggatccacccccatgattcagtcacctcccaccaggccccacctccaacactgagggtcacatttcaacatgagatttggaggggacacacatccaaacctcatcacccctctaagcctttatgagtgcccagcctcctgacctcctcaccaacccaaccaacctaccagggattctgggagactctggactgctcaggcctggagcccttgcccacacagtttcctcctgtgaagtcacctggaggatgcctccactggggtcaggggtcacctccgcatcctcaggacaagctcactcctttggtcaagtttttgtatctcacacatattacaaaattcacatagtcttaactaggttataacattaatttcagatcttctgccttccagaaggcaaaaccactttccccagggcccagctcatggcaccttctcagaaatttgtggattctccctcagagcctccagaggaaccagctcggcccacacccatgctggatcccagcatgacccatttggacttcttacctacaaactggaagataataaattgtgttattctaagccattgattttgtggtcatttgttacggcagccatagaaagcaaatacgtgtttaagcattgatttaaaaaagaaaaaccacaacatactggaaaggctctcattgtaaattgccccagactgcctggctttggtgaatctcaaggctgactttaaaatggagtttttttttcctgcttccttccatggctatcaagcaagccagcaacagaaaatttcatttacatttagcattttctgtcccagtggtctcctctctcatctgtctctatgttgatcaagaagatatgtgggctttctggtacagggtctaaaataaacatgaacagctccccagaaagggcaaagggttttctcatgagtagggtgtgtgagcttctgtgtgggctgcacagcctccttttgatgctgagaggccttcgggtttttctttttccatctttctgctacgttccaaaatgttgatactattttccaggtaagtgaggttttaccgtactactgtgttcttggaatattaatttctgtctttgattatatatcttttcatatatagtaaatttatgttgctatttatattttaaaatgaccaatttccctccactggcctcataataaaagaaataaaagtctcctgttggctaaacgttaagtacatagctttggattttttttcctccctggagcctcagaacgtgtacaggtgtcctacatgccttttacaaaaaaagaatcaagggctaggaacctaggttttgaacgtgcattcaatgtacattcataataaaagctgaacgactggcacattcatggttgctccttgatgtaaatgaacggctgaatgaaagtttaggggcacagctcacctccaagagagaccctcttcacacttagacctgaccaagggatcttgaattcccttgtaaaactagcttttcctctccatagcagctggcctcttcctcccggtatctttgtaatccggctgggtgtttttttttctttttctttttttttttcccacactgccgttggataaaagatcccgcctttgattgaaatggaatcttccactattgagcaagcctttgttgaatgagtcatcggggcggccgctcattggctgaggccgctggagcccaggggattgcctggcaccggctgcaaggccctgcttcattcacagaaacgctggctcgctcgctagccttttcattcacacaaacagcatttcattcacattttgcggtttttgtctgcatctaatgaagatctcgctttgggaatgatagggctgtttcgctacagatctggggaggactctgataaccatcaaaatcatctatggggtgtgcaattgctgttgctatgcaagctagggaaagggaacaaatgagtgccgtgtagctgttctgctagggctgcggcacaggaggcgagccgtggggacgcgtttcctgtaccggggacgccgcggctcctctgcgctcttgcgtcctaggggttggcctcacccgctcgcccgccatgagtggcgctcattaaactctgctccatagagcagggttcaagactcaggacctcacgtgccccacatgttcggtcatgggagtgagaggactcagggtgacctgagagtgtgctagagctgaatttattcgcttgctcagaagttgcgggaaaactttgatagtgagtgtttcactgtggagcaggtgatcctaatgcatgaggaagcctggcagagcccactgaggtcaagagtcagagggcttcagtctcgggcagacctctggggacagcgaaagccttgctctcctaactgagaggaagaaggcctgtgcattttacttgcaagcccgagcctgactcctgaaaagaaggcatattttcctccttgtggatttgatgtgcaataagaacagctgcattttttccttcctgactgcagggttgcaagcagcaactgaaggaacattgaaatgtatttgtagcatttcttaggcgtttttccagagcttaaacacattcagtaggattaaagcttcaaatgcagccccttttttggaatggatttctggagcctgttgccactcgtgaaagaagcactcttcttttttggaagtggatattcaacttaaccctggctgagaaagactgctgtaaatgagcagggaagaccccttgattggcactgtgcagaagttcatatgcagatttttttttttttttttttttgaggaactgcattgccacaaagacacttgtcatcgctgctctgttaatttgaaaagaaaaagcaaaacccaggaaattggtattttacagtcacctgggggtgaatatcctttttgtttttttctatttaaaaattcctgctgccttccaagtcaagattcatcaggattcgctgaagatctgattcttaaaaagccttcgtcacattttaacgcatcgctgttagacacttttacaggctcacacagatgggctgagcagggacgagcaaaacctaacagaataatgggtttcagaaagttcatttgacgatttgaaggaactggattggatttacctttggcacaaatgcagattgcgggggatgggaaggtgaaaaatcaaaggttggaaggaaatatctgggaaggtagaaaaaggaaatttgagaattgattggctatagtgtgctgtcagcgggtggatgtcgtttttttcttctttttttccttttttttcttctgctacaggaagtgatttgcagtgctcaccgagcctttgttgagaagggtctcctctcagagtgagtcatgcttttgctgtgagcagccccaagcagctgggcgctccatcagaggcaactatgacttttgcaaagcaaacgtgcaaccccaagcagcggtctcccgggccggggctgcgcggccgccgctgtgctggcttttaacggtgggagggcaccatcctcttgctctgctctcgttctccagaaggctgtcccggggcccccactctccgtcccgctccggggacagtggctcgcctgctatgcgcggcagcccgcgccggggccggcaccagcagcgcccgggcggatgcagcgagcccacggaggggcatgcttccacgcaccaagtataaccgcttcaggaatgactcggtgacatcggtcgatgaccttctccacagcctgtcggtgagcggcggcggaggcaaggtttcggcggcgcgcgcgaccccggcggcggctccctacttggtgtccggcgaggcgctgcgcaaggcgcccgacgatgggcccggcagcctgggccacctgctccacaaggtgtcccacctgaaactctccagctcgggcctccgcggcctgtcgtcggccgcccgggagcgggcgggcgcgcggctctcgggcagctgcagcgcgcccagcctggccgccccggacggcagtgcgccctcggcgccccgcgccccggccatgagcgccgccaggaagggccggcccggcgacgagccgctgcccaggccccctcggggggcgccgcacgccagcgaccaggtgctggggcccggagtcacctacgtggtcaaggtgggtgcgggcgcgggccgccctgggggctgggggttctggggccagttcggggcagactccttcattccctgaagcccggggtgcggggcgctcccgcgactgtcacgttagaggcaagcaaatgcgcactccttagcaatcagctcgcttgacagcggtgaggagggaactacaaatgcgcttttcccgcatccattgggaaaaggtttaccactcgggtggcccgctccgtcccggttttccctaggctccacttttttggcacgcctttgccacctggcttaccagatgtctgaccagtgtcatgggcgcccaaccctgggcagcgggggtccggcctgcctagtatctaggaaacgcgctggggagagctgggcagcccccgggaggagagatgcacggagtggcggccctactcctgctgtgtcttccccggcgggagggtgggtatcttgttgccccccgcagcaagaattcccagctccttgcagagcaggccaaatgctgtgctgctttctcttcgacgggctttactttctcacccagtccaggttttcttggggtttgtctttcattccctaaggaaaggttctggtttacagcagcggaatgagaattctgggactatttttctggtgactg

SEQ ID NO: 12303 - DNA, 6000 bp, Homo sapiens; identical to SEQ ID NO: 3114

SEQ ID NO: 12304 - DNA, 6000 bp, Homo sapiens; identical to SEQ ID NO: 1335

SEQ ID NO: 12305 - DNA, 6000 bp, Homo sapiens
ctggggttaattcatgctttggcccttatcaccttttccaatttatttcaaaattacatgctctattttaatatttgctttcttttttttattttgaaaacttattgaacttgcatctacactttaaaatgaagcagaacttaaagaactcaaagattatgaagaagactcagtacctgggaataaaattgagaatagggctgggtgtggtggctcacgtctgtcatctcagcactttcggaggctgaggcaggcagatcacttgaggtcaggagtttgagaacagtgtggccaacatggtgaaaccccgtctctactaaaatacaaaaattagccaagcatggtggtggtcacctgtaatcccagctactcaggaggctgaggcaggagaatcacttgaacccaagaggtagaggctgcagtgagctgagactgtgccactgcactccagcctccagcgagacttcctttcaaagaataaataaattaattaagaatagtaataaatatgaaaataactaaattttagcttccttttatgactatataaccaatctcaaccattattttttgcttccccaaattaggagagtttaaaatgcagattctccccactctcctcttcccattcaatagaaactgagaaagaaggatcttattcaggtcttcactccatttgtgattcatattcagtggctgaaaggttagaaagcattcactccaccaataatgatcaagcacccataaagtaccaggagctcttacaaactctagggaaatcctggctcctgttgtcatgaattttgcattctcaggtaggaaatgtggctctgatgcctgctggggcagtggtagcaacctttagtccatgtgaatgcaggcatcccttggtatgcacgggggattggttccaggacctcccaccgataccaaaacccacagatattcaagtttctgctataaaatggtgtgtagtatttgcatgtaacctatgcacatcttcctatatactttgcatcatctctagattacttataatgccaatgtcaacactatataaataattattatactgtattgtttagggaacaatgacaagaaaaatatctgtacatgttcagtacagacacaatttatttttgctctgctcttggttgaatccacagttgtggaacccatggacataaaggccaactgtacacttagagctacagaggatcttggaggtaatctagacaatttctaccctagtatagaaatctgtatactagagcatctctaacagaacctttcattcaacccttttttggatgccttcagcaacagggaactcagtacttcccttcccacttgtaaaaggtttgaatgttaaaagttcttacatttttctggcttttctaatatttaatagcagctttatatctctttcccaattttcacagccacacagctccctaaatagagttaaacataaccaatctttcagtcattcctaaaagtaacattgttatcagtattgctaatgtccattcaagagtcttaattatttaaaatattccctgaccagtgaatattctgacttatcagctcagaataacatgaactatgacttcctgtttaagccttttaggattgaaataatcctaaatgccatggtcaccctacctggttggcttatattaaaactttgcctctttcaggatatttgttgtcattcctattctgtggtacagctcaacctgaggggtgctaatgtgtcagaaaaacaggtaagcaggcaagcctaagtggaatctgatgtcaattcttgagattgaggacagtgctatgtgactgattgtcatttaaattaatcaacatgcaactgtcaacttagaaaatccttcaggcccagagtgaaaagcagagtttcaagcttataggaaaccagacataatcattcaaataaaattactgataccgtacttcatatgagctaggacattacagtaatgtattattattatgccacttgaaatatgattatttgctggcagataggttacaaaaccatcagattatatatatgtgctttgtgagttcttagaaaatactgacttctttcattcaaattcttaatatttattttaaataaatgggctccattcagtgaaataaatgtgaaaattattagaaatattcaacaaaccagtttttaaatttttagaaagatccaaaatgtcccaggccgccacattataaccaatgattagcatttaaagagaaaatacatacttttgtatcaccatatatagagattatatacatagttttgaaaaatgaaataatatagtcttctaattaataatttctccaaaaatactcagaaggaattaagaaatatgttctaagcaaaattatgccttgctgaaaccacaaaataaagagaatataaaaatgtatgggggggtaaatactttttatacacgtgttgactacctttttcaaggattacagatattgcagcattaaaaaaaaattcagaattcaataaatgtttagaaagttaaaattacataaatgtttaaatttttggattttgaaattcctgttcactctaaagagaaatagaaatctaaaatgataacaacaacaataataattagacaatgtttacaaagcctttggaattttcaatattcttgtgtctctgcttgaagcaacaaaattaaaatgatatagtcacaatttgtctcttgactattttatattcagtaatttttaatgaagcaactaaattaggcataactttgtacagctttaacatagttatgatgaatatattttacttgattaaaaatgataaaaccagggagccttaaatattatcttaaaagattaactactgtgtcaattacaaatctaggagaaagatatttataaaggaataactattctaaacagtaacttccttttgttcatttcatttaattaatgactcaatcaactttcactcttaatactaaaattttcctaaattacacattggtttgcaaatgggatggcatatagcagggctacgtcaatttaatactggtgaaaattcagcagataattcatttttcatttaatcaggaaggaaaaaactacttggcagtgtagagcgacctaattaactaaataactgccaattctacattgtactttgtgttacatgacatatcatgaataaataccagtcaaaaatcaaattatttggatacttaaatgatgatgaggcctgctgtgccaacaggtatgctaatgagtagacatctcccagcctcaagactgagtgaatgaggcaaatattttcacctcccaatcttttagggtgttcaattaactcaagtatttaagaagttccctactattgggaaggaagtagatgtaatcatctatatgcttattttgtcaactgagttggaaaaacttgcaaaggaacagtttggatatatgtattagatttttatcaaaatacaaataaatggtcatagatgacaattttcacctaaggaatacaagtaagtttatctatgttcagttaccaatcgcctctaactaaagttaacaatgtcttccttctaaaacctttctaaagagcaccctgcaatcacaccttctagcaacagccatttctcttgaattagtaaggtggctacaccgccaatttgagctgttctccttcagtcctgtagtccatcgccaggggagtctccaaatgctaataaaaatcaatttcccagacaaaagaacatatacacgtttttttctttctttctttcttttttttttttttttagaagagggtcagggagcatctgacggacgtttttaaaggaaggggacagctacttccatgggactgcattttagttgtgctaaaagtgatgaaagtgggtttgcattattctaccaccaacacccaaaccacctgcccacggaaacccccgccggagaccgaagtttacccaaatagcgctcggcaaagcgctgccataaattcaaaactaactctgccgggcccgcgggggttgcgagacagggaccgaacgtgaaacccggggagccccgcgtctcttgcctccgaaggttttccgtgatcagtgtccccttctctgctggagtcggaagtgcctgtcacctgcggatctgcccgactctcccggtcggcccttcttctctgcccagttcggacagtctcgaattccccgtcgcagccccggccacctcggactccctggtccccagcccccgccccaccccccgcctccaccacgtcccctccccgcggtcccagcctctccaggcgctgctgggctctgattggcggctgcgctgacagcaggcggggcctggaagtcgcggccaagcccgccctcgcgtataagcccctctcagcgctctctctccatctctcccctctctttctctctcgctgctcccttcctccctgtaactgaacagtgaaaattcacattgtggatccgctaacaggcacagatgtcatgtgaaaacgcacatgctctgccatccacaccgcctttctttcttttctttctgtttccttttttcccccttgttccttctccctcttctttgtaactaacaaaaccaccaccaactcctcctcctgctgctgcccttcctcctcctcctcagtccaagtgatcacaaaagaaatcttctgagccggaggcggtggcattttttaaaaagcaagcacattggagagaaagaaaaagaaaaacaaaaccaaaacaaaacccaggcaccagacagccagaacatttttttttcacccttcctgaaaacaaacaaacaaacaaacaatcatcaaaacagtcaccaccaacatcaaaactgttaacatagcggcggcggcggcaaacgtcaccctgcagccacggcgtccgcctaaagggatggttttctcggcagagcagctcttcgccgaccaccttcttcactcgtgctgagcgggatttttgggctctccggggttcgggctgggagcagcttcatgactacgcggagcgggagagcggccacaccatgcgaggtaagcgagtctgcgggcaccgaggctccccgagtccggccaactccagccagacggggagatgggggaggggagggcacccagcagaaagggaaagaggttgcccaggcgcagttccccgaattcgctctcgcaggtggggctgcaaatggcctgggcgtagaaagttgcgggaaggtgttgatgtctttcgggagttctggagggacgcgggagggcgcttttttggagaggggagacaggctagttggttcttaccagtccttgagttgcactgaatcttttttgcttgtcgctctcgggtgcggaagcggacgcgggatggagaaagccgaaagagggatgcctctggacaggagcagtttggaagcgcccggcgcgcagtggtcgccggccgggtttgggcgcgcggggcgcaccggccgggggcagggtggacacgcgcgggcacacactcgccaggttacgaggcccactaagcgtcctggccagcaggcatgtcccttcgctggagtagcaagcagaagagcagtgctgcgaggctggacgcggctgaggaaacagttagttccccggcacgcggctgaggaaacagttctgcggcgcgcgccttcgtgccggcgctgcgccctggccaggtcctcgtgcccgagcccgcgcggcccagggagtagtgcgaccccggaaaagttgtaatgagaaagttctggaggcttggaaaggccacactgctcacagtcggagagtcatgggctccggctcttttgtcagataaagggccggtagtggaaggaggtgctggtgcaccctcgggccaggaccctcgcagtcgcaggcggtggcggcggcggcggcgggaccccggggcgagctggggtctgcagggatgcgcgccagggactgtagcgttacgcttgctc

SEQ ID NO: 12306 - DNA, 6000 bp, Homo sapiens
tcagatttatgatgtagatgccatcacttttccttttatagatgtactgttccatctagaagtcaagattggtgccactaagtgggttcctactgcaaggaacttaaggacatcctcctccttcatttgcaggacagcaagggctctggacattgtgaaagtttccctttaagttatgatgggaatccataacaaccccatatggacccctctgtgggtagcatagaaaactggctgtttttctttctttctttctttcttttttttttttttttttttgagacaggctgtcgcctttttttttttttctgtcacctaggctggagtgcagtggcacaatctcggctcactgcaacctctgcctcctaggctcaagcagtcctcccacctcagccttccaagtagctgggattacaggcatgcatctccacacctgggtaatttttgtatttttagtagagacggggtttcaccatgttggtcagtctggtctcaaactcctgacctcagttgattggcccacctcggcctcccaaagtgttgggattacaggcatgagccactgcgcccagccacaattcactcttaatctctgaacctcagtaattgggaataaatcctattcaagataccttctcagaagtgggaaggaagacaaatagggagatggatgtgaatgttcttcataaactgtaaagtgcttaaaaggaaggtctcaccggcattcattacttcccttgctgatgcatcagtaaagaggtcagtggtgtgctgttccagtgaaaataggtggcagtcctcacatgaccacactatctgacaggaggaagctccctcctgcagacccacctcattgagtgaacatcattcttcacatccacagcagagagaaaagaagaaagcgtgcgtcagagtgttgggcaagcttttaggagaggtgttagacacttccagtggtttggtatggagatggggtaacagagcttgatgactggaatgcattcttagtcttccttgcaagaaataagagatctgggttcctgggttcctggttctgccattttatgtggggtagttattttaacttctctgggccttgatttccatttttaaaaatacatctcttgccaggcacagtggctcacacctgtaatcccagcacttttggaggcagaggtgggtgaatcatttgaggtcaggaattcaagaccaacctggccaacatggtgaaaccctgtctctacgaaaaatacaaaaattagccaggcatggtggtgcgcacctgtagtcccaggtactcaggaggctgaggcaagagaattgcttgaacctgggaggcggaggttgcagtaacctgagatcatgacactgcactccaggctgggcgacagaacaagattccatctcaaaataagtaaataaataaaaatagaaatagaaaatacatctcaggcagcctggcgcagtggctcacgcctgtaatcccagaactttgggagaccgaggtgggtggatcacgaggtcaggagttcaagaccagcctggccaagatggtgaaaccccgtctctactaaaaatgcaaaaaaaaaattagctgggtgtggtggcgggtacctgtaatcccagctacttgggaggatgatgcagagaattgcttgaacccgggaggcggatgttgcagtgagccgagatcatgccactgcactcccccagcttgggcgacagagcaagactgtctcaaaaaaaaaaaaagaaaatagatctcaggcattccacattctcaaatgtgatttctagtctaaaagcataggttcagcaggcacggtggctcatgcctgtaatgccagcactttgggtggccaaggcaggtggatcatctgaggctaggagttcaagaccagcctggccaacatggtgaaatgccgtctctactaaaagtacaaaaattaaccatacgtggtggccacgcctataatcccagctacttgggaggctgaggcaggacaattgcttgaacccaggaggcggaggttgcagtgaactgagggcgccactgcattccatcctgggcgacaaatcgagactccgtctgtaaataaataaataaataggtcccgcagtgaaaactggctgctattttgcccacaaacctcttccaatttttcttgttgatgtgccactccagcatggcaccttgaaacagagctagccagaaaacaccggggacatcagagcattctgcagctgtgagcagaaatgtacgtggagatgcacatggacatatggcagagctaacctggacttggttttctttcctgaaggagagcagaatgactgaatatccctaaacttctctttggcagacagtcaatggggatttttccactaaagtgggaactcacaaagactccatatgtttgaaagagccgcagaccttgaattccattttgtcaataaattttggttatggtttcaagtagctaaaatattcctttcaccaacctggcctttcacctgtattagcacatcctctgaacagttctgtctgcacagcaggtaatactatcatcattctatagatgaggaactagggttcagagtgggtaacttgccaaatgtcagagttagatggttagtgctggaccctggattttttttttttgacagagtcttgctctgttgccccggctggagtgcagtggcacgatctcggctcactgcaacctccacctcctgggttcaagtgattcttctgcctcagcctcctgagtagctgggattacaggcaaacgcctggctgatttttttttagacagagtcttgctctgttgcccaagctggagtgcagtggcatgatcttggctcaccacaacctctgcctcccgattcaagcaattctcctgcctcagcctcccgagtagctgggactataggtgcgcatcaccgtgcctggctaatttttgtatttttagtagagatggggtttcactatgttggccaggctggtcttgaactcctgacctcgtgatctgccctccttggcctcccatagtgctgggattacaggcatgagccaccacacccagcctggagcttggattttaacccaagtatgtttgatctcttcccactaagctaccatagctctatactccaggagctcctgtttctaacctgagctgttttctctattttctaggacacagcgacagtttcagagactggagttctttgaaacagacataagagagcaagccacctctctattttcaggaaagacacagagaacctatggttatgaactaaaacaaagataatgtagattctgaatatgtctagagacattgttcatttatagtcaggaatagctttacccttgacagagaactctgtgccagctgctgggtgctgagcacttttatttacattatgtcatgtattccccaccacaactactacatacatctctcttttttttttttttttcttgagacggagtctggctctgtcacccaggctggagtgcagtggcactatctcggctcactgcaacctccgcctcccagattcaagcaattttcctgcctcagcctcctgagtagcagggattacaggcgcccaccaccacgcctagctaatttttgtgtttttagttgggggggggggcgggggcgttcaccatgtaggccaggctggtctcgaactcctgacctcgtgatccgcccgcctcggcctcccaaagtgctggacttataggcgtgagccaccgcgcccagcctatgatagaaatcttattagctccatggttacaaacagacaaccctgaggcctggaggaaagtaacttcagaacagatactctcctggctgaactttatatttattgcactcttggcagtcgtccctagttgtctttttctttgatctctctctagttaagacttgctcctggaggcaaagcgtggtggtgtctggctcagcatagcacctgccataattacaaatggcaattatggaatgaatcagctgtttaaagcaccaaatcttgagctggcccgaagactgcgcaggaggattgcatgctcaactctcccctttagaaactgttaacaatcgttgtggccgggcgcggtggctcacgcctgtaatcccagcactttgggaggccgaggcgggtggatcatgaggtcaggagatcgagaccatcctggctaacaaggtgaaaccccgtctctactaaaaatacaaaaaaaattagccgggcgcggtggcgggcgcctgtagtcccagctactcgggaggctgaggcaggagaatggcgtgaacccgggaagcggagcttgcagtgagccgagattgcgccactgcagtccgcagtcccgcctgggcgacagagcgagactccgtctcaaaaaaaaaaaaaaaaaacaatcgttgtaactggaaatgtaactgttataccctcccccccttttatttatttatttttttgagagggagtttttgcgctgttgcccaagctggagtgtggtggcgcccagccctgttagccccttacagagtagatcagctgccgcaggcatctgagttccccaaacggacgcccgaacccggcattgcgcaaatcgtttccaagtagccccggcttatttatcccgtccgggagggagggacccagggaaggcccaccccacttggttcccgagaaatgcagagcctggcgtccactcccggtctgggggacccctccaccgccagcccaggaagtcagcgccgggccctcggggcggagcagggaagagggagcggttggcccggacgctcttccgggtcctgggaggagggcccggacctaagccccgcccctccggggtggagtcacggctcgcgactggcctaagtcgccgcaggtattgcagtccggggctggagggtaggggcgagggtccccggataccgggtctatcacggtctcgggcagggagtctgaatcttttaggggagtgggcccaagccgggtgcaaagaacggggaagggccttccctggctccgtcccggccactttgaccgaatcagcctgttctttcccgaccccgtctcctatcccctagaactgccacgtggggatgagatttgctgggctggtagcggcggctgctgcgggaggtcccgcccacgtgaagccagcctaactgagctctggactttggggacagctgtcagtggcctaggccgcaggtgagatttatccattcatctctcaatctattttctttcttcattcactagccactcccccacttctactccatgccaggtccattggtaggttctcggaatggatctgacaggcccagccctctaggaacttagtctagtggaatttaatctagaatctagtctagaagccttaaatagataaacattccaaatgattcctgcaatggtgatggctaataccttcagagcccagtgggtggaagaaggaagtaacttggatgtgggtggaagagaaaagggcaaatcagggaaggtttcaccagggaagggacttttgaactgggctttgaaggttaactaggagtttgcaaatttcccagaagggaagcgacattccaaataggggaagcagaacaggctgcaaaattatgaaaaggcctgccatattacaagaacagcaaaaaaaccaataatgcaagagattgtggaggtgagttcacgggaaaaaagctcaacagcagaaggccttactttctatgctatgttgaggccaagatttatcccagagctcagtatttctcagcttctttaaatattttgtcctttgagcggagagcagtggctcacacctgtaatcccagctttttaggaggctgaggtggaagaattgcctgaggctaggagttcgagaccagcctggacaacaaagcgaaacctccatttctatttttttttctttttttgaggaggagtcttgctctgtcgccaggctggagtgca

SEQ ID NO: 12307 - DNA, 6000 bp, Homo sapiens
gaccctgcgcagacttagtgactaaatataatgacttgaccccggagctgtgtaataaggccactgctcaattcaactggcatttattgagcacctactgtgtatgtatacaacacaaatactgtcaaaaagggctcgtgttttggccaggcacggtggctcatgcctgtaatcccagcactttgggaggccgaggcgggcagatcacgaggtcaggagatcgacaccatcctgaccagcatgatgaaaccccgtctctactaaaatacaaaaaattagtcaggtgtggtggtgagtgcctgtcgttccagctacttgggaggctgaggcaggggaatcgcttgaacccaggaggcggaggttgcagtgagctgagatcgtgccactgcactccagcctggcgacagagcgagactccatctcaaaaaaacaaaagggttttattttttgtgcactaaaaatatgtattcaccacacagcatctctgggagaaaaccatcgattaccagagctggcatagtgtaggatgtaaatatggaagctctgagtcacactgacaaccgtctacatcttgactccatcatttcttggctatgtgacctcagacatgttctttactaacctctctgtgcctcagttttctcatctgtcaaaggaggctaataaaacttctttctcggctgggcacggtggctcacgcctgtaatcccagcactttgggaggccgaggtgagtggatcacctgaggtcaggagttcaagaccagcctggccaacatggtgaaaccctgtctgtactaaaaatacaaaaattagctgggcataatggtgggcacctgtaatcccagctactcaggaggctgaagcaggagaattgcttgagcccaggaggcagaggttgcagtaagcagagatcatgccactgcactccagcttggagctggaacaagactctgtctcaaaaaaaaaaaattctgcccagcacagttggtggtcaaaactttgggagctcagccatgtatggtggctcacacctatagtgccagcactttgggaggccaaaacagtaggatcacttgaaaccaggagttcaaaaccaacctgggcaacaaagcaagatcccgtctgtacaaaaaaaaattgttttaattaactgggcatggtggtgtgcacttgtagtttcagctatttgggtggctgaggcaggaagcctacttgagcccaggagtttgaggctacagggagctgcgattgtgctactgcactccagtctgggcagctgagcaaggtttatcttatctctaaaaacaaacaaaaaaacaaaaacaaaaaagctttgggagctcaagagagagtaaagaagccatttctttctttctttttttttttttttttgagatggagtcttgctctgtcacccaggctggagtgcatggtgtgatctcggctcgatgcaaccaccacccctgcctcccaggttcaagcaattctcccacctcagcctctcgagtacctgggattacaggtgcgggctaccatgcccagctaatttttgtatatttagtagagatggtgtttcgccatgttggacaggctggtctccaactcctggcctcaagtgatccacccgccttggcctcctaaagtgctgggattacaggtgtgggccactgcacctggccctgagattcttcttttcaaccaactccatgtgatgccaggctgctggcctggcatcagtgatacagcagtataggatacttagtataatcccatttctgtaaaaacaaaatggaacaaaatgaatatgtgcatatatgaaaaacaaagccagagaacgatccctaagctatagtggttatctctaggtgggaggatgaccagaggttttcaaatacttgtgtaaagtctggttttacaataagtttcaatattgtaattaggggggaaaaagtaaaaataataaaagctggctgggcatggtggctcacagctataatcccagcattttgggaggctgaggcggacagatcatgaggtcaggagtttgagaccagcctggccaagatgatgaaaccccgtctctactaaaaatacaaaaattagctgggcacagtggcgagcacctgtaatcccagctactcaggaggctgaggcaggagaattccttgaaccagggagggagaggttgcagtgagctgagatcacaccactgcactctaacctgagcgacagagcaagactctgtctcaaaaaaaaaaaaagaaagaaatacaaaaaattagctgggcgtggtggtgcatgcctgtagtcccagctactttggaggctgaggcaggagaatcacctgaacttgggaggcggaggttgcagtgagctgagatcacgacactgcactccagcctgggagacagagcgagactacgtctcaaataaataaataaataggctgggcacagtggctcattcccgtaatcccaacactttgggaggctgaggcaggaggatcacaaggtcaagagatcgagaccatcccggccgacatggtgaaaccctatctctactaaaaatacaaaaattggccgggcgcagtggttcacacctgtaatcccagcactttgggaggcagaggcaggcagatcacaaggtcaggagatggaaaccatcctggctaacacggtgaaaccctatctctactaaaaatacaaaacattagccgggcgtggtggcacgagcctgtagtcccagctacttgggaggctgaggcaggagaattgcttgaacccaggaggtggaggttgcagtgagccaagatcgcaccactgcactctagcctgggtaacagagcgagattccgtctcaaaaaacaaacaaacaaacaaaaaatacaaaaattagctaggagtggtggcacgtgcctgtagtcccagctactcgggaggctgaggcaggagaatcgcttgaacccaggaggcagaggttgcagtgagctgagatcatgccactgcactccagcctggcgacagagtgagactccgtctcaaaaataaataaaataaataagtaaataaataatattaaaagcccagccatgatgccctctaggcaaacatctataaactgcaccccctcctggtgccagtcatccaggcttccatctctgccttctcttgtcctcagagcataataacaggttggcatggaacagctgccaggttccatgcaagttgtgtggcactgatgctccagctgtctggtgagctgttatcattggcatcctcacagctgcagcttaataagggccccctgagcactaggcctgggctgtgccctacacaggcatttgatctattattatccccattatccagattagttaactgaggttcagagacgtggagggacctgggtcacgcagcttgtttaaggcccagattagactcctaatccactctctggtgctaccagggagagggcctgcttgttccccatgcctgcctcgaagattcctccccacaagggtcactctctgatcaccatcttcacaatagcaacaccaccctaccccgcccctgctttcttgctctgcagggcacgccatctaacagggccatcgttattgccctatttgcatattgtctgtctttttccactgaattgtcagccacatgtgggtaaggactttgtccgttttgctcactgctttatctctggagtctagcatagtacctggctcaacaaatacgcattaaatggatgagtaagtgaacagtctccaattcacagaccactttgtcagcagtgcccccacactgttcacagcgcagggaaatgactcaccgactccccatgagcacagtgtaggctagccttcccttcctagcctccaccgtgaatactaattaggtttcttaaatgcagagatggacggctgggctcagggccccatggtctgtctgtgtgaaagggtacgcagggtaggattgtaggagccctggatttgaatcccactgttttacgctgttttaccaccatcctgatgggttggagcaaagacttccactctctaggacaagagcttccaactctcccaagaagggccctccaggtgtcagggcctctgcacttgctggtcattcagcctggcatgctcttcccctgatctgcttgctgctggctccttctcatcattttggtctcttctcaaatgtcacttctgcagagaacacccccgactcctgccaagccaatgtgaactttccacacccacaaagataccttttttcaccctgtttatttcctccatccctcttactatgaattattttcatttttactatttcatttatctgcttacttatttactgtctgtctccccagcttgatgcaagatctatgagggcagaggccttggctgtcttattcgttgctgaatcttcagtgcctaggacagggcctggcttctagcaggtacctagtaaatatttgttgaattcatgttccaactttctccttctagaaacaaggaaactgaggaccaaaggcagaagaggacatgttggagatcagagtcaggatctagggatagaagccagcgagatgaaggggaactcatctcggagttctgacctctgaggtcaggaggctgtgacctcagaggaagcccatctgctctccaggcctgtttcctcatcggtaagatggagtgaaacatccagaccactctccaagaggcctggtactaggagtgagacccaacccattgacaaatatattctgcgcagcatccgcgcaccccagacactgctaaagcaccccaaaagccgcagaaggtgaaaactacgacacccatgatgccccggacggcgcctgcgcacggcggccggcccgcagcgccgcgggctccccctagcggcgtccgggagcggtgctcgctccgatccccgaggggcgggggccccgcggcgcaggcagtctgggcgcgcggctgcagcggcggagccggagtcggagccgggagcgctagcggcagccggatcgcagcctgcggggcccgccgcagccatgggcaaccgcggcatggaagatctcatcccgctggtcaaccggctgcaagacgccttctctgccatcggccagaacgcggacctcgacctgccgcagatcgctgtggtgggcggccagagcgccggcaagagctcggtgctcgagaatttcgtaggcaggtaggcgcggcgcgcccccaggcgccgacccccgacccccgggatccctggagtccccgcccggggcactgacggcgcggcgacctcgcagcccccgacgctgcacccgcggccggcgcgccccccacccccagccggagcgaggaggccctccccccaccacgagagcccctcggggcagcagcgccccccgctagtctgcaaacgtcgtcaagcctccggctaccgaatcacgccccctcctccgtcccatcctttagggcagacaacgctctgccagaagccccgggcaaagagctgccccccgcccccaacatgggcatggagagagcccgcattactcagcgtctccgttgggctccgggagtcccttggagcgggcagcacccgggggcagcgtcccccacaccgggctcaatgggggacatccccctacccccatgggaattcctgggccgtggcagaggtcagcccccgcatcccagtccctagaagaggacgtagtcccgcgggcatcgaggaccgggcacggcctcccgccagcacacacacacctctgcggctcccgccgccatccgtgcgcagcgcggcgaggggggaggcgcgggctgcaggatgaggaagggaagaggggaggagaaaccacttcttatccttttctgagcagccggccccttgcttcgccacggcccctgggtggggggcgcctgtcagtgtcgccctccccttggcctggccagaggaatcgtgttggagggagaggcggcagagggcag

SEQ ID NO: 12308 - DNA, 6000 bp, Homo sapiens
atgggcgtctgggggtgcacggtggagaggtgtcagggaggggcgtgccaccttcagagccagggaggctgggctgggccccaggctgggagcgtcagcctcagcctgtctccttagctcctgtgagacaggctgtcattctatttccccgtagtcatattcttgtttctgtgattagctggttcttttctctattttatagaagagactgatgtccagagagtacccttgtccaagggccatgtaagagttggtggcagagccaggctatggcctcttcctcctggtaccttccccagcaccttgttttccaagtctgttacctatgtcccttctctctggactttggtctcacctggcaccggctgctttggctggccgacctgtgccatgagaagcggggaggtggtgtggctcattggaggctgggggcggaggtcggtggttgtctggggtctttcctgggggttctgaccactgacctcagccctgggtctggggactgtggtgccagagtcaccacacggtttggagtcagtcactgctgctcttcgcctcagtgtttccatctgggaaacggggaaaccagagtcttggtcagccggggtggggttagaggggatggtacctggcagtgtgcagcagactggcacctcggaggcagcttggaaagctcaggttcctcctctccggactctcagaactgttcctgcccttctttgagcatctgtgaccccttgcggctggcgctgggattcggtggggctctttggtggcccctggagggaacccactgtctcttgcctggagctgcactgaaatcctggctcttcattacaaaccagctcctgtccccttaagcctcactcacctgaactctttggctcacgccaccattcagctccccagagttctggaagtaagaccccagctgatgacggaggcagcggctggccttcggaggacctcacctttctcttcccctgcactgctttgggtttggggtgtgcagggccagccagctgactgctaccagggcagacgctgtcagtggtgactgccctgcaggcctgcaaacattttgccagagggccagacccaggagcagaggggtcctcttctcttcctcctcctcccctcctgtcctctcctctcccctccctcctatcctttctcttcctctccactcagcagaacagactggagcccaggtgtggacaagtggcttgagtgtttccctctagactgatggagagacaagctatgactgagaaagggggttcgggctgggacccctgggcctagtcccagttccatgtggacctgccgggtggccccttgcctctctgagctttcggctctacttcccagctcgagtcatcatcggtcaccacagacaaaaggtgttgtccccaaaggagccacaacggatgtgagagagagtccccttaggctgaggtgcttggggacagatcgggccaccttgcccagcagtacccaagcccttggcctcccttgttggaggctgagctccccaaacccctgtgaggtcctgctagtgaccagctcaggaccacagggaacctctggaagcagcttagagccccgttggtgtcctgggaacttctgggagcagtccacccagacgccagcttcctcatgctcagccagcacagagaccagcctttaaaaatattattcaacaagcaattcccgggactgtttacaagactgagccgagacaggcatatgaaataggccaaagtaccttaaaaagcgtccctcagggaaattaaaaaaaaaaagacccaaacaaaaaaacaaaaaaacaaaaccttcttagatcgcaggttgtgaataaatggatactactataaaaatagttttggctgtagcagcacatggtgggaaggctggggtgtttttttccatggctggctcagacctggccatttcatatggggcagccactatcccgggaggtttcgtgtagaatcatttgcaccaaaaagctccaaactgagggggaggataaaaagtagtggccacagaaataacaagcggcatcgtcattttccatcaaggacctggtgtgttttcggcggccgagcacccaggcccctgccccatggaagagaagggcggggctgagagccattcaccgtctgtgggcacagaggctggatgtgagcccagatctgcaggactccggactccgtgcgctctccacgtggtctctagagcaggggatgacgccttccggtgtttcttaggaacagagggcccttctggaaccttcagccttcccaggaggaacccacatggaaatctgtctgcatgtgcctccccgactccaggcaccaacagctcctgagtcttgagttttcagggacaaggagtgagatgggggtggggtggagagtccagcatgccacaccgcccactattgggaggtgacctcagacacttcagcccagccttcccaccattgcctggcgtgtcctgacctgccgtccgcggcctgctgctccttctctctgcaggccgctgctcagccggccctgctgcctgggcggccactgcctgatggaacctccctgctccaaaacctgactcaagaaccagtgatcccaaaagctgcctgagccctttggctggatagagccttgctctccctgcactgagcataggcgaacggcctgcctaattcagcgtcatttcatcatcatcatcatcacaataactgtcacaccgagctcgtcctcccgagcgcagactctccatattatctcacttagtcatctcagtgactcagtgaggagggagtggttgttcccactttacagatgagaaaactgagatacaaggagggaagtgacccagctaggccacacggttggtaggaggtggacctgcaatctggcccaggccttgtctatctgggactcccccccaaccccccaacctgagtacagtcaggaggggcccaagcagtcacagagacaggcctggaacgcggcgggcacatggcacttttgcagtgtatgttggtgcttacgggggctctttctcagtcctatcctttgtttgccgcccccctccctggcaggaggaactcagttttagaagggcagtgggttgggccggcatgccatgtgcagtggggaagtgggtctgttgtggctgtaaccacagtgggtgaggaccaggtgtcaacagtggccctcatcccggagggagtggggcaggctgcctgttggacagggtgtgtgaatagggggacggggtggcctttggtaggggcccaggggtcagtgaagagggggagggggagagggctgccttgggctctggctgtgctgggggtgggctgcccaaccagggcacttctgtcccaagtggaaccaagacctcccaccggaacaggccaccggagccctcgtggaacccagctccgggtggcccgacttgaggggcacccaggcagcaggacacctctctggtctcgggctgttatctttgggccgtgtcatggctgtccacacgcggtcatcacctcctcacctccctccccattagcgtcccctgacccgggccaccacgcgcagcctgcgtgaatggtcagtccctgtgcctcgcagcccgggcccttaggtctaggtggtcagcaagctcgcggtgggggtgcggagggagggcgcggcggggcgcctcggcgcctgctcaggaaggctgggcttggcggcgcgcaggtagctcacacccaaatccgaattccagccgcccgagacggcgggcggcgggcggcgcgcggcggaggcggcccgagctgtcccggggcaggagtgcttcctttcgttttcaaacaaatcgtgaatttaaaagtcaggcagagaactacccagggtataaaaatagccaccggccacaaagtctgtgtccaactccgggcagcgcctgcccagcctggtgcctttgaagaggggtcccaggagtgcgggtcgatgaggaggcgaagcgcgcacccctcctcgttcccggtgggctcgtgggtctctccgtgggggtagggcgtgaaagtgtggggtggaccgggggtagcgtccggaagacgaaaccttccccggacgaggagcttgtcctctgccgttggggcacatcgccactcccgggcctcagtttccccacgtgtccgccgcggcggggtgcgaggtatgggtgccgcggccatcccgcccggctctgcgcttgcctggcccgggccggggtcccctcgcggccaccgcccggccgctttgtgtggccgcgcagacaatggcccggccgctgggctcccggcccggctctccgcctcctccgggcccttgcgcgcaagtgtgtgtgtgcgcgagtgtgtggcgggcccggggagggagttctgctcccgcccccgcccccgccccgctccctctgcgccccgccccctcccacgccgcctcctcgcggctcccgggaacccctggcggaggcgaactcgcaagtttgcacggcgctctcaactcggcggccgggcgggcggcgatcgcggggcggcggcggcggaggggggcgcgctccgggcggggctgggcgggcggggcgcgggccgagcggtggcggcggcgctgcgccgagtcagcgcccgtcgcgggccccccgccacccccccgccggcgccgcagcgccgcggtcggagcggggcgcgggcgcgcggcggcgggggcgcgggccgggcgcgcgcggcggcggcgcgcagacacaagtagtttacattgttgggcgacttttgcaacaactcgccgcgccgcggcctccgcgcgccgccgccgccaccgcagccgccggctccccgccgcccgggcccgggccggccgcgccgggggccgccgcgcccgccgcccgctgcctgcgccgccggccgggcatgagttagtcgcagacatggacaccaaacatttcctgccgctcggtgagtgctcgccgggccgggcggggacggggccgggggccgggggccggcgggcgggagggggccgggggcgcgttggcggcgcgcgcggggggtcgccggcccgggccccgctcggacccctcgccgaccttcgcgtgagttcgggcgccgggcccggggagggtcgacccggggcaacttttcgcggggccggggcggggctgggcagcgggcgggcggcggggccggggggcgggtggcaggttcgcccgggacgaggaggggtctcccgctcaccggcggccgcctgcgccccggcgcccagctgcagccgcgccgcacaggaacccggccggagcgggaggagcaacttctgcgctccgcggctccggcctccctggcctggggaccgggacggcgcgctgggccccgagcggcctctgcgccgcccgcccgtcgggctgcggcttctagcaggccgctggcccttgggtgtgtgtccgcccaggaaacagactgggaccctgttatccccaaagcagcccacgcccgggtgggcagggtcccccggggctgtatgaacagaacgtcagacctgggaaggccccattccagaaatggggcccctcactctggcacccccgggtgttctcccaggctggctctccatttgtgagcaggacagcgcagaggcgcgtagggtcagtttccctcctcctcctgccatcccgcccggtagcttcctatcccagactgcccgccaactccaggcccagacctaccgagaagggggagagggcatggctggggcccccacccattgccctcccaagggtttggaagctagtgagaagggggagactttataaattagctccgggaaggatattaatttggtggtgggacggcagccaggctgtcaggccgggtgaaggatttgtgctgaatggaaatcgaaacagctgattatgaatgaagcccccgccatccgtagcccctcctgcccaccctccctgcagcctggggtgcag

SEQ ID NO: 12309 - DNA, 6000 bp, Homo sapiens
ctccttggtggcacctatgctagtgatgaagatgatgttaaggagatggcagctgtttactgagcacctactatgtgccaagcacacgctaagtgcttgcccttactatctgactcagtcctctcaaccaccctaagacgtgggtagtgttgttattcccattttgcagatggcaaaacagagtctcagaaaagagaagcagagtgtgattcagttttaggaaggacagaggaaggggtctgaggtcagggcctcctgggcagggggagctgtcctagttcctcaaaaccaatttgcctgaaagcatattggattactcactttacagtaatccgtgcgtgagagacaggggcggtctcttttgagttgtctgtgactttttagatgcctttttcctatttgtctgcttttgggcattttgaggatttttagccaggttgtctaaagcagttcttcccaggggagtgcgagagaatcagttgcctgcaggagcttctccagcaggctaaatcagaggtgccaggggtgagcccagcctcacctatatctgaaggacttccctatgctggtgggtggaggcacatccaccttagcattgagtttcaaataagcatcaatcatctccattcctttttttttttttttttttttttgagatggaatcttgctctgtcgcccaggctggagtgcagtggcaccatcttggctcactgcaacctctgcctcctgggttcaagtattctcctgcctcagcctcccgggtggctgggattactagcatgtaccaccacacctggctaatttttgtatttttagtagagatggggttttgccacgttggccaggctggtcttgaacccctgaccggaggtgatccacctgcctcggcctcccaaagtgctaggattacaaacatgagccaccgcgcattcttttttactgagcagtgtgttgtgtaatccttgtatgttgctacataaagattggtctcatgccttttttttttttttttttttttttttgagacagtctcactctgttgcctaggctggagtgcagtggcacgatctcagctcactgcaacctccacttcctgggttcaagtggtacttccacctcagcctcccaagtggctgggactacaggtgagcaccaccatgcctggctaatttttgtatttttagtagagacggggtttcaccatgttagccaggctggtcttgaactcctgacctcaggtgatctgcccaccttggcctctcaaagtgctgggattacaggtgtgagccaccacgctcagccagtctcatgctctttaactactgagttgtattccactgtagaaatgtggcatgatttatatgttcaatgtcctcttgacggacatttaagtttcaatttttttttttgccttcacaaacgatgttacaatgaacatccttatagatgtatttgtagtatttatcccattgttttttctttcttttttagagacggggttttgctgtatctcccagcatggagtgcagtggcacaatcatagctcactgtaggctcaaactgggctcaagcgatcctcccgcctcagcctcccaagtagtgggacttcaagcactaaccaccacaccccacccagctaatatttttgtttgtttgtttgtttgtttttggttttttttgagacagagtttcacgcttgttgcccaggctggagtgcagtggtgccatctcggctcactgcaacctccacctctcaggttcaagcgattctcctgcctcagcctcccgagtagctgggattacaggctcctcccaccacacccagctaatttttcttattttcagtagagatggggtttcataatgttggccaggctggtcttgaacccctgacctcaagtgatcctcccacctcagcctcccaaagtgctgggattacaggcatgagccacccctcctggcctaataatttttttgttaagacaggatcttactatgttgcccaggctgctcttgaactccaggcctcaagcagtcctcctgcttcagcctcccaaaatgctgggtttataggcatgagccaccatctggcaacagtggcttcttgatggacatttgggttgtttccaaattttaccataatcactgctttccttttggaatgagagtcaaagtgtttcatggtttttaaatgtttatatctagtaatcaatcttctaggaatctatcctaaggaaacaatcgcagagaaagaaaagcaaaactatccacagagatattcattgtcaggttatttagaatattgaaaaactggaaactatctggccaggcgcagtggctcacgcctgtgatcccagaactttggaaggctgaggtgggtggatcacaaggtcaggagttcaagaccagcctgaccaatatggtgaaaccctgtctctactaaaaatgcaaaaattagacgggcatggtggcacgtgcctgtagtcccagctactcaggaggctgagggaggagaatcgcttgaacctgggaggtggaggttgcagtgaaccaagatcacaccactgcactccagcctgggcgacagagccagactccatctcaaaaaaaaaagaaagaaagaaaaagaaaaagaaaaactggagactatctaaatattcaccaataggaaaatggttaagtaaactgtgataaatctattcaatagaatattatgcacccattaaaatgtttatataggctgggctcacacctgtaatcccagaactttgggaagctgaagcgggaggattgcttgaggccagaagtttaataccagcctgggcaacatagcaaaaccctgtctctacaaaatttttttttttaattagccaggcgtggcagtatgcacctgcagtccttgctacttgggaggctgaggcagaaggatggcttgaaccaaggagttcagttgcaccactgcactcctgggttattttagagaccctgtctctaaaataaataaaaaagaagttagagaccagcctgggcaacatagtaagaccctgtctctacaaaaaataaaaagattagctgggcatgatggcacacgcctgtagtcccagctacttaggtggctgatgtgggaggactgcttgagcctggaaggtcgaggctgcagtgagctctgattgtgatcacaccaccatattccagactggaagacagagcaaaaccttatcaaaaaaaaaaaaaaaaaaaaaaagcttggccaggtgcagtggctcatgcctgtaatcccagtccagtactttgggaggccgaggcaggtggatcacctgagatcaggagtttgagaccagtctcgccaaatagtgaaacccgtctctactaaaaatagaaaaattagccgggtgtggtggtgggcacctgtaatctcagccactcgggaggctgaggcaggagaatcacttgaacctggaaggcagaggttgcagtgagccaagatcacgccactgcactccagcctgggtgacagagcgagactccgtctcaaaggaaaaaaaagggagggtgggtggccaggcgtggtggctcacacctgtaatcccagcactttgggaggctgaggcgagtggatcacgaggtcaggagttcaagaccagcctggccaacatggtgaaactctgtctctactaaaaacacaaaaattagctgggtgtggtggcgggtgcttgtaatcccagctactcgggaggctgaagcagagaattgcttgaacccaggaggcggaggttgcagttagccaagattgagccattgcactccagcctgggtgacagatcgagactccgtctcaaaaaaaaaaaaagaaaattaaaaattaaaaaaaaagatgggattcacttgtccctccacagcatattgttgggaaaaaaaaaaagcaggtttcagaaaagaacgtatggtattttggagaaaaaataatatatgtgaatgataaaatctcaaaggcgtattcaccataggaatctttttattttctcttcacaaattttatttatttatttatttctttatttatttttattattactatttttttttttgagatggagtttcgctcttgttgcccaggctggagtgcaatggcgcaatctcggctcactgcaacctccgccatccaggttcaagcaattcttctgcctcagcctcccaagtaactgggattacaggtgcccgccatcacacccagctaattttttgtatttttagtagagacgaggttttaccatgttggccacgctagtctcgaactcctgacctcaggtgatccacccgccttggcctcccaaagtgctgggattacaagcatgagccaccgtgcccagcccacttcataaattttagtcatgctctaatcttttacagtgagtctgtgtgatttctttttcttttttttgagacaaagtcttgctctgtcacccaggctggagtgcagtggcacgatctcggctcactgcaacctctgcctcctggattcaaacgattcttatgcctcagcctcctgagtagctgtgattaaaggcatgtgccaccacacccagctaatttttgtatttttggtagagatgggatttcaccatgttagccaggctggtctcaaactcctgacctcaagtgatctgcctgcctcgacctcccaaagtgctgggattacaggcatgcgccaccatgccctgccgtctgtgtgatttttatgagcagaaaaaactgatcaacaaatatttggaaaggaaagctttggtctaaaaggaggaaactgatacttttgccttttttttttttttttttttttttggagacagaatttcgctcttgttgcccaggctagagtgcaacggcacgatctcagcttactgcaacctccacctcctgggtccaagtgattctcctgcctcagcctccgagtagctgggattacaggcatgtgccaccacgcccggctacttttgtatttttaatagagacggggtttctccatgttggtcaggctggtctcgaactcccgacctcaggtgatctgcccacctcggcctcccaatgtactgggattacaggtgcaagccaccgcaaccggccacttttgccttttgattggtttagtggatcataattatttttttccttataggcaaaactcacctttgcctatctttgtgtatatattttttcctcccctcgagttttctaaggttatcaagtcactcctgccagaagtttaatgagtgttaataagtgaactctcattactgccagccctgctgggattagacttgccatctctgagtgaaatgaagagtttaatgttgggcatgggatgtgctgctcagttctctcaacaactctaggagggaaggtgtcattactaccccattttccacatggagaaactgaggcccagagaggtctggtcatttttctaaggagagtcagcggacagcggctggctttgaacccagggctgaatggctccaggggctgtgtccctgactgctaacccggtgggctccaggctgatcgccccctcagccaagggctgagaggggaacgttccttttgaaaagctggcggaacatcctggaaatgttcagaggcagccagaatggaaaaagatgctcaaaggggacagaacttctcaaaggggtggaggctgccctgccatgggtgacacgtggaaaacttgagacatgtgacatccaggcggttagtgggagaattggtcatgctctttggcaaattgcgccctcctcctccctccttctccctgctcctccaaactctaccctgggagggagcacttgggaccacctcagaggaggcctggtggctgtgacccagtcccaaatgtctgcccagacttggagactgcaaagagcgggagcccttccttgagcctcaggagcagtggggttcacagggcccctctagtcaccgtttttaagcccctggtctcagact

SEQ ID NO: 12310 - DNA, 6000 bp, Homo sapiens
ttagcataagtggatgtggaattttgtccatggtgtttctgaatcttttaaaataatattttcctataatttttctcctttcatctgtcaatatggtgaagtctattgactgtttttcgaatgttaaatcaacattgcatcccactggtcatgaggtatcacctttttaacttaatattggatttaatttgttaacattttgataaagatcttattatacttttaaaatctatttttcttaaatgtttaataaaagactcgaatgttgatagaattcaccagtgaaaccatctgggcctggagttttcttctggaaagatttctgataacaaattcaatttctttaatcgctgtagggctgatcatatcttctgttcccttttgtgttgattttggtaagttgtctttttcaagaaataatacagtttcctctacgttgacatatttttggcacaagttgtttttagtattcccatatatcttattgatgtttatagggtctgtgataacaatcactttctcattcctgaaaatgatgattttcgtactctttctttttttccttgaccattctaactaagggttaatcaattttgttatttccaaagaaacagtttttgcctttctcaactttctcaaaggtctacttattgattttttgctcttatctttattatttccttccttctacttacttctgacttagtttactccttttgtttttgtttgtttgtttttttgagacaaggtttcactctgtcacccaggctggagtgcagtggcatgatgatagcttactgcaacctttaactcctgagctcaaatgatcctcccacctcagcctcccaagtagctgggagttgaggtgcatactaccatgcctggttaatttttaaaaggttttttagagacagggtctcactatgttacccaggctggtctcgaaatcctgggctcaagttattttccctcctctgcctcccaaagtgttaggattgtgggaatgagccactttacccagcctctttttttttttttaagtcatcttaaggtgaaacctcaggtcactgattttagatctttcttcttttctaatataagcatttaatgctataaagttccctctaaacactgctttagctgcatcccacacatgttgacatgcagggccatttttcaatcgcaattttattccctatttttggagagggcaggctggatccagaggccacagatatgataccatttccaggcactagggcagaaataggcccgtgattgggtgaattcttgcagtgctggcctgctatgggagcgctgggtaataccatggattcctgtacaagccccatttcccttgggctccttctgccccaacatctcagacctcaccagcctcctctcagcagcccttcccagcctcagaagcttccaacagctcctgactcctctttggagcagggattagtgcctgtggggaatctacactgcctgccccaagcctgcttgcagcctgaccctctctgtccattcattctctgctgctgtggcatgactagctagccctgtcttgtcatacccattgtgtcattgctccaggccgctggtccaacccacatggtgccagagtccattcctctctctggacctccgtttcttcctgcatgaactagcagtcttggtcctcatggctgacatgagtcctgtccttctcctcacttgggaatctttgtcccctcctcctctaggctggcacttggtaatcacagtggtagcacaacccacagtgctttggtctcctcctcactctggtccttgcagagactttattgccccattatacagatgaggaaagggggtttgaaggtgctgagagccttgcccaggctcatgggcacacgattcatctatggaagcgtggaaagcgcaggacaggtctcactgctgccaagagctgtggcttcccagtggccgggaacctgccactgtgaccgggacagctcttggtaagcatctagacagctggctcgaggctaacgtggaagtggtactggtgtctgcttgttctcgctggagctgctggctgggcgcagggctgggccctctgctgtcagaaggagtgccttctcctaaagaggccctggcaaaggcacaggccggggaggccggctcagaggtctgggacacacgccttgaaggagaacagtcgacctcctttctctgccacacagatgaaatctggggcatgcctgggagtcttcctcccctcttcccacagtcaaattctaattttcttaaagcaaaagtacatgatttgccgcagatgtgcgctgcgccctgctttttggccctacaactccccaggaggtgccactagtggtgcccattttacaggtgaggaggctgaggctcagggccgtgacttgtcccaggacacagccaggaggtagtgaagcccagatctgcccactcccactggccaaaccacaattctctcatcacatgggactccaacccgtcttggcataccctggagagtgctgggaactgaggcctccatggggctccaacctgtcttggcataccctggagagtgctggtaactgaggcatggaggccttgccctctgagttccatttcagaggggagaagccaaaagttaactgaggccggtgggggccagtctcagtccccttggaggtagccacagtgtggatctctccccaggacacactggcagctccagacaaaggcctgagaacacgctggggggcagtcccagcgctgtgggcaccgcctgccagcacccagcagacccagcacatcgatgagagtgtccacctgaaagggatattcaggctcgttccaagtcggcagcatccactgagggcttcgttcacccaacatagcaaggacatttggcaggtacacgggacatccgacctgcctcctgacgccgacagcagccttcacagaaggccctgctactggatctggagtggaaggaagaagggtgctgccacggtgctcactttgggcctcatggacgcggatttaacccgaagtgcttagcaggcctcactggttctgcacttcagcacggcccccagcagtgtggggagggctgcctggccccgagagctggctgtctggccaggctgtctgtccagcacctttgcctgctggaccgaaatccagctgagctaggagcaaggctgactgtaaaaggaaaagccattcagagtagctcaggctggtcgtcccggccatgggaggggacttgtgctaattcctcttcagacaccaaagggggtaatcgcaggcgtggcagggccgagaaatcctgttagtcctttgccccccaaggctcccatcgagtggctccctgacaaagcagctccagggcttcctgaggacagcaggctggaggcaggcggtgcggaccccccacagacactaatccttgctccaaagcagattcgagggctgggcggcagcctccctgggctccagagactgctggaagcttctgaggcttggaagggctgcgaggcccagcacacggggtagcatgggcaagctcctcccttcttctggggactcagagtccccatgtgcaaaattggggggaagagcggggtcgggggaagagaagacctccaaggcggttagggtggtcttgggcatccgagtcttgcccagggcgagggctctgcattgctcttggtcctctggaaggcagtcggggcagagtgaggcccttggttcttcttggggatgcagggcaccatggccccagcagctgaactggcctggagggtgcgggggtgggtgtgtgtagcagctccccagctcctcccctgaggaggtcagggcagctttgccctcttggagccaggcctggcggcttcctgggccccagtgacacagcagcgcgaagcaagtcatctccctctcagcaaaacagagccaataattgtaccatctctgctggagaatgaagcgcctcaggggccacactgggacgcgccaccctagtgcatgtccctctgggctcagaaccccctttcagcagcctctcagcctagggatcaaggtccttccaaacctgggccaccccaacctcggagaggctccccactgagcacccaaagcacctgtgaccccataccctgccggtgccctccccccacccatgcagccccatgcccgcccttctccccgtggacctgccaccccgacacctggacagaagccggctctggtccctcatctccttctctccttggccttgtggttcaggcccttgtgtcctgtcccctccctgctctgtgagtgtctggtcactgtggcagccatagggtagcacctagaatctgtgttggacaccggtgcgtcacctgttgcttcccgggcaggggaagcacctggcctgtgttccccccctctgccctccaccccttgcccacaggaggtgctgcaaagcctgcgtggcgttggcggggtgctggggtctggaggagcccagccagtcggttgtgttggcaagagacgggcctgaacaagagccaagtggcttctgcgtcagcttttaaaaccaccaaaaggagctcacttgtcatgctgtggtccaaatattttggccatttagatgcaaccttctgtgcctctgaaattaggtgtattattaatctcatccagcccagtgacagagtgggcagatcagacaaggatccttgcagcgggatgaagggtgagcatgttcttatcggtgcaaagctgacacggggtgtttccagaatgacactgatggagtgcagcctgcctgggggaggggtggctgggaacccccggtgatgaggagggcatgggcacagggcttgcttagggaggagaagagagggctccagagacacggttgctggcttccagggtgtcacatggggtgacgtggcagggggtttctgcaggggtgcttctgagatagggcgatagggccagctggggttggctgcaggctccaggagttaggttccagatggatttcagatgggactttcttgctaaccctactttttttctgattataaaagtaataaagactccttgtagagaaggaggcaaaatacaaagaagagtgtgaagcccccatcactccattaatgttcaccagtcggggggtgggaggtgttttccttcagatttctgtgtatacatttataactggcatccttttgtgtgcaatgttaaccgccttttgttttcactaagcaatgtattatgttgagcacccattttgggggagtagacagcctgcaccatggtcagcccgcagacaggctgcacggatccaggcacctcgctggctccaaaacccacgaagtgaccccacccaggatgtcagagtaagagcgtgcctgcttggctaatgtctctcgcgtgcctgcttggctaatgtctctcgcgtgcccgcttggctaatgtctctctgaacccagagagcggagaggacccgtggctgggctgctgtgtgttgggggcttttgaggccagcctggtggccagctccttggcactgccagttgcaggggctaaccaccttgtgagggacagcccgcttcccccggggtctcttggctcttcctctctgccgagttgtgacaaggtatgggcgtggtgaagcgagagctcccctctctgccagtgtccatgtggccactctgtgacagcaggaatccataccccacccagccagctcacagcaggaatccatacccccccaccccagccagctcacagcaggaatccataccgccccctccagccagctcacagcaggaatccatactcccccaccccagccagctcacagcaggaatccataaccccccaccccagccagctcacagcaggaatccatacccccccaacccagccagctcacagcaggaatctataccccccacccagccagctcacagcaggaatccatacccccca

SEQ ID NO: 12311 - DNA, 6000 bp, Homo sapiens
gcctggagtcacctgcactgaccactctcctgcggcttcttgtcttgcagatttctccacccaggtgaactcctccctcacctccccgacggggcgaggctccatggctgccccctcgctgcacccgtccctggggcctggcatcggctccccgggacagctgcattctcccatcagcaccctgagctcccccatcaacggcatgggcccgcctttctcggtcatcagctcccccatgggcccccactccatgtcggtgcccaccacacccaccctgggcttcagcactggcagcccccaggtgagtgcggggctggggcaaggggagggggtggggcctggggtggggctgtggcttcaactgcaggacgaccgcctcatcttgaggcctctgggaggtaggtgctgtggtctccccgcttgacgcagagtatacagagcctcggggagcagagtgccgtgggggtttgagcccaggtggggctgactgctgagcctgggcctttggatcatcagccgaggtgacttgcagctggttatctgcccacgtggccccttcccatgccggagggctcgggactccctgttcccatgactgggggactcagcagagagaggctgtggcctccctcaggcctaagcctgcttccccaaaagcttgtgcccacacagcctgggtcctcccctgaagtctctgcttacacccaggccaaagggcccccagggaaggcgtgttcgggctcagggcagctgcgtcccctctcagggatgccggccctgggacctgcagtggccaggtgtggcagcggtgctctgtggtctcggctcccccacggctctgtgggcgcctggccgtctgtggggcgtggggaccttttccacagttgaggtttgctcagtcgcttctccagctcagcctggccctttgggctgtttctggatcaggaagggctggtgcctggcagagcctggcgcagtccaggtcttgtcatggagaacttggggacctggtccgtgctccccttcttccttggagaagacaccccgagtagtgtctcttgtggagttgttcccagccctggggtgtccggtctgtgagggtggagggcgaggctgggcctcgtcccctggctcccggtggttgcttgtggatttccacctggccggccggaacctcccagactcccactaggccctccctctccaggggctcctcacatgagcaggggtgctccttccgctctgaatttctgtgtttgggtttcaccctgtgttcctagtagctgaaggctccatggcagagttttggtgccatctcaggacagcccacccgggtgggactcgccctaggagctcctctgcccacacacagctgacagcaccagatgtgtcctgtggactcccaaaccccctgctgccctgcctcagtttacctagggcaggcactaggcccaagggattgcatgtgagggggccaggaggcagcaggtggacacctagtcccaagcccccatgccatctcccgggtagtccaggactgctcctgacctaggactgggctgtagttggggtctggagccggcctgctgcccatccacctggccctgtttagagctggccttgacctcccgagctccttttccctggagaatcttgctggctttctgggccaaccccatcaaagcccctctgctttgggggatgtgtgcagaagaactggggcctctgctccgtgtccccctcatatcacctggccttccgaaagcaggcagcaggcccaaggtgctggcacgagggaggcctggtcatgttatttttagcacaccagccctgcccctgctcttgttggcagcatggtgccctgtggcgagagggcgatgaagactcggcttccgcctgtcccttggctgactggctggcacctgctgggtcccagggccccaggatgccccttgctgggtcctcccaggtctgccgcctgtcctggacacccaggggtctagtgcacagtaggttaccccctgcgggtggcagtggtgctcccagaatcctcagggatgcctggtgtcctccgcactgttgagctcttctcggggaggggatgggcagcactaggggaggaggcttttcagggctgcttctgggccattctctgttgcttcctgtgcagccaggctcctggcacaaagtagggacttgttgaagccaagttgcttgggagtgagtggtgcaggtccccttgacattggcgaggtccccggggtgggtgtgggtgaggagcagacgcgggttgccccagacgttccctgcccggccgctgttggcgtcggtctgccgttgggctgtgggtctcacccgcagttagtttgccgtggtctgaggcccatgcttgacttggccctggttccccagaacccatagctccttccctgggggttgagtccagctttgaggcctcagcagtttgtcttggaaccctggggttcctcacattcatgggagtgtgagcagggtttcaggagggatgtgcccccactcctagccccaaaaccacaaccgcaaagtcagagtcgctggagccagagagattctctgacttctgctgctgttggggagggccaggcactctgccaaatgctgccttctgccttctcaagtccatggccaggaagggccttccatgtggcggcgtccaggccactcgcccctcctggtgggggaataggagtctgggggggcttgggtagacccaggccagaccgcagctgcctggcccctgagctgtcccaaatctcttccctggtctgcaggctgtactcccagagcaggcccgggggacattccccacagtgtcccagagccttcctggctgcagccggctcacctgggcgcgttgcaggtattggtggagtgagttggtgccagcttccacacagcacttctgagtgcccggcatggagctggacttggtgtcaaggcctctgagctctagcaaagcctcctggtgggagggcctgcccagggcctgtggggctgtgatgtgtgcacagggagtgtggacgcgaggctgagcgggcttcacggggtcggaagcagggcagcacaggcgcctacccgccagggactgaggtcggaggggagtgtgcagaggagctggtttgctcctgcctcgatggacagatgaggtccagcaaggtccaggggcctgctcctggcgcagagtgggcctttcccaagtcggggctggtggagagacccttcaggggctcaggaaggaagggtgtggtgggtgtgaggagagagccaagagacgggcaggagacctgggtggggcatcgaggcggcgggaactgaaataagtgccaaggatctgaaaggggaaatgcgatggcccccaccctggccacgcgtggagtcctgaggctccagcgaagcaacaatggcagcctggctctcctgggagcgggagcagggagtgtgggaggagaccctggatagctggggggctgtggagcccactgggggagggacagaccaaggcagacccccggggcggccctgtgctgtgctccgggggctgtgagccaacccgaggcccagcagcctggggctggaagggcggaagaacgcccgcctggcctccccatcctggcacagccttgcttctgtagcctggaccgtcctccaggtgagcccaaagaagcaaggtgggtggccccagggcctgcagcctggatgggcacctcagcccgggctccactcttctcagatgtgcagaggctcaccgggccctgggctcactgggctagccagaccctctgatatcactgaggtctgggggagccagggatgcaggctaagttcagcgcgggagctggcttggccctgacactgagagggagggggaccgtctgccattctgtcctgcctggagtccctttcccggccagggctgctctggtgctccctcagtttacccagggcaggtgctaggcccaagggactgcacatggagggccgggaggcagcaggtggatccctacccacccgaggtggtttgggacagcctagaaagaggaagtgcgtgagttcctttcctttgtgcttccgagcaacctggacctgcagagtcatggcctgtgctcctccagcctctggcccaaggggctcctgctcacacgcctcggtgcctccccagtgctagggcacaaagcgagggtgcccgacacttcctgcttgtggatgcctttgctgcccctgctctgacctgatccccgccctggctgtacctacttctttccttttttcaaacaagccctttgcttccccacctctgaacactggcttgggggcccctgtgcctgggacacccctttcttcctcccaggccctggcccatctcctccaggaagcttgagtgctcactgcagccaccggcctccctgtaagacagtgagttgtctgcgagctctgctctgagccctggcacatggagcgactcagttacacttaatcagctcttagaggcactggctgggcatggtggctcaacgcctgtaatcccagcactttgggaggccgaggcgggaggattgcttgagcctaggagttggagacaagcctgggcaacatagttgagaccccaccactagaaaaaaaaaaaatagctgagtgcagtggcatggacttgtaatcccagctactcaggaggctgaagcaggaggatcaattgggcctggaagtttgaggctgcagtgactgtgattgtgccactgtcctccagcctgggcaacagagtgagaccctgtttcggaaaaaaaaaaaaaaaaaaaagagaaaagaagtaggcactaacatggttccagttttgccgacgaggaaactcaggctcacagtgattaaatcattttccgaatgtcacacgagaacgtaggaggcaggcagaatccggagccagggatccgcctctggggcctccagtgcctccaagcgagacagccactagaccagcgagccctggagggctgggcagggccttgtcccctggtgcctcccggagcccagcacggggcagggccagctgggcacttagtttggacgagctctgtccctccaggggcttcactttcgccttctgcagcgtgggggatcatgtgtgaccttggccagcccctgacctccctgagccgcagcctctgcatctgggacacccagggtttcccatgcagggagtgtcaagtgtgggtgcaaagcccaggcaccgcacccctctgcagacgtctggggctttctcttgccccttcagttccctcccttctctgagaagcgcacctgctgcctgtggacatgaacactgggcatttggtgagtcacacagtggccacccgcttctccagtgggagcttcatggcacccccactgtgctgagttgtcacgggggacctcctggcctctcgcagcccacctgagtcctgcagggaccaagcatccttgtaaagcctcacagcccacctgggcagatcgaggaagaacctagaagccagaacaagctggggctggaagactcattccaggcaccgaggtccatgtgaaaggaggctttgcggtggtttctgctttgcttgcattgagcctcaaactcttcctgtcccgtgagaaggggggatgggatttggaggcctgaggaaggaaggaggggagcttcctgcgcacaagcggcggcaggggtttgcagaagtggaggctgggggctgcctggccaagcgcttaccgccctgcgcagccaggctggctggcaggctgcagcgggaagcgcctgtgggtcctcggcgctgactgcagagctgggtggaggcagcggaaccaaaactgctgtgtcactgcacgctgcagctgttgccagggtgaccgggtgagtttcccacgcttgcccgggcggcagcgtgcgggccggcgggtggggcggaggggtgtgcagagaggccagtggtgtcgtgccac

SEQ ID NO: 12312 - DNA, 6000 bp, Homo sapiens
cacatctgaaaactcatccatgtcttcctgtggaagaaaagcagaaccttcactatggtcctaaggtcgctgccaccccggccccattagctctcctgatccatctctctccatggcccctcaagctccccctgctcctgctatgtgcacacaacgctcctcccaccatgggggctacgcatgtgcgcatccctctgccgagggattctctcccctccttggcctagttaactcctatctgtccttcaggcgttcgctcaacctctgcctcctcaaggaagacttagctctccctgactaggtcaagttctcccttttacaggccctcataggactggctccctctactttgtaacacttatcatagcagcagttttccatttatttgtgcagttgtttcattgacatttgtctcgcccactacactgcaagttctatgaagccaaggatgctctctgttttgttcatgattatatttgcagtgccggtacctgacactatttgttgactaaacagaaggaaggagaaaagggaggtgagtgaggaagagagggaaggaaggagggagagaggaagataaggtatataaagcccccaggaaatagatagttattgtaattattacatagtgggtactcaagaaatatttatccatctacccacccatctatcccgccatccttcctcccaacatccatccatctacccacccatgcacccattcatcacccacctgtccattcatccatgcatctaaccaccatccatgcagtcattgtttatggagcacccactctgctctagaccccgtgttgacctcagggataagtccaaagtttcatgagacatagtttgggtaccaccaggcatagactctctgttcaggcagatgcacctttgtcgcactctctgttcctccatgctctttcccctacccttgatgcctctacgtctcttaaccacttaacatgtccttcagcaagttactcttgcttacagcagcatacttgaagcccagggaggttacgtaagttgccaaagatcacccagtggttccctggacctaggacccaggccccagccatgcaggtgagtttgcttccaccactaggggtcacgtactaggggtgaaggggcctgggctttggagctagggagccctgggttcaatcctggctcctatcacccctcactggggccacgggcaagctgctgacctctctggcaatccatagtcaaacttgaggatagttcctcctacctgacagagggtggtgaggagggaacaagagagggccagaccctgcccagccctgtgcctggcacatagtaaaggcacaggacaaggtagcagctgttacatcatagcagggggttaccatgtgaccccaggaagagatgcctctgccctgtcgacccagtgcatctcagtcaccatcccctgctggagagagagctcagaaatggctcctcagtgggcagtgcccactttgagcagatcaggtgtgtgaaactttgagtaatggcacaatccactaccagaggaggcttctctaccaaccacaccagcctgcgggagtcacaggaccctaaaacaggggcatcttgctcataatctaagtgcaatagttaccatatattcagctcttactattctccacgatatgattcctctcattttatagatggaaaaagcaagattcaggcagaaggaacttgctaagcaaagctaggaattcagtctaagttggtctggatgcaaccagaacacagctattgtagaaaacaagaaatgccaacgttcccattgctaattgggattttaaaaaaccttaaaaatgtccaggcatgacggctcgcatctgtaatcccagcattttgggaggccaaggtgagaggctcacttcaggccaggagtttgagaccagcctgggcaacactgtgagaccctgtctctacaaaaaatacaaaaattagctgggtgtggtggcatgcacctgtagtcccagctcctcgggaggctgagttctgaggattgattgagccagaaaggtcgaggctgcagtgagccatgatcatgccactgcactccagcctgggcaacagagcaagactctgcctcactaaaaaaaaaaaataaagtcaaaaatggacataaccccgggactaagtaattcaaattaccaaagatatgatcaaatcaagtgtgcaaagatatattaatgacattcatcactgcattatttataacagcaaaatctagaaactactaaaacgcccagcagtaggagactggccaattaaccatggaatatccatggaagtctaggaatcacttgtgggagaggatttgatgaactacgaaaatgttcacatctattaagttaaccaaaaagcaggttacaaggaagcatgtagaatactgttccttattcacattacatttgcatatctacacatatggaaaacagtggttatcaggggatggagtgggacaatgagtaattttaaattttacctaattttgtgcttatactttccggttgttctgcaatgaatggtattatgtatacaatttaaatctttaaaaatttttaattacagactttgtagaatttaattgaaaatgctgaagcagcgtccactcccttcctccctggaagaatgtgtgatggccgggcttatgcctgtaatcccagcactttgggaggccgaggcgggcggatcacgaggtcaagagattgagaccatcctggccaacatggtgaaaccccgtctctactaaaaaaagaaaaaaaaaaaaatacaaccgggcatggtggcgcatgcctgtaatcccagctactcgggacgctgaggcaagagaatcgcttgaacccaggaggcagaggctgtagtgagccgagatcgtgccactgcactccagcctggcaatgaagcaagactctgtctcaaaaaaaaaaaaaaaaaaaagaacgtgtgatgttttggggacaggacaccactgtagggggaggggtgtcagtctcaccttctcccgaagtctctcctgactcggaatcctgatgcccatcgggctgcgggtgtgggtcccactccaggggcggcaggtgctgctgggccaggcggaagtcctctaggagctcggggctggtggcattgggaaagagtctctcttcttcccagctttgtgaactacttctatccacatccctcttgtcctcggcccaggcccagcgccgccgctgggggcccttccccaggccaggctcagcccagcggatctcagtctccgagctggccattggggctggcctgggcttcacctgggccacttcatcttcaggagacagagctgctgccaggggccccagagtcaccgctggttcctgtcagcatcggccatcctgcctgtgccctgtcagggacacattcaagagagaacattaatcaatcctgatcccctcttttattcggaacaagaagttaccagcaggaactctggaattagccccagttcaactcctggttgtgtcctcccgaagctgtgtcaccttgggcaagtcactctgccttcattttcttcatcaataaagctgggataataattcctctctctctccagggtttttttttttttttttttttttgagacacagtctcactctgttgcccaggctggagtgcagtggcacaatctcggctcactgcaacctccgtctcccaggttcaagcaattctcctgcctcagcctcctgagtagctgggactacaggtgcacgccaccacacccggctaatttttgtattttttagtttcactgtattggcgaggctggtctcgaactcctgaccttgtgatccacccgccttggcctcccaaagtgctgggattacaggtgtgagccaccatgcccggccccctccagggttttataaactagatgagacacaggatgaggagcccagtggccagtgcaccaacgaacaggtgttgaatgcatgctagctagtgttactgcgtactggctcttcgtgtgggcatggggcacaggccctgctcatgggagaactgatggcccaggaggaagcagacgatcaccaggcaactacaaatccaggtgagatgtgctggaggaggcacgggggctgccctgacacaggccagggaagtctggtgatcccagtttagaagccggttcctccaagaatcctctctgacctcactggggtaagaattcagattgagaggtgggggaggatgatgaaaaaagcattccaggccaggtaggagagctcacgcctataatcccagcactttgggaggctgaggcgagtggatcacttgagtctaggagttcgagaccagcctgggcaacatggtaaaaccttgtctctacgaaaaattagccaggtgtaattgtgcacacctgcagtcccagctactccagaggtcgaggtgggaggatcacttaagcccgggaggtcgaagctgcagtgagccatgacagcgccactgcactccagcctgggcaacaaagtgagaccctgtctcaaaaggaaaaaaaaaaaaaaaaaggtagcattcctgtacccaacataattgaaaaacaggtgctcaaatgaaaaggcatgaagtcccaacacatgctacagtatagatgaacctcaaaaacattatgctaagtgaaagatgcgacaaaggtcacatatagtgtgattctatggataggaaatatccaggcaaggtaactccttggagagtgaaagcaggctggtatttgccaggggctgggggagaggagagcgggcactaaatgcttgctgggtatgggatttccttctgaagtgatgaaaatgttttgcaactagatggaggtggcagttacacaacactgtgaatatactaaatgtcactgaactgtttacctaaaaatggttagttttatgttatgtgaatttcacctcaatttaaagaaaacgccttccgagtgaggagtgaggcgagctgggggcggggagcaagcctaccaggggctttcctggacctgggagtggtttcgccgccgatggctggggtattgaacacagggaaagcccatcagaggtgtggtttaaaagttccccttgggctgctctgggagaatgaaccagggaggctggccacacgggggacccgtcaggcggctgctgcaggaacagggtagccagagaagggctcctccgctgccttccctcaaccctctccttctttccctctttccttctccctctcatctccttttgcctcttccttctgacgctcctgctatttccctaagcgcttcctctatgccagcactgagccaggcccaggaagtgcaaagctgacccagagtgggcacggtcccccagggagctccctgccatggagggttcagagaactgcagcccatcagtgcagcggcccccagagcagctcacacaaaggccttcttccacagatggggaaactgggatccagagaggggagaggccttgcctaaagccacacaggggtcaggacaaggcaggggtgaaagtcagcctcctggcccacagtctgggctttctcccctgcatgctgtgttgaaggcagtatgactccaggcctcccaggacagaaggtctgtgtttgtccctttatcctcatgaacacttggatcctgcttgatttgtgtggctgagaaaagtcagcaggcaactatttttggacacaaagttccccagggaacagtgcagcccgggaaaggctgacttctcaagggctggaggagggaggtgcagggaataccattcttccctccttggctgcgactcctgctctgtggatgggtgttcggggcttctatcctctgtccccgcccagtcttcctctctacccccaaatgcagagccctacaatttcctccagatcaccctgtgtattgtcctccagccccacagtccctaccacatgtgaagagcccactcggcgccagcc

SEQ ID NO: 12313 - DNA, 6000 bp, Homo sapiens
aggaatatgctacaggaccttaccactcaatgatgaaccattcctgtcattacaaagtaccctggaaatacactgaaggggccaattcagaacgtcttgtgcctttgaggacaaaagattttacaacactgtagacttgagttaaggcaaccatttggagacagtacagggtgggttaagagaattccaaagtgctaaagggtccactgcaccccacgatcaatctgtaaaggcagtagaaggccagagaggaccaagaaggctgtgggtaggaattcagccacgattccatagacaaggcattagctcctaggtccagccagagagctcagcaaacagtccgctctgagtaaatgcgagcattctctttttctaacgaaatcctttccctctgaccctgtatcccttgtatttgaaataagagcaatctccagggctctgcctgtctctaccccacctgctcaggcacatgatgttaaccaggttctgattagtagaccatttaccatcttagtattttattttaataaatatcaatatcctcctctggtctggcataaataaatcactgccaccttgttcttccagccatataaattctattttgcactttttttttgagtgacagaggttaaaaaaatagaataaaattatgccttaattatgctgtcaaagttttctccaacatttatcaggcctacaggggtggacgagaaccagcatgaggcaaggctatgttttcaaagatttaaagatgcataaaattaatctttcataagaaacagatgtactgtaactaaatagaacgaagagttttatgaaaacgacaaaccctaactataacccaccagcaatgctaagttgaaagctgagagtgtcatgagcaaaaataaagataaattagggctactaggggaaactaaagatctgacatcgcctaaaaccaggccagacagggcttgtatttagagctcattagttttgcttaagctaatccaaagcagaaggtggccctagaagcacataggccaagaagacatgggttcagttagtttactctcagtacagcagctgagtgctgattttaaaatgtaaatttggaggccgggagcagtggctcatacctgtaatcccagcactttgggaggccaaggcgggtggatcacttgaggtcagggatttgagaacggcctggccaatatggcaaaactccgtctctaccaaaactacgaaaattagccaggcgtgatagagcgtgactgtaatcccagctacttggaaggctgaggcaggagaatttcctgaacccaggaggcggaggttgcagtgagccgagatcacagccactgcactccagtcccggcagcagagtgggactctgtctcaaaacaaaaaaaaaaaagtaaatttgatcatgccatgccctacagagtccatcttcatctgacttcatcttctactccctctccccagctcctccaccctgaccaggctgcagtacttctgacacaacttcatgctcccacgttagggcgtttttaacagttcttgccagtactttgaccacagatatcttcttgcacaacctcagtgagttcaccctatgaatactgagaaatatgagccctcctgccccctggcatttcaaaatcccttcctctacccaactttttcctttttttccacagcacttaccacttttagcataatacagtgaacccatttgttatatttgctgtttcttttctctcttaaaagtatttttttagtttcttttttaaattttaatttttaaaaaatctatgagggaagcagagcaagttggcagaataaaaggctccaccaattatcccctccccaaaaaaaaaactccttaaatgggaaaacattccatgcttattcataggaagaatcaatattgttacaatggccatactgctcattgaatttatagatttagtgctattcctatcaaacgaccagtgatattctttacagaactagaaaaaactattttaaaattcatatgggctgggtgctgtgggtcacaactgtaatcccagcactttcggaggccaagacaggtgataatctgaggtcaggagttcaagaccagcctggccaacatagtgaaaccccgtctctactaaaaatacaaaaattagctgggagtggtggcccactcctgtaatcccagctactcgggaggctgaggcaggagaatcgcttgaacccaggaggcagaggttgcagtgagccaagatcacgccgttgtgccccagcctgggtgacaagagtaaaactccattttggaaaaaaaaaaaaaaatcaaagggtaccaaaaaaagacctcaaataaccaaggcaattctaagcaaaaagaataaagctggaggcatcacgctacccaacttcaaactatactactacaaactatacatcagggctacagtaaccaaatagcatggtacttgtacaaaaacagacagatagaccaatggaacagaatatagagcccagaaatgagacaacacatctacaaccatctaattttcgacaaagtcaacaaaaacaagcactggggaaaggactccctattcagtaaatggtgctagaataactggctagccatgtgcggactattgaaactggacctcttccttacactacatacaaaaattaactcaagatgaattaaaggcttaaatgtgaaactaagaactataaaaaccctggaagacaacctagacaataccattatggacataggaacaggcaaaaattacatgatgaaaatgcccaaagcaattgcaacaaaagcaaaaattgacaaacgagatctaattaaactaaagagcttctccacagcaaaataaaccatcaacagagtaaaaagacaacccacagaatgggagaaacatttcgcaaactatgcatctgacaaaggtctattatccagcatctataaggcacttaaattttacaagaagacaaacaaccccattaaacagtgggcaaaggacatgaacagacacttttcaaaagaaacatatatgtggccaacatgcatgtgaaaaaaagctcaacatcactgaccattagagaaatgcaaatcaaaaccacgatggataccatctcacaccagtcagagtggctattattaaaaacacaaaaagtaacaggggttggtgaagttgtagagaaaaaggaatgcttatacactgttggtgggtgtgtaaattagttcagccattgtggaaaacagcgtggcaattcctcaaagatctaaaaagagaactaccatttgatgcagcaatcccatttctgggtatatacccaaagaaatataatccttctattataaagacacatgcacacatatgttcattgcagcactgttaacaacagcaaagacatggactcaacctcaatgctcatgaatagtagattggattaaaaaaatacaatatctatacaccatagcatactatgcatccataaaaaagaatgacatcatatcctttgcaggaacatggatggagctggaggccattatccttagcaaactaatgcaggaacagaaaaccaaatactacatgttctcacttataagtggggactaaatgatgagaacatatggacataaagaggggaacaacagacaccggggcttactggagggtggagggctggaggaaggagaggatcaggaaaaataacaaatggataataggtttaatacttgggtgatgaaataatctgtacaacaaaccgctgtgacacaagtttacctatataacaaacctgcacattacccctgaacttaaaagttaaaaaaaaaagaaccaaaaaatcacatgagccctcaaagtacccccacccctccattccacgcttgaccccagcagtagcatggtgcggagcgcgtctctgggcactgagggagggagtaaacagcagttgtaaggcattgaactcagtgctgttctgttagagcagaaaggaaaactaaaccaaactcagctaacacccacctattgggggagcattcaaaccagccctagccagaggggaatcgcctattccagctgtctgaacttgagttcccacaaacctcaccactgagggctacagtgctctgggactctaaaaaaccttaaagacagtctaggccgtaagggctgcaaatcttaggcaaaaaaaaaaaaaaaaaaaaagtaaatgtgatcatgccatgccctacagagtccatcttcatctgactgcatcttctttttttttttttttgagacagagttttgctctgtcgcccaggctggagtgcagtggcatgatctttgctctctgcaacctccgccccgctccgggttcaagcaattctccttcctcagcctcttgagtagctgggattataggtgcccagcaccatgcccggctaatttttgtatttttagtagagacagggtttcatcatgttggccaggctggtctcaaactcctgacctcaagtgatccacctgcctcggcctctcaaaatgctaggataacacatgtgagccaccacgcctggcatgacttcatcttctaccccctctccccagttcctccaccctgaccagcctgcagttcttctgacatgacttcatgtcctagggctgaactgggcccagagacagtggacttggtgggggggcaggggtgtggcatgtgacatactgagacaccagctggggtgcccctcctctaactccaggctgcacagccctccgctgcataagacactccttccttcctcttgaggagagaaggaagagtggggaggactttgtcttgcatcttggatgccaactcagccacagcaggatagggcactgggcagagttgtgaggcccccattccaggccccagctcccagatgacatttctagacacaccctgagtcagaagtgaacctgccaccttgaaggaaaggacccagtccggccagcattcagcatctgctaaatgaagagcgcttgggacctgaacaaccagcagcgatacccaggtactgtatcagtgtgggggaaaagaagagagatcagactgttactgtgtctatgtagtaaaagaaagacataagaaactccattttgatcatattaagaaaaattgttctgctttgagatgctgttaacctgtaactttagccccaaccctgtgctcatagaaacatgtgctgtattgaatcaaggtttaagggatttagggctgtgcaggatgtgctttgttaacaatatgtttgcaggcagtatgcttggtaaaagtcatctccattctccgtcctttattaaccagggacacgatgcactgtggaaagccacagggacctctgcccaagaaagcctgggtattgtccaaggtttccccccactgagacagcctgagatatggcctcatgggaagagaaagaccttaccatcccccaacccgacacccataaagggtctgtgctgaggcggattagtaagagaggaaggcctctttgcggttgagataagaggaaggcctctgtttcccgcatgtccctgagaatggaatgtctccgtgtgaagccgaccattcattctactctgagatggagaaaaccgccctatggctggaggcgagatatgctggcagtgatactgctctgttactctttgctacactgagatgtttgggtaaagagaaacataaatctagcctacgtgcacatccgggcacagtaccttcccttgaacttatttatgatgcagattacttgctcatatgttttcctgctgaccttctccccatcatcactctgttctcctgccacactccccttgccgagatagtaaaaaatagaaatcaataaatactgagggaactcagagaccagcgccggtgcaggtcctcgcatgctgagtgtgcgggtcccctgggcccactgttctttctctatgctttgtctctgtgtcttatttcttttctcagtct

SEQ ID NO: 12314 - DNA, 6000 bp, Homo sapiens
ctctataaataggaaatttatgttaaatcactttataactttataaactgaaccacataaaagtaatattgtggtatggaactttttaaaagaaaagtaaacatttggaaatttcatgtctgccatgtaactaatgttgctgcatttcacataggtattgggaaatgagagagcagcgcacccccactttgaaaggcaagctggttcagaaggctgatcaggagcagcaggaccctctggaataccttcagtctgatgaagaggacgacgagaagagaggggcccagcgccggctgcaggagcagcgggagcgcctgcatggagccctcgcgctcatagagcttgccaacctgactggggcgccactccgacagtagcttggacactgactcttccactgtacaaaagtactgcccagcatacttaaaaagtagatccttgggcataagctaagcaccttatttgcttatcataggctgctattctgtagaaatttatgaagaatgttattgccccagaatatggggtgagagagaactgcacttttttaatatggaaatgaattcatcgtaaagtttaaaatattttgtaaatatggactgcacagtacagggtagaaaactacatattgtgggaagctagattttgcaagtttaatgcattcattggaagcagttctcacaggaagcactttctgaataagacacttgtttgaaaaacagaatggtacaaatagccaaagaagattaaaacagattatttataagatcatttttaacaatatatattagtatgtttaacaatactgtaaacactgaagcaagcaagaaagtataaaatatgtaagatagataattttaattgcaaaatactgtgcccactaaggctagagaaatgggaggctattttggaagatgttctaagtaatggacttagaagaaaatagatatttgaggctcttggtaagatgcacaatagttcagaatttttgaaattggagcaaaatcagtcttattctatctggggctttacaactcagtataatgtttaagtttgaaaagcacttgtcatccctagcatgttaacttgggaacttttgcacatttcatatttctcatttgctgaaattgagtgattaatcttgcaaagtctaggtaacatagtaattggtaattttaaaaatacatattaagggccctgtaatgagatttggcacttggatttttactaaagggacacctgcagggttgttttgtagtgaaatgttttagatcttttgttagcaaacactacattttaattgtactgcttgtttagaattattagcaaatggaagcctccatatttatattttcagtgcataaagccaccttcttgctttacttcagagtaacatgccaagctattttgtgttcactaaatttagctatcagttaaacactgcagaaaatattagctactcaaataagtaggcttctgaaatagttttaactgcaagtgtgttaacttgtgtggtggtttgaagccatttttccaaataaagttattaaacaccactttatgtactgaagcatgaacagaaaaatcaagagctgagcagaccacctcctttatgtaggcaaaacttccatcattttggcttttgttctaaacagaactaaatgacatgcatagcatggtaacttacagatcgcttaattggagtaaaactcagagtaatagagggaaatatgggctcttcagtgcctttttagcttttttgagttgaagacgttcctacagatgtagtttaaacattacaaagtaggcttctttatccaaaaatcccaatgtgtcatagtacacagatagtttaaaatatgtagccacggggaaggggaggcatgtaaatgtcttgaagaggagaaaaagtatgaaagaagatacgatagttacgaataatgtgtatgatgaggacatactttaaaaatgtaattcctctgtacagtaaattacaaatctttagggatttttttgtaataagagaatttatatttgtaatggtctaagaatttttttgtaatgtggtatatagaattttaatttggagcacttataagctggtaagagagactatagcatctgaattatcttggtttatgtttcagcatttcctctagaatttttgctctcaaatatgtgatttaatgaactaaaaacaacactcatcagtcttgggaaatttgaactttgatcaacttaactaaagaaggaagggtagtaagaatttttcaaatacaaatatttgccaattcacagatgataacatttaaggccttcaaaagtaagggtttttccttgtttctccagtcagcttttgtcaactctaatagttttttcataaacattttttatttgtataattgcaacagtttaagaaattatcacaactatttagaaacatttaaaatgttctttttgatataagctatatacttggaaaaatacattggtatctaaaatttgaggtgtgttaagactgctttttgttttaaaaaatggtttacattcaaatttttgaagtgttttatgcttcatatggctaagttgtagtttggcagagttaacagcataagaataaacatgctgtaattttaaaagatgctttgaataaaaatttattttaatttaaaatttaaagtacacggtcattcttaaagcctttatcatttgttttcctatcgaaaatataataaccatgatataaaaaaatttaaaagatagaaacatcacctacagccttatgttcagccatcagtattatttcagtacatgtttgcgtagttgtaagtacagtgtggattgctttttcttactttaattatggcttttaaggttatagatatttaacttcctcatcgggttcattactacagtgttaaaaatatactgctgtggataagtattgaactattgccaccccatttccaggccttaaattagggtaataaggaaaagggatttcatttcacttacatttaggatgggttgtctctggggtcagctcctcaagaatccatttaaagcctgtgtacttttctaagagtctagcaaattggttttcttttttcatcagttatttttggtagatctttagttgtgtatttgcagtggcaagggtcagcctgtcctacccttgtgcagaagaatatcacaagcaactccttagtgtgagttgctgtttaaacagggtaaggatgggattttgacagcgaggtaaggtcctggaagtatgtgtatacaatcaaactaaatgcaattatgatgaaggtcatcattaaaaataactttaaaatattctttttgcagtcaaaacatttggagactcacaagaaaattgaatgttctgaggaaattaaccaaaatgaccgatttcctgtttaacttgaatatggattcattttctcttttaaaacggacttaacatgtcttttctttcttgttttgggtaacttgggcacttctggtctttttaatgctagctaattttcacgagttctgctttagttcttatcagggctgaaaatgtttcccagttttcattctcctggttgtttagtgcctaagggtagaaaaacaattctctgggcatctatatagttaggccccaacttttatttaacttgaaatcttaagcttttctaagaagctaaaagttcatatatatatatatatataatatacattatatattaaatatataatatatatatttttgagacggaggcttgctctgtcgcccaggctggagtgcagtggcgcgatctcgcctcactgcaagctctgcctcccgggttcacgccattctcctgcctcagcctcctgagtagctgggactacaggcgcccgccaccacgcccggctaattttttttgtatctttagtagagacggggtttcaccgtgttagccaggatggtctcgatctcctgacctcgtgatctgcccgcctcggtctcccaaagtgctgggattacatgtgtgagccaccgcgcctggccaaaagttcatattttttaaagactgacaagggtaggcggttctgggaagctgtccttcaactgacctgacccgaaggcaaacggccctccgcgaggaatgcacctaccacaaagcacccagaggacacccaagtcccaaggcttcacccaccttactcctagccactccactcctagatatttatttaagagaaatgaagacacaggtcccacaaacgcccacgaattttcatggaagcatttttcctaatggtcctaaactggaaacaaccaatggatacacaatttgtgatactattcaacgattaaacaaaccacatggtcgagtccaaagcatagagtgaaaacccctgagaccacatgctcattcataaattctagaaagcaccctgtttatttgaaattccggaaaaggcaaacctaacctacagcaatagtcatcgatgagatgcgggcgttaacttcaaaggggcagcaaggggaatttttggggcgatggaaatgttgttttgagtagttactcctgtggatgcctttgtcgaagctcatctcaaactatggactggcaagatgtgtacacttcattgtatgtaaattatacactaaacaaaaaagttgtagggaaaaaaaaaaaaaagcaaaacaagccctgagacttactgaagcgtttctttccaggaaagcctggaggaaggcagcgcttttcaactccccagcgcattgccggccctggagaccgaaggaggtgcctggaaccagggtgaagtccagcgcgcagggtcctcccgcgccggcctcgggcgctcgcagggggcgggtcgggacctgggattgcgccgggctcttcctgttcctgccgcgccctcttccccggcccggccgggcgggaccagtgcgcagccggggctggcgggcggcggggtccgcggggccgcaggagatgacggccggcggccaggccgaggccgagggcgctggcggggagcccggcgcggcgcggctgccctcgcgggtggcccggctgctgtcggcgctcttctacgggacctgctccttcctcatcgtgcttgtcaacaaggcgctgctgaccacctacgggtgaggcggggcccggggccggggggtctgcgggagtgcggggctgcccctgtcctccgtgcgcttcagcggcgcccgggacagggcgggtggggacagggaccctcgagtctcagctgggcacattggtcgagtttcccaggcgccctccagaactcgctcagctttctacactcaggccacaacctgagaaagtcgttctcttcctgagcgcgcctgccctgctgcgaggcgccctgtcctaggtgggctggtagagctcagacagattctttcatacacccagcgagctgaaaacagggattcaaatgcctgcttcaaaggacgcaattccttacacagatctccatgttcaacggtcaggtactcctgagccagtaagtctgtattgattgactgttcattctcagatgaccagcgtgttcatggaaaactcgggaaaacaattggaagttcatatggagtacttttttggattagtgtgaagtaaacgcaaatttgtgctgccttgaacctatttgtaaggactagaaaatcctgcttaattctgctaccattgtagcggcactgagaaaattgtggatttagacccagctccaccggttaacacctgtctttttggaccagtctcacagtcagcaatttttttcagatgcaaaaaacctgaatgattacaatcgtgttaattaccctccagggctctgcacgagctgttatatgtgaaggctctttgtaaactctactatgttacaagaatatgccatcaacattttagagcccaaagagacctagagtgtcttagttagagagtatcttagagtatcagctttctttttttatatatacatacagattcagcttat

SEQ ID NO: 12315 - DNA, 6000 bp, Homo sapiens
gtggatgaatagacagatggatgatgggtgggtgggtggatggaagggtagaagggtgaatgggtagatggatggatggatgaatgatgggtgggtgggtggatggatgggtagatagatggatggatgatgggtgggtgggtggatggatggatagatgtgtgggtagatggatggatgatgggtgggtaaatgggtggatggacagatgatgaatgagtaaacgaacaaactaaccactgagtttgaaaatatcttagatagaaatataggctcacaatatttggtgggaaacattcaacaaccaaacaccttcttaaaatgcaccccttctactcaattacctcagaaatgaagcactgtgaaaatagatagattctgaagtcacacaaccctaagtacctggctctgtgtgaccttgtgcaagtgatttagctaccctaagtcaaagtttctataaaactgggcaatgttagggtgccacctctgagggaaaagcccaatgaaacaatattccaagggcatccatgggtggcagtcattattttgatgaatttactgtggacagggcctgactctcagtctaaccgtaatatacttcatttcatcagtatacggggagggaagccatttcccagattcagacccagaaaggctgatacataaactagaacgctaatttattaatttatcaggggaaattatttggagactcaaagtaactagcacattttctccctgtttgcaactataatggggaagtaaaaccacaatcagaaagttctcaaggtcaggcaaagagacttgggcaacatcttgcatgtagtgatgagacagtcattgggaaacacttgaaataaagtccttggtggtcactgacaagatttgtctctgtcttcttgaatgagtttatacatctttacttttttctactatatattaatgcttgagggggtatcttattttccttgctcccaatttttgagggaaaggcttaccacagcccctgaaatattaacaataaagagagacggtctctttctgttgcccaggctggagtgaagtggtgcaatcatagctcactggagcctcaaactcccgggctcaagctatccttccaccccagcctcccaaatacctgggactacaggtatgcaccactatgcccagctaatttttaagttttttctgtagagacggtctcactgcattgcccaggatgcctagcctggtctcaaactcctggcttcaggcactcctcctgccttggccttccccatcagtgtagtctgcacattagctgaagggtctctctgcccctcaggatctgggtcagatggcttaactccccaatctcatagcctgtgaaagtccaaagcctattccagatttcagtgaatccttgggagatttgtgttctcatggcttccttttcctcccttgtggtctctgctcagcattatgtcaatccagagatgaatcatagcttcctcagcagtttctaccaaaataaaaaacaaaaaaaaaatgccacttgcacaaaacatttatgaataaacttttctaaagaactcaggaaggccaggtgcagtgattcacacctgtaatcccagcactttgggaggctgatgtgggaggatcgcttgaagccaagggtttgagaccaatctgagcaacctggataacatagtgagatgctgtttttaccagaaaaaaaattaaaattaaaattaactgggtgcagtggtgcatgcctgtagccccaattacttgggaggctggagcaggaggattggctgagcccgggaatttgaggttctagtgagctttgatcgcaacactgcactccagcctgagcaacagaagcaagaccctgtctaaaaaaaaaaaagaaagaaaagaaaaaaagaaagaaaaagaaattaagaactgaggagcaaagggaggtcacactaaggattcacatgtacatgatacagtaagatgtttaaaatccacactagacattcttattcttcaaaagttccttcagaccaccctgacgccaagagttctagtcctgacccttctcaccaatacctgctgatcttacttcctccctgaacttctttcccctctcttctccctccttggttctctctctcacccttccctctcgttgactcaagcataaaggttccgccccctctctggaacctcctccacagctggaatcctcagacctgagaatttcactctctaacactgaccaaaggtgtttttcaaagactgttcctttctaagatgaatttaggggctatgaattttgttaagaaaacaaaagtattccttgcctgagtgtaaagtgcctgggatataggttcaacagataatctatccactctcttgttcctatttatgcaatacattgttgatcaacaataatcacaacatgattgtgttgtttctactcctctccacattccaatgtgggttaagaggacatcctcaaataaaaatttctggcaactgtattttccccatagctgtaggcttgcaaagactgtctgatgccaaatactagtttcctgatttactggccttgtgatcttgtgcaaatttcctaacctctctggtttcagtatctcagtctgtaaaaatggggtgatagatcagctcacagacttctcgggaggattaaattcattcacgtaaaatgcttagtacataataagggctcaaaaaatattagttgctactgttttttttcttagttcctttcttctggaatagtgtgattttatcaatctaaacatcagagatttagtacttgcactttaatgaagccaaccttgcactggagactagattctatcttgaagtggcaaggtcagggctctacttgctggtagcctgggctgcagaggatgaccaggtgctagctcacctggggcctgcattcagagatggagcaagaagtggggacatgatgagaatataatccaacccacagtagcctaaactgggagagacactgactaccctgagtcttgttcatttccaggccagagaactcagaagcctgggggttcctagggctgactagcatcctaataacccagctcctactagatctgttctagatctgatgtgactctctcagagacccttcaaatgtccctggtttcccaagacaatgggaagaactgaaataccacagaccctcccagagatgacaagggctgccccctacagtctagagccctagaatgcacagactccttgatcaagtggccagagtggtccatctgggtcaggttgttctcatggccatatttgattgtggaataccacctggccccataacctactcattcactggagtctccacccctcataggatcaaggtgtttggactgtttgctgtagcctctggaaaaattaagaatggagtgggagagccaggcttgggttgggtgaaacatgtatctcccaaggtgaccctaggtgagggggaggaagaaggaaatgggctgctgggccagatccatggggcacatcttgaagggcaagactaggtgtgtctttctctttgcagaaggcagagtcgtctgggcctagacacgaggaggctgggccatgctggaggttgagggtggcaggggaggagattatagcccacctaaacactaccaaaagagcacatagatacactaaatcatttggaatccagtccctactccctacatgagtatattatccatgtggcattttaagctctccctgcatacctgcgtctccctttcatgtctttgggttcctgatcatccacgctgccagagctatagtggattgtgggtagagggacaggaaggctgtgtgctttgagtctccatccctggggctgaccatggaacaggtcatgctctgtggtacattttggcccctgcaccatccatcaccctggttttctttgcagaagtatgtacctaaacaagaagcgaggccacctgggaagtggaggtctcagcccagcccaggggagtgagcccacagacagaagaagagtgactactaacaagcagaaagggacctgggcacttgattcagatgaggaccctggtgactctgccccttccagtgggctcaagcccctgcccaagagtccagttttatcatctagggggacatctagggctggcaggatcttgccgtctctcccttggccctggggtttggggcaggagccttctagacaaggcccaggcactaggcccaccaatgcaggtgtaccaaacaggactcttctctaagaggcctttggcttggagaagagcctggacctggcggctcccaagtttttacttctctcaaagtgctacccagctgcctatagcacatgggcccctgttgcattaaatctataaataaaacttcacaccccaatacttatcctaggcagaatcctaggcgtcccacccctcgcgcaaacctgccttcctgggatgggagaatttggaaacgctccctgagccagtcctggggagcttccttccagcccctgccccggtggtggggggtccgcagagatccgcgggaggtccgggcacgcacgcctggctgtggggaaattcggccccgtcaggcggccgcgctcacaggagcagcgtgacccgtcggccccgggggtgctggcgccaggagccagcactcgcggtgcgctcccccgcgcctggcttccctggactgtcgccagtcctactctgcctgaggtggcgagggcagggtggagcgcggccttttctggcctgaggaggagtcactcgggaggtcactcggctgctgggcgggctgctgtcacaggcgctgcgtgccctggctctgctcgccactggccggcgcgctcccggcgcacggagcacactcgcgctcccggcgcacggagcacactcgcgctccgggactgaaacctgagcagccgtagcagccgaatttgggagcatatccttgtcactgcagccagaaagcccttcgatccccatcagagaggtcacatgagccccgaggtcacctgcccgcggaggggccacctgcctcgcttccacccgaggacctgggttgagcccgtggtggcctcgtcccaggtggctgcctccctctacgatgcggggctactcctcgtggtgaaggcgtcctacggaaccggaggctcctccaaccacagtgccagcccatcgccccggggggctctagaggaccaacagcagagagccatctccaatttctacattatctacaaccttgtggtgggcctgtcccccctgctgtccgcctacgggctgggatggctcagcgaccgctaccaccgaaagatctccatctgcatgtcgctgctgggcttcctgctctcccgcctcgggctgctgctcaaggtgctgctggactggccagtggaggtgctgtacggggcggcggcgctgaacgggctattcggcggcttctccgccttctggtccggggtcatggcgctgggatcgctgggctcctccgagggccgccgctctgtgcgcctcatcctcattgacctgatgctgggcttggcggggttctgcgggagcatggcttccgggcatctcttcaagcagatggctgggcactctgggcagggcctgatactgacggcctgcagcgtgagctgtgcctcgtttgccctgctctacagccttttggtgctaaaggtccctgagtcggtggccaaacccagccaggagctccccgccgtggataccgtgtctggcacggttggcacataccgcactctggatcctgatcagttggaccaacagtatgcagtggggcaccctccatctcctggaaaagcaaaaccccataaaaccaccattgccttgctctttgtgggtgctatcatatatgacctggcggtggtgggcacagtggacgtgatccctctttttgtgctgagggagcctctcggttggaaccaagtgcaggtgggctatg

SEQ ID NO: 12316 - DNA, 6000 bp, Homo sapiens
gctctttgtcaagttaaggaggttctcttctattcctacttttctgagagttgttttcctgaatgcgtgatgaatttagtcaaatactttttctgcattgatcgatatgatcatgtaatttttcttcttaacatattaatatggttgatttttgagtattgtaccaggtttccatccctggaataaactgcttttggtcatggtgtagaattaattttatatattattatttgctaatattttgtaaaggatttctgtatctatattcatgaggtatattgttctgcagctttcctttttgtgttgtcaggttttggttgggagatattctctcatcttctgagattatgcagagttggtgttatttattttttaaatggttggtagaattttctaatgaaaccatatggacatgaagaattatttttggaagcttttaaaattaaaatgttaactttaattgtcatagagctattaaagttatctatcttatattggcattgtgttttttgagaaattggttcatttcacctatgttgtcaaatatatgtgggaaggtctcttcgtagtattcccttattatcctttgatgtctgcagggtctgtagtgatagtctctgttttgttccagatgttggttatttgtgtctttctttctttttttgtttgtcagtctttctagaactgcctcaattttattaatttttccagagaactagcccttgtttcattgtttttctctgttgtttttctgctttcgattttttctgctttctgcttttgatttattaattgctgctcttatctttgttatttcttttcttcttgctttgggtttattttgctcttctttttctaggttcttgaagtgggagcttagatagttgattttggacttctcttttctaatatatgcatttaatgcctctcagcactgatttagctgtgtctcacaaattttgatatgtttttgtttgtttgtttttgaggtagagtctcgctctgtatcccaggctggagtgcagtggcactatcttggctcactgcaacctccacctcctgggttgaagtaattctcctgcttcagccccctaagtagctgggattacaggtatacgccaccatgcccagcaatttatttatttatttatttttgtatttttagtagagatgaggttttgtcatgctgtccaggctggtctcgaactcctgacctcaagtgatctgcccacgtggggctccaaagcactgagattataggcataagccactgtgcccagcctgtttttgttttttttgagatggagtcttgctctgtcacccaggctggagtgcagtggcatgatagcccactgcaacctccgcctcccgggttcaagtgattctcctgcctcagcctcccgattagctgggattacaggcgtgcaccaccacactcagctagtttttgcatttttggtagagatgggttttcgccatgttggccaggctggtctcgaattcctgatcgcaagtgatccacccgcctgggcctcccaaagtgctggaattataggcacaagccaccacgcccagctgatatgttgtattttcattttcatccagcctagtatatttttaaatttaccttcaggcttcctctttgacctgtggattattcacaggtgtgttgtttccaagcctctgaagaaagattttccattatctttctggcattgatttatagttagattccatgtggtcagagactaccctctatatcatttaaatttttaaaaatttcttgaggctcattttctcatccaggatatggtctatcttggtatatattctggtgcacttgaaaagaatgtgtgtagtgctgttgccaggtggtgtgttctacaaatgtcaattcgattatgttaattgatgggtggccgagttctttgatgtccctgctggttttctgtctagttgctctgagagaagggtattgaagtctccaactataattgtggctttttaaatttctcctttcagttctgttttgcttcacatattgtgcagctaatgtttggtgcacacacgtttaggattactatgtcttctttgcagaatggcccacttattattgtataatttccctctctgttaattagtctttgttctaaagtctattttacctgttattgaaataatgcttctgctttcttttgattaatgtttatatatcttttttcatgtttttactttcaacctgtctctattgttacatttgaagtaagtttcttgtagacggcatatagttgtataatggcttttaattcactttgccaatcactgtcatttaatatttaaaccatttacatttaatataattattaacatgctagagtttgtattatttttatagggttgctataacaaaatactaccaactgggtggcttagaacaaaaatttattttctcacattctggtggccagaagtctgagatcaagtgagatttggaaggtagaaaaaccaacaaaatatgttaatgatgttaccattgtgggcaactgggactcagtccttctgaggaccatctgagaaatagggtggaaccatatttgattgttccacttagaaggaagagtccagaccatttatcccatcagttactatccctacagactgaggatgctgattcacttgcacatctgggtttcatcggtgtcaggggaagcacagaagaaaaggtgcaggcacttaaggtgggaagctgtgaatacgtccgtgcaccaggaacgatctacaactgtggcaggtgggccgagagcgtgggtcaccagtgccttcagccaccccttgcactgcactgacccactcacacagcaaatcaagtccattttgtaactgatgcttcagcatggtggccagccaccgtctctgaaataattaaaataggtggttggtggcacaggcgatggtccctactgtgcagttggtcttgcagccttaactgagattcatcgtaagctcccactctgctccttcttggcgtgcctcagtcccagccagcacatgctctggtctaggtgcttgtttggtggtgccatctaaaccttcttatgcccaggtgtcgagtaaagcccagacactgtccacttcagtgaagcacctaggaattagcagccctgaaaagctgtgatcactgtgagattcaaagaaaagggtcgtgagggaagtggtgagagagaaagttgtgtggtagcggcagcccaacaggagccaccatcagaaggaacacagccatccagagaagtgccccaggccacaaagcactgggggccagagatctcacccctcatgtctgccatgggttgacccccaacctccagccctaccatctcctgacggtgtctgcaccagttgaacccaaccagtatctaaaaggacacagttggcgaatgagactgggacacagggcaagatgggtggatgatgggagactcctggagagcacccgtcgcactgagcgtggacctcatgggagagccctgttctctgaagcatctgtgcatgtcgttccagcattttcttcaaggattgagccagcagcaccagtgttgtaaggtgcttagatcaatgattcacaaacaaccaatgaaatacgaggtgcctggggtacagtcaacaaacacagagaacagagaaaccttcccgttgatgtagagactccagcctgtttgctcatctctggtcctgaagagcccaggccccattctttcctgcccggggggatgagggtggggggtttctgctcggcagcacttgccgtgggaggggtgagggactgggtcacaccagcccgttcgttacagccccagggtttattagagtgtgcattagtattattgagtaagtacttgagagtgtctgatcttgggccagagaggcacaaagatgccattgtgtgggtccagcacctgcctgcagagcgtgggtcagccttgggtcccagggaagatgacacacacctgggaaatgcagggtccgggagggagaaggcaaagttctggctcaggttggctggggatgaggccagcagagccaggtgcccaagggacctcagccacgaactctgagcacaggctggcaggtgactcttggtgcctcatgcgacttgtttatctaaagggatgagattcaaggcctgtcctgggggctgggggccgtcaaagctgacgagagaggggaatgtatattctaacagggagatggtcgatgaatacgtgcaggaagaaatggacaggacaatccagagagatcgcgtgttctgaggacagcacagccaggctccggtacggagtgaagcggggtcggggaggcggcggggtccctcatatggcccgaggaggccgtatataaactgaccctgagccacacaatagtgccctcctctgcccctaggaagctcgagtgcagggtccaggtggggaaaatcaatgcagagtgggtcccagagtgggcggaagcttgggctctagggcgtgcgggactcagctggcagcagccccacgtctctctggttctaaagcccagtccatttctgctcagcagggagatggccagttccccagaggacttgcccagggtcccagccgtggccctgggagggtgcaggggttggtgagggagtatcccgaggctgtgggccctgcctctgtggcttggggtgcagatggacaccaccctgccctgtcctctcgagtcctctgggctcatctgagtgggcgcgttcgggtggtgcaaactctggatggcatcgtgtgtcttttcttctctggctggcactgacttgctgttcaccagatgccagcaatgaggacactccccctcccggatgcaggactggttgccaccatggggaggggtgcaccgtgccacgtgctcccaggacactggccagggggctataaagaacatctcgagaggagccagcacagccttgttcagacgcccagtgacctgccgaggtcggcagcacagagctctggagatgaagaccctgttcctgggtgtcacgctcggcctggccgctgccctgtccttcaccctggaggaggaggatgtgagctgggttggcgtgggcggatggaggagccaggcggactcctgggcagggggcagtgccaggggccctgctttaggaggtgtcactgaaggctggcttctgaccccgtgctcccagcctggggtggtggtggaggggtcctattgttcctccagcagacacggccccccgaggcccagggccggagcaggctcgtctcaggggttcctgctgcactgacgcctgaagcccgaaggtctcgcagggttgggccctgtggagggagggctcacctggtgctggggcccgggggtccatggggtgcagacatgccctccttccactgggggctgggagccctgagcagggggctggctctaactcactccagctgagctctaactaaggtgcaggaacacagcctgcctttaagggcagcagccgggcaccatgggtgtctggttatagctgcaggcctgagtgccagggtcagagtagaatctgggccacccatggtgggctcacggccttggcctgctccagatcacagggacctggtacgtgaaggccatggtggtcgataaggactttccggaggacaggaggcccaggaaggtgtccccagtgaaggtgacagccctgggcggtgggaagttggaagccacgttcaccttcatgtgagtgttgcccactgcagggcccctcaggccactttcgctcccctccccagatccacctggtgcccattgccccatccacgtttcgggtgttgggaagagtcaccccctgccttggagggaaacagcctgggcatcctgaagctcggtggggtggggggcagtggaattttcaggttgccgggtcagggccatgcaccaggtgagctgaggatgggccatgggtgtcctgggagccgctgc

SEQ ID NO: 12317 - DNA, 6000 bp, Homo sapiens
ccttgtggcctcaggcaggcgcacccgaccacatgcatggctggtggcggcgtgcaggggtcgggtgggccaggctgtggggcggccgtgctacacaggggacacctacagggcagccgggctgtgggggtagccgtgctggggcaggagtcggtgcccgcctcccttcacagaagagtggcctgctgggtggcgtggtgggtgtctaccccctggcaggctggcgacagagcccaggcctgaaccactgagccaggtacggggcccagagagaagaacctgccctcctcaccagcgtgccttccccctgcacctgcgcctgcagggtatgggcaggggccccactgcaccccccgggccaggcctggcctcagggcgagctgggaccaaggggctccaggctgaggtggcagctcccacgtggctttcctagttcttcttgctgttcctcccgcatggactcagcctcagtttccttccttggcaaacaccattgcacctttgctgggttttgctcactctggggactgaccacttagggagcgccggccccttcccccgagtcgcaggcaaacccccaccccgccccatccttcccctgagtcgcaggcgaacccccaccccaccccatccttcccctgagtcacgggcgaacccccaccccgccccatccttcccctgagttgcgggcgaacccccaccccgccccatccttcccctgagtcacgggcgaacccccaccccaccccatctttcccccgagtcgcgggcgaacctcccgtctgtcgagtctcctgttgtgtcctcagcagcattcagcgttcctggtggagatctggcactgaggatctctcaggaagtgaatgggagtgtccgcccctctcaggactcccacgccgtccactctccgagaacaggtttccgggcatcggggcatctggcagaagatggaagctctggcctcactgctggctggcctggcctggactcctgagctccgtctcctctcaccgggccccggggtcttgaccctgagtgggtgacaggccccttcttttccaggctgggagggtgtgaccagagtgtcatggacctgataaagcgaaactccggatgggtgtttgagaatccctgtgagtctgacggccacggcctcacccaggccgttcttccctgcagcatccccaggccccctgcgggcagggacggagggctgactccgctcccgagagccaggaggctacaggttctggtcttgggattgctgcccatcctgagggtgaagagaagcccctggacagaggattggaaccttgttcccagcaggctcagacaccagtgaggtccagccaaggtccccataggtgcagagggcgaggggcctgtttagtggctgtctacaggtacagggctgggctggtgtgacccagccgctcctcgttcacacctgggacaggctggggcagtgcttgtctgtctgtccgtcagtgtctgaaagccccttgatgctggcaccaggtggggtcgggggtgggggacaaagcttgggggctctgggtgtgcttggaggggtctcctggggaggggggctctcacttgaattggcccctctgtccctgtggccagcatcagctcagcggcccctggatggatacagcagctgccctcccctgaggcggggggttttgtttcctagcaataggcgtgctggagctctgggtgctggccaccaacttcagagactatgccatcatcttcactcagctggagttcggggacgagcccttcaacaccgtggagctgtacagtaagtgtgctgtgcggggcccacgtagggagctgtgtggtgcgtgggccactcggggcccacgttgggagctgtgtggtgcgtgggccgcttgggggccgcgtggggagctgtgtggtgagtgggccgctcgggggccatgtggggagctgtgtggtgagtgggccgcttggggccacatggggagctgtgtggtgagtgggccgctcgggggccatgtggggagctgtgtggtgggtgggccgcacaggaccacatgcaggccaagttcccccaccttgaggctcgctgcactggaggtggctttggaaggaccggggccagcatcccagggcaggtggcctccttcctgacccttcccagcccctccccggcccctccccagctctcagaggttgcttccccctgcactgccctggtgcccccaggtctgacggagacagccagccaggaggccatggggctcttcaccaagtggagcaggagcctgggcttcctgtcacagtagcaggcccagctgcagaaggaccgtgagtgtccaccggagcagcctcgggggaggcttggggcaagttctggagcccacagggcgtgatggggtgacagagaccctggggttgattctggcttctgcctgactcagtcgccctgaaggagtcaggcaggctgagggggtcttcacctgcccctgcccaaagtcaggcctgggggtcttgtccccacggcaggcgagtcttgtgggtggggccctggggtgctggggggctcagtcctttttcacagccagtcttgcctccccttctagtcacctgtgctcacaagatccttctggtaagccgccatcctgagcctcaccctgggctctcttgggggaagggggtgggggaggccaccctacgcacagtgggtgggaggaccctctgcccaagcccacggggttcatggctccactgtctctaaggcagctgagggtgtggaggagcctccatggtgggctgggccccctcacactcctcttggttttcagtgagtgctgcgtccccagtagggatggcgcccacagggtcctgtgacctcggccagtgtccacccacctcgctcagcggctcccggggcccagcaccagctcagaataaagcgattccacagcaaaccaaggatgcttttgactgggggccagccggggaattgcggggaggatggcgggggtcgtcaccaagggccaagccacagaaccatagagccagctgcaaagaagacgcgtgcccaacccagtcccttgccagagcccctctgggtcttcagacacccaaactcaggcccgggctcagaggcgggggctggtcagaggacacagcctgggaggaagccagcagtgagctccaccaggaccgcagctggggtgccagaggctccaaggactgcccaggacaagagagaggtggctggtggggctcagagcagcccctgactccccaggctcaggcttctctgggctggggttgtgtctcttgcctgggcaggggcagggaccccagacacctgagcctgcaggtcctcctgtgttctgatgggtgtggggggctgcgctgcctgccgtcctgggagaagcacaggccatgggggtctcggggctggatggggggctggggactgtgtgaggctcatgctggagtgaggcgaggtgcacacagatgccttgacctgcaaggctgggcatgcacacgcatgcacatgtgagcacacacccacacatgcacacacacacattcatgggcacgggcacacagccccggcccgcccttcggcacctgctcaggtgcttggtgccaggccctcaagaaggtggtgggggctgtgtgtgtggctgccgcgcagagctcaccatgtccacatctgccccagaagggccacgaccagccctttgcctgtcacctgggaggtctaggatgagggccagggcttaatgagtctcaggggcacacacagtgaccccaggccgggcactgagggcaggagggtcctggggcctcagaggggcctctgtctgccagggcagcccaggccagcagtgaccaccaggtggggcagtgccggcttccctggagtgtctgggggtggtccctgggcggggagagggtagcagagcccaaggccacacctgttgcctccctccgctccctcccctccctcctctcccgacacaggctggcggctccagagaggtttaaacactggccttggcggctgagggaggagggtgaagatgaggcaggggctgctggtgctggcgctggtgctggtgctggtgctagtgctggctgcagggtcccaggtgcaggagtggtaccccagggagtcccacgccctcaactggaacaaggtgagccatgtgccactggtccctgagccgggcgccggctctggagctggagcaggctcctgcacagtctcccggcagccgcccaggagcagggctaccagcagttccaggcacgggcgctgcccacctggcctctcccactgcagcctccagcacaggggccccgcaagttgcagggcaaaggcagggagcctcgagggggttcgggggcccaggggggtcagggagggccagggtggaggggcccagagagctgtggccgaggaggtcgggagacgcccagagtgcagagtgggtgtggagcaagcggggcatattctgtagcgggagggcccgggcacctgctgagtgagccgtgggagcagcactcattggcacggcggtgcccagggcgctagggttggcagcaggcagagttgggggccgggggccggcaggaagggaagtggccgagcagtacccagcccccaggaggccatgtgggaaggagccggggcctctgaggtagggggcctcccacctgctggcgcccacagcccagccctttgctgcctggggtccctgaccagccgggcacctgcttctctgcagccctgctccagtggccagggcttgagtggccgggaccgaggcggcacctgggcggagctgggactccggctcacagaagggtcatttgtctcctgggttctctagctgggaacctcgggggtggggacagcccccggtggcagctcctgtccccgcccacacatccgctgcgcagttttcagggttctggtacattctggccactgccactgatgcccagggattcttgccggccagggacaagaggaagctgggggcgtccgtggtaaaggtgaacaaagtgggccagctccgcgtgctcctcgccttcagacggtgagtgggcagcgccccccaggcaagggtctccccttccaggaggagggagctgcctcggggctggaaaggagtctgggaggagcctgtctgtctggaagttccacaagaaccgtccccccacttcctccccctaaactcagaggaagccacctgcagcccctgggaccccacatgggtgggtgttgggaggaagctgcctgcagaccttgggaccccacatgggtaggtgttgggaggaagccgcttgcagctcctgggccccacacgggtgggtgttgggagtttctctcgtgccgtgggacaggccccagtccgaattggaaaatcctcaaaccacagagcctcagattgacacgagttggatagtgaagcaaaaaactggggacctggggccccaaccttcccgggtcccacgggagcaggggcgggaccgagacgtgtgggtggggctcggtggctggcaggcgggaggaggggttccctggtctgcagcctgagcccccgccttggccccaggttgaaggggtgccagtcccaggaggtgatcctgaggaaagacgggaagaagccggtgtttgggaacgcctgtgcatacgcggcgggcccgagggaaggacaggagggaggtgtgcttgggctctgggccctggaggagctgcgtgatatgcctctgacccccctgtgccttgagcaggccccttgtccccgagagcacgtggcaggcaggcgtcaggctggctgtgttcccagagcccacacgtcatgtgctgggcggcctggcccgggaggggaggccccgggagggcactcagtccctctggacacctgcacctgggtgggggctctgaggcctcgggcaccaggggtcagggctgtgggcgggcacagccacgccatccgg

SEQ ID NO: 12318 - DNA, 6000 bp, Homo sapiens
ctcccgtgacaaaataccccagactgggcaccttaaacaacagaactgtatttcctcaccgttctggagggtggaagtccaagattaaggtgccggaaagtgcagtttctggtgagggcttcctgcccattcgcagaaggcagcccctcgctgtgtcctcacctggcagggagcgctctctgggtgcctctttttctcctaataaggacatcagcctgttaaattagggccactccctttgacctcacttaatctcgattgtctcctaagagtcccatctcctgaaacagtgaccatgggatctggggcttcaacgcaggaattttgggagggcagaattcatcccagaacaaaagtcagtgctgtttagagggtgacagtagatgcagggctgccgtcatcaacaacgtcctgcccaaaagtcactggacgtccaaagacacagaaaagtatgacctatgttaaaaaaaaaaagaaaaaaaaagttactaaaaactgacaccgagaagacccaaagttgtattcagaagataaaggtctaaaacagccattataagtagttaaaagaaaagcaagatatactctaaggaaagaaatagtgacacaatagcattaaaggactaactaattgataaagaattaaggagtgaatgtaggagatcagatcaggaaatcaagagagaaatggaaactataaaaaagaaaaaattatggaactgaaaagtacaataaatgaaaaatttactggaaagactaataggagttggccatggcaaaaataatgtccatgaatttgagcacaaatcaatgtaaattatccagtctgaggaacagagaagaaaatggttgatagcacctcaaagatatgtggggcaagataaagaatgtaaactagcctgagaaagagaagagagtgagaatacatgaagaaacagtggccaaaataacccaaacttgatggaaacatcaacttagcccagaggctcagagaaacccaggcaggatgaaaaagaaagcctcacaaaaatcacacctggggacattatagtcaaagcactgccaaccaatgatttggataaaaatttaaagggatctgtggattaaagacagggcacatccaggtttggtggctcacgtctgtaatcccagcactttgggaggctgaggcgggaagatcacttgaggtcagaagtttgagaccagcttaggcaacatagtgagactttgtctctctttaagaacaaacaaaaaagacagggcatgatatagtttggctctgtgtccccacccaaatctcatgtggcattattgcaatgcccaatgttggaggtagggcttggttggaggtgattggatcatggaggcagatttccccttgctggtcttgtgacagtgagtgagttctcaggagatctggttgtttaaaagtgtgtagcacttgccctttcattctctctcctgctggccatgtaaagatgtacctgcttccccttcaccttcagctatgattgaaagtttcctgaggcctccacagctgtgattcctgtaaagcctgtggaaccatgagtcaagtaaacttcttttcttcataaattacccagtctcaggtagttcttcatagcaatgtgagaatggactaatacagggcataaacagggggacacaatggctgtcttctcatgacaaatggaaaccaggagatgacaataggccatctttacattgatgaaaaaaaaatcaacgcagagctctttatctaggacaaatatccttcaaaactgagggtcaaataaacatacttttcaacaaatggaagttgagggaatttatctctagcacagcttcagtacaataaataaatgccaaggatgttccttaggcagagggaaatgactctggatggccactcaggtctgcaggaagaagatccgtgtgacaagtggggaccaagtgagcccactggaacctgcattccttgccctccatttggttacttaattatatcagcatggactcagcagttcctgttttcttccataggttacaatttatgacaatcatttctacccaatgggagtgccttcaaagtggcttcagagtgttgttggtacattccctgattccttgagcacatttttgctttttggcacaaaaaacattccaagttcctcttgcattttctgtacacaggtttgaataattcaccagagtcctggttccttttcatatagaatggtgtgtggagaaaccaagctctgagtgttgggtgtgcttttacttttactgggtccgattgtatctaaaccttctcaacacacagagcctggactttccttcctcctcttcctccctccttcttcttcccctctcctgcctccctctctctctctccttcttcccttcccctcccatttctccctccctctctccctccttcctctcctccctgccctccctccctcccttccctccttcctcccctcctccctctctccttccctccctgcctctccccatgtgtctaccaaaattggagttcacatggatatttccaattctaatcagacgccacagggttcactttgatctctcccctttctatatgtctatatttataattctcttttccaacacagagaaacccattatccttgatatatttactcatttggtcccttctagagcacacggaaagtagtatcagaattgctcacccaaaccactgttagtcatgaacctgcccatgagagcttaggatgtgtttacagctctttctgctgttagcttgagaatacagagaaaaactactgtgttcagaagttaccaggggcagtcctttccccttcagtgtggctgtcatttatctataatgcaactatatcccatgtttggaatttgtttattttacttttgagtataacagtataacataccaaattactttgattccaaagtcaaaactatacaaaaacgtttactcaaaaaagtctaacttcatccccccaccctgttccagctccccaccccagcagggaactagtctcattagactctgaggtttatcctttgtttttgtttgtttgtttgtttgtgtgtttgtttgttttttgagacggagtcttactcactctgtcacccaggctggagtgcagtggcgcaatctcggctcactgcaacctctgcctcccgggttcaagcgattctcctgcctccgcctcccgagtagctgggattacaggcttgcgccaccaccacgcccggctaatttttgtacttttactagagatggggtttcactaagttggccaggctggtctcgaactcctgacctcaggtgatctgcccgcctcggcctcccaaagtgctgggattataggcatgagccaccacacccggctgatgtagcgtgctgttttgtggctgcctcgagaaccaggctccccgcagcccttagggacactagtggggctggcaggtgtttccttctcagaggcctggcccagctgctcggcttcctcctttttgtatttttattttattttagagatggggtcttgctccatcacccaggctggagaggagtggcacgatcacagctcactgcagcctcaacctcctgggctcaagcaatcctcctacctcagcttcctgagtagctgggactacaggagcacgccaccatgtccagctaatttttaaacttgcttgtagagacgaagtcttgctatgtcgcccaggctggtctcaaactcctggactcaagtgatcctcccgcctcagcctcctgaagtgctgggattaccgcgagcagccacggctccctcctgaaggctccaggcctaagtgtcccgctcccttgttctgtggctcagcccctgggcaactcctgcttgccatggctgtggctggcacctccgtggccccactgcccggtcagtcttcgcaggcccagcccccagtagctgtgtggtttctgccttcctcctgcactctggtggtcacaggccctgctgcgtgggtacagggcaggtggccagggctgcagcataagctctgtgagtgcaggcggccctgggcactggagccttgttgcatggacgtgctccttgcacccttgttgatgaatgagcgaaggtgtgtgggagtgaatcccagagggtgcaggccacggcactgggggaggaccctcccggctgcctcccagtgggcttcaggggctcagatagaccctgccgagcacctctgtcctctgctcccggactggggctgcagagagctctcaaggggccttgggaggcacaagcaggccagggtcccagggaggggaggcaggaggcagcagggccggatggtgggctgcagaggtggaaggaacaggacagtctgttctgggggtgctggctgtgggggacagaggccaggccacaaagcagaatggtgggtgggccaggaggaggtgggagcctttttcaaaaggctttcagggactttttatatttaatgattgaaacaaaagatatccaaaaccgcagttcctgagaaccacttgttctcgccctggttcctctccttgggcttgaccttggcctcctgccgggcctggcagcggacagcagtctccctgcttcccaggctgggcgagggagagcgtgggtccccaggaacgggggaggtggtgcggctggctttaggatgcccattctggaaccttctggtggaagaaagcaggggatcagtatagtatggttgatccacacactccagaccctctcctggctgtgcagctggtctgatctgggctcagaggctgccactgctcagtgctcccctgggtaattttgcaggaggccaggagggttcctggcagttagtgccacccacacggagaaattcagagccatataaacgggtctccagggcctggagggactgcacatcctgggcctgcggcgcagtgtagacctgggaggatgggcggcctgctgctggctgcttttctggctttggtctcggtgcccagggcccaggccgtgtggttgggaagactggaccctgagcaggtacagtcctcctgggggtggggagagctggtcctcgggggccagcccctcctttaaggccacacagcttctgggccccccagggctagcccagaccagcatgagcagtggggaattagttgggccagcccttggggagtcccacaggcaggagcctcagggcaggaggggtggatgctggagggttggaggctggagggctggagaattggaggctggagactggaggttgcagggctggagggtgtagggttggagaactggaggctggagggctggaggctgtagggctggagaactggaggctggaggctgctgggctggaggctggagggctgtagaactggaggctggagggctggaggctggagggctgcagaactggaggctggagggctggagagctggagactagaggctgcagggctgcaggctggaggttggaaggctggagggctggagcctagaggctgtagggctggaaggctggaggctggagggttggaggtctggggggttggaagctggaggctggagggctggagaactgaaggctagaggctgcaaggctggaaggttggaggctggagggcgggagggttggagactggaggctggagggctggatggttggagggtggaggctggaggctgcagggctggaaggctggaggctggagggttggaggctggaggctggagggctggatggttggagggtggaggctgaggctggaggtttggaggctggaggctgaggctggagggttggaggctggaggctggaggctggagggctggcggccctaacgggagccgcctcaatgcagcttcttgggccctggtacgtgcttgcggtggcctcccgggaaaagggctttgccatggagaaggacatgaagaacgtcgtgggggtggtggtgaccctcactccagaaaa

SEQ ID NO: 12319 - DNA, 6000 bp, Homo sapiens
tttcattaggcatattaatgcaaattccttagttaaaacaagaatgactctctaaaggctatatttcagatacatcacatgcttctttcctcttgtcccctcaacagtaagcaagaagagtatttttgtacaagagagaggcctctgcctgaagctcccttaatctgtcagatcacagatcaaaagctatcacacactgcccaagggaccctaaagggagccactctcagaaaataaatccaaacctccttttttctggccactgaaacgttcaataattagttcattatctacatcattcacatgtttaatatttattgactttggaattattgattactttgctgagtatcttatgaatttaatctatattaatattaaggtgatgtatcaaattgcattccagagtgtggatttgactctagtgccataatcagtctcctgggacaaacagctgtttctcttccctcattatagaaaaaaattgcccttggcaaatgtcaaagaacatccttttatcaatctctcttaccaatcaatccaagcaaatgcagtgggatttcttttccccagagttgaagtcacctcctgacaggaagttaagtctttaggcactgaatcatagcactgagctgaagcccaggactaagcaagaatgagtgagaatttggagacttaaggtttggtcatctgtagaggattgggttttgtcttgttttgtttttgttttggtgtcctgcaaggtttctcactgcccttcatcaggtaatatgccctgtccctgaactggccaattgtgttaccccattcccttagcaacagtgattgctactgaagaaacaggaggccaacaaagaatatcactcattcaccagtagagtgtctatgtcagagatattagataaacaggaaaactaacaattacattgcaggctgtggaaacagagagaggtacctaaggcacacctgtgggaatatgaaagtttggtttcataaaaggattctggaggaagtcacctctgacatttgagttgagtcctacaggatatgaagaaagtagccccatgttccggttactatggctgtgtaataaattacctaaaacatactggattaaagctatgaaaacatcttttctgcccagagattctgtgggcctgaaattcacatggaacacataaggcataccttgtttctgctccatgatgtctaaggattcagctggaagactgggaggctgggggctggaatttatctgaagaatgactcatttacatgtctactggttgaccctggctgttggctgagggggcctcagctctctctacattgtttctctactttggctagtttggatttcctcaaaacatgatggctggtcctcagtgtcagcatcccaaaaagagaatgccggacacagtggctcacacctgtaacctcagcaatttgggaggctgaggtgggaggttgcttgagttcaggagttcaagaccagcctgggcaacatagtgagactctgtctctaccaaaaatttttaaaattttaaaaatcagccaggtgtggttatgcacacctatagtcccagttacttaggaggctgaggcaggaggatcacttgattccaggaggtcaaggctgctgtgagctatgaccacaccactgcatttcagcctgggtaacagaatgagactctgtttcaaacaaacaaaaacccaaaaaaaaaaaaaagagagagagagggagttagaaggaagatgcatcatttttatgacctggacttggaagtcaccaagcagcacttctgcagtaccctgttggttggaatagttgtagcccaaacccgaattcgaagggaggagaatagataacatccctgggtgacaggaatgtcaaagtcccaaacagcatatgacatgtgacaaatattggtgtggccttctttggaagatccaatcttccataccaggcaaagggatggaagactaaggaacaacatgagggatagccagagagggaaaaagcatcacttgttctaggaactacaaatagcttgaagaagcaaagatgtctagatgcctcccaatatgcagagtggggtgtacagaagagagtggtaagggcgctgggagagctaaggtgggcaagagagcttcctctgtcatgctaagaaagttggaatttatcttgatggtggtgaaagcagagggctatggttagattcacatttgagatttagatttttagatttaaaatgatcaccctggtgacactggcttaactcacaattttgcccaaggcctatgctaccacagtgcttctgaaactttaaagcacattagaatcacctggaggtcttgttaaaccatggattgctgggccttgaaaccccagagattctgattcagtagatcgagaatagggcctgagaatttgtatttctaacaagtttccaggtgatgctgaggctgctggcccagcgaccacatttgataatcatagccctctgataaatcctatcaaaatatcctaatggcagagcaagggaattctggtgatatcctcccctacccataacctgacagctattaggatctgcctacttgaggctaaaagcaaccaagagaggaacagctacagtgtaccacagagtccctcaacatctttgcccacgccacggtgccccagcttcttaccaagtgtgcctgattcctcttgactacctccaaggaagtggagaaagacaagttcttgcgaagccttcgtcttctctgatatgctattctatgtctatttctttggccaaaaagatggggcaatgatatcaactttgcagggagctggagcatttgctagtgacctttctatgccagaacttgctaagcatgctagctaataatgatgtagcacagggtgcggtggctcacgcctgtaatctcagcactttgggcggccgaggcgggcggatcacctgaggtcaggagttcgagaccagcctggccaacatgatgaaaccccatctctactaaaaatacaaaaattagccaggcgtggtggtgggcacctgcaatcccagctactctggaggctgagacagaatctcttgaacccaggaggtggagattgcagtgagcagagatggcaccactgcattccagcctgggcaacaaagcaagactctgtctcaaataataataataataataactaatgatgcagctttctctctctgagtatataatgcagttctgatgatgtgaggaagggcctcactgttggtgtggcagagtctgagaccatggctggcaatgaaaacactaccctttgatgcctatgggctctccctttatggtttcaaggagggcttctcaatcttggcagaattttggactggatagttctttgttgcacaggtggggggctgtcctgcacatcacaggatgtttcatccctggcctctacctactagatgccagtagaacatacccaccccacagctgcctgttgtgacaatcaaaagcatctccagatactttgcagggggaaaatgatttctccaggcctggcatatacataacagtatttaagcagctgcctagaattaattaaacacagaaggatgtctctcatccagaatgccctggaccacctctttgataggcaatcagatcccacctcctccaccctatttttgaaggccctgtgccaacaccacttcttccatgaatacttccttgattcccccatccctagctctatataaatctcccactcaacactcacacctgttagtttacattcctcttgacacttgtcatttagcatcctaagtatgtaaacatgtctctcttcacgattcacaaagtggctttggaagaactttagtaccttcccatcttctctgccatggaaagtgtacacaactgacattttctttttttttaagacagtatcttgctatgatggccgggctggaatgctgtggctattcacaggcacaatcatagctcactgcagccttgagctcccaggctcaagtgatcctcccgcctcagcctcctgagtagctgagatcacaggcatgcactaccacactcggctcacatttgacatcctctaaagcatatataaaatgtgaagaaaactttcacaatttgcatccctttgtaatatgtaacagaaataaaattctcttttaaaatctatcaacaataggcaaggcacggtggctcacgcctgtcgtctcagcactttgtgaggcccaggcgggcagatcgtttgagcctagaagttcaagaccaccctgggcaacatagcgaaaccccctttctacaaaaaatacaaaaactagctgggtgtggtggtgcacacctgtagtcccagctacttggaaggctgaaatgggaagactgcttgagcccgggagggagaagttgcagtaagccaggaccacaccactgcactccagcctgggcaacagagtgagactctgtctcaaacaaacaaataaatgaggcgggtggatcacgaggtcagtagatcgagaccatcctggctaacacggtgaaacccgtctctactaaaaaaaaaaaaaaatacaaaaaattagccaggcatggtggcgggcgcctgtagtcccagttactcgggaggctgaggcaggagaatggcgtgaaaccgggaggcagagcttgcagtgagccgagatcgcaccactgccctccagcctgggcgacagagcgagactccgtctcaatcaatcaatcaatcaataaaatctattaacaatatttattgtgcacttaacaggaacatgccctgtccaaaaaaaactttacagggcttaactcattttatccttaccacaatcctatgaagtaggaacttttataaaacgcattttataaacaaggcacagagaggttaattaacttgccctctggtcacacagctaggaagtgggcagagtacagatttacacaaggcatccgtctcctggccccacatacccaactgctgtaaacccataccggcggccaagcagcctcaatttgtgcatgcacccacttcccagcaagacagcagctcccaagttcctcctgtttagaattttagaagcggcgggccaccaggctgcagtctcccttgggtcaggggtcctggttgcactccgtgctttgcacaaagcaggctctccatttttgttaaatgcacgaatagtgctaagctgggaagttcttcctgaggtctaacctctagctgctcccccacagaagagtgcctgcggccagtggccaccaggggtcgccgcagcacccagcgctggagggcggagcgggcggcagacccggagcagcatgtggactctcgggcgccgcgcagtagccggcctcctggcgtcacccagcccagcccaggcccagaccctcacccgggtcccgcggccggcagagttggccccactctgcggccgccgtggcctgcgcaccgacatcgatgcgacctgcacgccccgccgcgcagtaagtatccgcgccgggaacagccgcgggccgcacgccgcgggccgcacgccgcacgcctgcgcagggaggcgccgcgcacgccggggtcgctccgggtacgcgcgctggactagctcaccccgctccttctcagggcggcccggcggaagcggccttgcaactcccttctctggttctcccggttgcatttacactggcttctgctttccgaaggaaaaggggacattttgtcctgcggtgcgactgcgggtcaaggcacgggcgaaggcagggcaggctggtggaggggaccggttccgaggggtgtgcggctgtctccatgcttgtcacttctctgcgataacttgtttcagtaatattaatagatggtatctgctagtatatacatacacataatgtgtgtgtctgtgtgtatctgtatatagcgtgtgtgttgtgtgtgtgtgtttgcgcgcacgggcgcgcgcacacctaata

SEQ ID NO: 12320 - DNA, 6000 bp, Homo sapiens
gacgaggtttcgctatgttggccaggctggcctcgaacacctgacctcagtttatccaccctcctcggcctcccaaagtgctgggattacaggcatgaaccaccgtccccagcctgcctagaatcttctattctcctgccactgccctgtattattcttgtgtcaacatggggtccagatatctaaattcttgtgagcagtgagtacattgtaagctagttacatgtgttaactgatttaatcctcacaataacattattatactattattagcttcattttttttttttttgagacagggtctcactttgtcacccaggctagagtacaatggcgtgatcacagctcactgcagccctcaactcctaggctcaagcaatccttctgcctcagcctctggagtacctgggaccacaggcatgtgccaccatgcctggctaattttttgaattttttgtagagaagaggtctcactatgttgcccaggctggtcttaaacttctgggctcaagctatccacccaccttggccggctaacttcatttttaacatacgaggagttgaacccacagagtggttccatttgctaaattacagggctagggatttgaactcgggccacctggctttcttacccaaggtagtgagaggctccacctaccttagttctagctgagctggggtgtgtgaagaacacccttgctgcttctccttgtttccagcctgtgtttgaataactacttctcagaatggaaacactcctttctttgatatgctaatacattccttggtcagggcagcaaggcctgagatccactctgtttccttcagacgactgtctgaatctaccctactggctcaaaactttctctcagagggcaatggcttcacctttatttcctagttattgtgggacacctccccagggtacatgagttctgacaacaaacacccactcagatcatcggaaaatccaaaccagtctaaaaatttcagaggcgggattgtctgatttttttctctttacacaataaacttttgaaatgctacaagcaaaaagaattctggaatttgtagatatttagatggtttgagggactggactgttagaggaaccctaatgtgaaggcttttgttaagtggagcaccacatttgtaattcaaacaatcaccccctagccagataaaaataacagcttccatttcctggctcttactgcagactagaaattgcaagggctttacatctgtcatcatctctctctaataacacctttatagaggtataattcacatactgtacttttaaagtatgcaattcagtgttgctttttttttttttttctttggagaaggagtttcgctcttgttgcccaggctggagtgcaatggtgtgatctcggctcactgcaacctccgcctcccaggttaaagccattctcttgcctcagcctcccaagtagctgggattacaggtatgcaccaccatgcccacctaattttgtatttttagtagagatggggtttctccatgttggtcaggctgatctcaaactcccgacctcaggtgatccacccgactcagactcccaaggtgctgggattacaggtgtgagccaccgtgcccggccgggtttgtttttgtttttgtttactgtatattcacaagggtatgaaactgtcaccactaattccagaatgtttccatcacccgaaaaagaaaacccatgccaattagcagtcactcccccattcctctcccctcagcccctggttaaccactaatctattttctgtgtctatttgcctattctggattgttcctataaacggaactgtataatatgtagtcttttgtgcctggcttttttcatttagcatattaccaagtttcatccacgttgtagctttatttcctttttataaccaaatactattctattgtatgaatatgctacattttatctactcatcagtagatggacatttgggttgtttccagttttggggtaccatcatctcttttaatcttcatgccacctctagaagtgtgtattgctgtcttccattgattgactgagtgaactgtggtttctttcttttgttctccttttgtttatacagatggggcctccctgcattgcccatgctggagtgcagtggccatttacaggggcaatcatagtgcactacagcctctaattcctggcatcaagggatccttctgcttcagcctcccgagtagctgggtctacaggcatgtgccaccatgcccagctaatttttgtattgctagtagagatggggtttcaccatgttggccaggctggtctggaactccttaccttgtgatccacccgcctcagcctcccaaagtgctaggattacaggtgtgagccaccacgcccagcctttatttctttattaaaatgtactttaactggctggtcggggtggctcacacctgtaatcccagcactttggaaggccgaagctggtggatcacgaggtcaggagtttaagaccagcttggccaagatggggaaaccccatctctactaaaactacaaaaaaaattagccaggcacagtggtaggcacctgtaatcccaggtactcgagaggctgaggcaggagaatcgcttgaacccgggaggcggaggttgcagtgagccgaaatcgcgccactgcactccagcctgggctacagaatatctaaagaaaaaaaaaaaaagaaaaaagaaaaagaaataaggtacatttgcagaagtataatcactaactctgtcagatgttatcttatgtgtaaaagaggcaaggattagtgtaatttatcctttaaggaatatagtaactcaggcaggagacatgtgggcccatgtgctctattctgttttatcttcaaaactctttccagtcctgtttctcacatcagaaaaggatagaaattctgttctttccaaccccaccacgtcaatcaaatgaaaatgtcctgagccatgaatccagctcctggagtgaagaatctttgtatcaagaaaaattctggcattattttatgttctcagcactcagtggactctaagaggtcacctggtcctttcctcagcccagaggattccggcagaaaagcagtagctcagaggttttactctgcagccctgactggattcaaataccctgtctgtgtgttaataggggcatgacttttggctcagagactttgcgactctctgagcttcagtttggtcaatataaaatggaattagtaacagtatcaaagttaatgtgaggagtgagtgaagcgatgacaagggcccgtcatactgtaaactcaaaccatggcttcctatttccctattcacggtggatggggagatgtctccgtgccaagttgaccccctccccaactccgcacacgctggtccttttcccctaatcatctcccaccgcctccatcccccactatcctttcctgggtaacttcttattcttcagatcttattttattttttgagaatttttattatttatttacttatttatttttgagatggagtctgctctgtcacccaggctggagtgtagtgacacgatctcggctcactgcaacctcagctcccaggttcaggcgattctcctacctcagcctcctgagtagctgggattacaggcgcgcgccaccatgcccggatttttgtatttttagtagagaccaggtttcaccacattggtcaggctggtctcaaattcctgatctcgtgatccgccggcctcagcctcccaaagtgctgggattataggcgtgagccaccgcgattggcctattttaattttttaattttaatttttttgagacagtcttgctctgtcgccctggctgcagtgcagcgtcacgatctcggctcactgcagcctccgcctcccgggttcaagcgattctcgtgcctcagcctactgagtagctgcgattacaggcgcgcgccaccacgcccggctaatttttgtatttttagtaaagacggggtttcaccacgtcggccaggctggtctcgaactcctcacctgaagtgatccacccgcctcggcctctcaaagtgctgggattacaggctcgtgagccactgcgcctggccttcagatcttaaacaccacttccttggtacagcattcagagacacctccatattcctctccccttactaaaggttccttcttacggcaccctgcatttttccttcatgactttatcacagtttgtaattgtctatttattttaattaatctgtctgtgtccataaactgtgagctccgccgggaccttgtttgccctgctctctgctatgtcctcaatatcaacagtggactaggatcacagcaggctttcatcaaatatttatgggaaacagtccagtccattcctgaactcgggttcagaaaaggatagcgacctgtccaaaatcacacaggttagcggcagacttgatcccgagtctcctaactggcaacccaagactctatccccggaactggcaagaatcttcctgaactaccccgataaaattttgagtgccaaagaaagtcccagaaagggagtgagtagagcagtgtggagagtaggaggaaagtgatttgacttggcccctcctctcttgacgttgagcatactgcaaacagacactatacgtggcagggcggctacagagtgaaccagcgacagggtagccattaaaagaggccagggagcggacagaggagtagagggcagtactgcgcagtagactgcacaggcgcagtcgaggagctccgctcctttctcctcagccccgccccgccccatttctgccgaatcacagaagttcaagagcggtcagctgatgctacgctgtgcggtcacgtgacaacgggggcgaagcgcaggcgcaaggagcaagcgcagattgtgggcggctgtgtcagctgacccaaggggccttcgaggtgccttaggccgcttgccttgctctcagaatcgctgccgccatggctagtcagtctcaggggattcagcagctgctgcaggccgagaagcgggcagccgagaaggtgtccgaggcccgcaaaagtgagtttcagggtggggctgcccggcgtggcgcgagtcgaagaaagaccgctgggcctcaggtggtgggtagattaggcccgaaaaactgcggggtgcgggcgtgcgtatagtcgcggaaggttgtgtgtttcgaagctttgaggagctgaggctctggaaggcttgcggatcgcctggaagccacgatgtgagatggtaaattgggcgtggaaacaataatgggttaccgtccttggggcctggaggcatgtgaaatgggctctccaaacggagctctttgttcttcttctctcccacttaaccgctctggggtggtcagtctcggtgaagggagccagcatccacacagttgcttggtctagaaacctggagtcctgcttgcctcttctccctccctcatttagtcagtcgccaaggcttgcgtatctttcactttttcccccatgtctactaccagcgtcttagtccaggacaccagtttctctaaaggtactgtagttgtctaaatcgttggcgtgtgtgcgtgtgtgtgtttctgatatgtggcaagcgcagtgtgtgtgtgtttctaacatgtggcaagcgcagtgtgtgtgtgtgtgtgtgtgtgtgtgtgtttctgtctaatatgtggcaagcgcagtgcccagtgcatcagttgtctcccctaacgtggcattcagtgtcgcagtgaaggaagcaggtattgggtcagttaattaattgcaggagagatgagggctggagtggagaaatgtaaggttgctaaagaatttaacaggtgagtttaatctagactggggagtggaagaacccgttctggtcccctccagtcaatccattctcctctctgcaatcagtcatccttctaaaatgcaaatatgtgacttcctg

SEQ ID NO: 12321 - DNA, 6000 bp, Homo sapiens
ttactcatttgagcgccagcctccaggagacggggcaaagggctgctcgtcctccgtgaccaggcggcccctctgcctttgtctcatgtgtggtcaacggggtggctgaaaggctcacgtgttcctctagcccgggggacctgagaaacctgactgtcaccgtgtctctgtagcctagtcggtggcctggcagtggacagaggccctgcaggccaccaaggaggacggaaccccggggacagaggaggagctgcagtgcgaggagtccaggccctgaccacagccccaccctcgggacaccccaacccctgcaccctctgtgcttgtcttggggcattcacttttcaactccatggaaaatattgtgacagtaacgtgggagcagcaagaacccaaataaaagaacgtgtcattcacgctgcctccctttctcctgagctgcaggtaccagcacatccgggcactttttccatggtccgctgtcctaatcctgactatttcagcacccagagagcaagccgaaaacaaaaacacccatcacccatgcccggcattagaaaatctcattggtatatgttcagattattttaaaaggaaattaaactcacagatatagccaggagtagatggagtttgtggggcttaaaatatacgtaaactttaggggttactttaaataataatagcaatatgaatccaagttagatatgaaaagaaatatttatttgaagtgataaaaaatcacaaggctcgcacatgaaaaagctgataggtgcaataaacatcaccaaatggaagaaaaaaaatttgattagttactcccaggcatacctctatcaaacttattttttctatatctcttggctgctaccccttgattactgcttcctatgaaaataatttttcataaatagaatggaaaggtaactcagccttcccgctgacgtgaggttcaggttggtttctcatcatcagttgggggctgcgtgacacacgcggccgccgtcacgatgtgcatgtggtgatgctgccacgggcatctgccccgtaagcagcagctccgatcaattctcctttgcgaggtgaccaccaaaggactgcagagctggccggggcattcgtgcgtgttcatgaccgagaacttttcacacagagaggacttccgtcttgacgaaggagcgcagagctggccgggcattcgtgcatgttcatgaccgagaacttttcacacagagagagaagacttgtgtcctgacgaaggaccacagagctggccggggcataaatgcctgttcatgaccaagaacttttcacacagagagagaggacttctgtcctgacgaaggagcgcagagctggccgggggcatacgtgcgtgctcatgaccgagaacttttcacagagagaggacttctgtcctgacatctttattgtattatagatgcgtttaaggctgtaaacttgaagtttatatttctctttatgtaacagtctcttcattgtcgattctagtttattgccttgtagctacaaagggcaggctctgctgcgttagttctgtgaagttccccatattgcctggtatgtggcctattttaaaactattccatgtgtatttaataagaattagcaactaaaatttttcattgtaacaattataacaatataattgtttagcttttgaggcagtgtctttgtatactttacaatgttggtgccaaagctccaacattgctgtgaacttttaacaccctcgccctctgtttctaatggagaagttctggcgtctcccgttccgactgtgtatttgacccctttgttcttcagtctgttttggcttcctgcattttgatgcggtatgccttcacattcatgaacattcgtcttcttgtgattgtgcttttaattgttttcatgttggcgcccttttcatctatactgatgaaaaataaatcatgcttttgtctaacaggcttgtttatgtattttgaaaatttattatccctgcccacccctttccacttccctctccatgcatcgctattctcccgtgcttaacgtgcatctttttgttcatatgaacccatgcatgtgggcacaagtgtgttttgtgtgtgcattcttgttcatatgaacccatgcgtgtgggcacaagtgtgttttgtgtgcattcttgttcgtatgaacccatgcatgtgggcacaagtgtgttttgtgtgcatttagcactctttaaatatgcactgaaacagaacctttcccccaccatcaaagtctgcaccatttgtgtttgtacagccagcaggtagtttgccttgctgacatcatttatccccctgacctcggtctcctatagacttgctaaaattctccctttcaaatttcctttgatggagaccagtgagtggtagacgctctcagttgttgttgttgtttaatttttattattattattttttcgagatggagtcttgctctgttgcccaggctggagtgcagtggcatgatctcagctcattgcaacctctgcctcccaggttcaagcaattctcctgcctttgcctcctgagtagctgggattacaggtgcacgccaccatgcctggctaatttttgtatttttagtcaagatggggtttcaccatgttggtcaggttggtctcaaactcctgacctcaccttggcttcccagagtgctggtattacaggcatgagccaccacactgggcctcagttgttttttaatgtccgagatgtctttattttgccttcaatattttatgaaagttgcactgagaataacattcacaggtaaatgtgatttctcccgggtctgttaaagacgtcactccactgtcttccggaaggcagcgttgctattgagaggtctgccatcagtccacatccgcttttatggtatgtagtgtggctcttctttctggtcattttgactttttttctcctttcctggatgatctgcatttcactgtaatattctaggagtggatttctcaattttgatcattccttggtaatttagatctggggtgtcatcttcatgtcttttcaattctgaagaattctgagctattctgttgctttgttgccattttagaaaatgtttttctttcagaactcctattctgtttatattggaacctcctgatctattctccatgtgtgttaactttgtgcatgtgtgtgcatgtgtgtatgtgtgtgagtgtgcatgtgtgtgtgtatgtgtgcatgtatgtgcatgtatgtatgaatgaatggtgtgtgcacgcgtgtatgtctgcgtgtgtatgtgggtgtgcatgtgtatgggtttgtgtgcatttgtatgtgtgcacatgtgtgtgtgtgcatgtgtgtgtgcgtgtgtgtgcatgtgtgtgtgtatatctctgtgtgttgtgttttcagagctgctgcactctagttggtttcctccactcattttattactagctccaggctggagactgaatctatctgtaacacctcaatttctcttttgaatttttctgctttcattgattttgttagtactatcttccatgacactaagtctcttttctactatgtcaagtctggaatttaacctgtctattgagttttttattcactttattattcatcttcaagatttgtaattatttctatttcgtctctccttatttcttatattctggccagttctaattttatactttatatatttttaaatcactaggcatcttgatcatactcctgcagttttaaagtgtgtgtcagactttccttggctggtgtaagttcctgtaccaattgctcatttttagcctgcctttcttagtgtggtgtttccttgggtaatttggaacctggcctttctagcttatttcaaggtgaggatattgtgtctctgcatttctgcctttctctgccatcttgttgtcactgtcctctgtctagcagtgttttgtagcctctgctcccatcccgggtcccaggcttctgctctgcagtgatgcagagcatgtcacagataaagtcatcctttccaaggacggcttgtctcagcttctgcccttgaggctgtgttgatgtcctcttgccttcctatgcccacagtgctccactaagttatacgaagttacagccctgggatgtgtcaaggagggtttctcagccttctttctggagtcagggaagcccctcccatcactcccaggagccggacctaggccctctctgcctgccttgggacttggagctgacaggcccctgcctctgccccatcaccagcctgtgcttctcctccattccttgttttatgtgagtgtgtgtgcgtttgtgcatgtatatatgtacacacatgcatacacacacacacacctgtcttggtcttctgtctgtctgacctattgctgctctgtgtgtggagcagagagggtcgttactgcacaccttgctcaggacagtggacaccgtctttaaatgcacacgggatcgtgttcacacaggagggtccctttttttccatgatgaatctgaggccaagtaacctgcccagagatgcaggaagctcagctgagccccaagcccacggccctcggactccaaccccaaacccccttgacagtgtgcacgtcagcaagtgtgggatggctggggggcatctgttacggctgcacacgtccccaggaggcctgcacacccttcactcccttcagtttcccttcaggtgaaatctgcaaatctgctcctctggacctggtcctgtccaagtgatcctctgggattaacaagctgttattcaccagcctccaacaataatggcaggttatctgctccattgcagaactggcagtggtttacatccaggaagggattggtcagtctcctgtgccaggtccctgggggaccctgagcccagcggtataaagggcggctgtgggaggactggtacagcctctcccagccccagcaagcgacctgtcaggcggccgtggactcagactccggagatgaagcccctgctcctggccgtcagccttggcctcattgctgccctgcaggcccaccacctcctggcctcagacgaggagattcaggatgtgaggcccggatgggaaggctgggctggagggggcaaggggcgaggctgagactggatggagaccccatgcctcctccatccaaggagaccctcgtttttgggttgggcattcaagccctgccctgagggaatggtgggatggggcagcaggggtctgggctggcagggtaggtggcgcaggggtgcagagtgggcagggctgggagggtgggggtctggctgacttcacttcttccctggggatgagggctcctgtggtcctggctggcttgtgggggctggagccaccttcaagtgggcctggcgagggtgctgggtgttttctgggtgggttagattggggaacgttccccgtttccagccctcggggtgcggtagagtctaggggctgcaggccagggaagggggaggctctggagcagtcggcctgagcctgatagagaggggccttctccaggtgtcagggacgtggtatctgaaggccatgacggtggacagggagttccctgagatgaatctggaatcggtgacacccatgaccctcacgaccctggaagggggcaacctggaagccaaggtcaccatgctgtgagtgtctgccagccggccgggcagcctgcaacctggtctagggccttccctttccccacccaggagagctctggtgctggggaggtgggcagacctgctgggaggcctctctcggcccctcctgcaatgcttgagggcaaactgtgccactgaggtgcctcggctggaggggccctgagggggcagaggccccggatcagaccctgtgggctaccagtggcagccctgggtaccgcccacttcctcctccgactagggaatgtctggtgacgtgcaggcccctttgggaaaaggtgtttaccc

SEQ ID NO: 12322 - DNA, 6000 bp, Homo sapiens
ttcatgtgtgggagtgtatctgttcaaatgatgcttctgagtggagttgctgagtctttggctctaggttttttttttttttaagcatttatgctcattgtggtttttaaattaaacatttaaccctgagacactgtagattcccatgcaattgtaaaaagccacacagagctatcatgtgtatcttcacctggcttgctccagccccaaccccagcaatgacagacctgttctccactcctgcaatctgctcattgcaagaatgtcgtctattgcaatcataaaattgtgggattggctttttttttcctgtgcagcatcattctctggagattcatcctattgttgcatttatcaatagtttattccattttacttctgagtagtgctctatggtatggatgtaccacagtctgtttaaccattcacctgttggaggaagtctgtgtttatagatttgggctatgacacatgtataggtttttgcatggacatcagttttcatttccctgggacaaaggcccaggggttctattgctggattctatgcttgttacagggctcattttgttttgttttgctttgttttattttgtttttaacctgtcaagccattttccagatccagtttccatgcatcctcaccaggcttcagtatgatcactatgatcttatctcagccaccttaataggtatgtactgatatatcatggcttttatttgcatttcactgatgactaatggtgttgagcatcttttcatgtgtttatttgccatctgtatatcctctctagtcaagtgtcccttcatgtcttttgtttacgttctatttttgaaactgttgagttttgaaaaattctttataaagtatagaaactaattctttgttgaatatgtagtttgtcaatattttctttcagtctttggcttgtctttttattctgttaacagggtctcttacagagcaaaaggtttttattttgatgaagtctattttaacaatttttccttttatggatcatatttttggcaacaaatctaaaacctcctgacccagctccatatgtcaaagattttcttgttttctaaaagttttatagttttaagttttatgttgaagtctatgatccattttgagttaattttcatacagggtgtgagaccaaggttgtggttcttctttttctttggtggttttgtctgtggatgtccagttgctccagcccgtttgctacaaaagctatctttcctccactgaattacttttgcatctttgtaaaaatgtaattgggtgtatttgtacaggtctgtttgaggattctttattgtctgtcccattgatctatgcatctgtccatgtgctagctatataagtcttgaaagggtagcctgtagctgggtgtggtggcgagagcctgtaatcccagctattcgggaagtggaggcaggagaatcgattgaacccaggaggtggaggttgcagtgagtcaagatcgtgccactgcactccagcctgggtgacagagtgaactccatataaaaaaataaaaacaaaaataaagtagcgtgatttctcccaccttattcttttttaaaaaagttttagctattccagttcctttgcctttccatataaattttagaataatcttgtctatatctaccacaattctttctggaattttgatagaaattttgttacatctttatattatttgagagaaatgatatttttactatgttgagtcttctaatccatggatataacgtctctccatttgtttagatcttctttgatttattttataatcattgcattgttttcagcatacaaatccagcatatgggttgttagacttatgcctaggcatctcatttttttagccattataaatagtactgtgtttttaagtttagggtccattactagtatgtagacacacaattgatctttgtatatttatcttgtgtcctgcaaccttgctgaactcacttactagttctaggaggtgtattgttttcttttgttttgtttttcaatttcttgggattttctacagagataataatgtcatctgcagatgcagttttcttccttcctttccaatttgtatgtctttaatttcctttttaaaaaacctatattactctgactagaactttctgtactatgttaaatacaagtggtagagtggacatccttgccttgtccctgatgttaaagagaaagcatttgtaactgagtatcccagcctcaaaatgtgcttaaaaacttttttcctttcttgctttcagccttgaaacatacttcgaaactctttatttctccctttcccaccaggcacttccgtgagcagtgctcgcttatctaattatgtgcttacttagaaattccaggggccaattttgaaacaaaccaggcagagagacccagctgcagaatcctccctcttagggggagttacaggtagcctaccacttcccggctgaaatcaggatgacgcaaaccagacctccggacagacgattgatgactcacaataaccatcagaacaagatgcagaccaacatcctcctgcaccattcccacatatttcccacaccttttcctccttaaaccccttcgctcagtccagaaaatctgaatggtcttttaaaggcatgggtctggccattccccaactgccagtatttgaataaagctgctttccttttaccacacctcacttctcatgccttgacttctgagcagcgagcagctggacttgagccagttacacatcagtctttcaccattagaaataatgtagccataggtttttttttcgtagatgttctttttcaagttaaagaagttctcttctattcctatttttctgagaggtgttatcccgaatgagtgttgaattttgttaaatacttttaacaacccaacaggaaccaccatcagaagccatccagagaaacgcaccaggccacaaagcactgggggccagggatcttgcccctgctgtctgccatgggttgacccccagcctccaaccctaccatcccctgacggtgtctgcagcagttgaacccaaccagcatctaaaagaacacagttggtgaacgagactgggacacagggcaagatgggtggacaatgggaggctcctggagagcacccgtaccagcgagcatagaattcatgggggtgacctgttccctgaagcatctgcgcgtgttgttccagcattttcttcaaggattgagccagcagcaccagtgtcatacggtgcttaaatcaatgattcacaaccaaccaatgaaatacaaggtgccggctgggcgcggtggctcacgcctgtaatcccagcactttgggaggccgaggcgggcggatcacaaggtcaggagatcgagaccatcccggctaaaacggtgaaaccccgtctctactaaaaatacaaaaaaaaattagccgggcgtagtggcgggcgcctgtagtcccagctacttgggaggctgaggcaggagaatggcgtgaacccgggaggcggagcttgcagtgagccgagatcccgccactgcactccagcctgggcgacagagcgagattccgtctcaaaaaaaaaaaaaaaaaaaaaaaaagaaatacaaggtgcctggggtacaggcaacaaaaatggggaacggagaaatcttcccgttgaggtagagactccagcctgtttgctcatctctggtcctgaagagcccagtccccgccctaaggatggggtttctgctcggcagcacttgccgtgagaggggtgaggcactgggtcacgccagccctttctttatagcccccagggtttattagagtgtgcattagtattatttagcaagcacttgagggtgtctgatcttgggccagagaggcacaaagattgtgtgggcccagcacctgcctgcagagcgtgggtcagccttgggtcccagggcagatgacgcaggcccgggaactacagggtccaggagggagaaggcaaagttctggctcaggttggctggggatgaggccagcggagccaggtgcccaagggagctcagccacaaactctgagcacaggctggcaggtggctcttgatgctcatgccacccatttatctaaagggatgagattcaaggcctgtcccggtggctgggggccgtcgaagctgacgagagaggggatgtagagtgaatgtatattccactctaccacttgtatttaacagggagatggatgatgaacacgtgcaggaagaaacaggcaggacaatccagagagatcacgtgttctgaggacagcacagccaggctccggtacggagtgaagcggggtggggcaggcggcggggtccctcatatggcccgaggaggccgtatatatactgaccttgaaccacacaatagtgcccttctctgcccctaggaagctcgagtgcagggtccaggtggggaaaatcaatgcagagtgggtcccagagtgggcggaagcttgggctctagggcgtgcgggactcagctggcagcagccccacgtctctatggttctaaagcccagtccatttctgctcagcagggagatggccagttccccagaggacttgcccagggtcccagccgtggccctgggagggctcaggggtgagggaggaagaattccgagccgtgggccctccctctgtggctcggggtgcagacgtgcactaccctgccctgtcctctggagtcctccgggctcatccaagtgggcgcatttggatgcaaaccctggacagcatcgtgtgtcttttcttctctggctggcactgaattgctgttcaccagatgccagcaatgaggacactccccctcccggatgcaggactggttgccaccatggggaggggtgcaccgtgccacgtgctcccaggacactggccagggggctataaagaacatctcgagaggagccagcacagccttgttcagacgcccagtgacctgccgaggtcggcagcacagagctctggagatgaagaccctgttcctgggtgtcacgctcggcctggccgctgccctgtccttcaccctggaggaggaggatgtgagctgggttggcgtgggcggatggaggagccaggtggactcctgggcagggggcagtgccaggggccctgctttaggaggtgtcactgaaggctggcttctgaccccgtgctcccagcctggggtggtggtggaggggtcctattgttcctccagcagacacggccccccgaggcccagggccggagcaggctcggctcaggggttcctgctgcactgacgcctgaagcccgaaggtctcgcagggttgggccctgtggagggagggctcacctggtgctggggcccgggggtccatggggtgcagacatgccctccttccactgggggctgggagccctgagcagggggctggctctaactcactccagctgagctctaactaaggtgcaggaacccagcctgcctttaggggtggcagccgggcaccatgggtgtctggttatagctgcaggcctgagtgccagggtcagagtagaatctgggccacccatggtgggctcacggccttggcctgctccagatcacagggacctggtacgtgaaggccatggtggtcgataaggactttccggaggacaggaggcccaggaaggtgtccccagtgaaggtgacagccctgggcggtgggaacttggaagccacgttcaccttcatgtgagtgttgcccactgcagggcccctcaggccactttcgctccccgccccagacccacctggtgcccattgccccatccacatttcgggtgttgggaagagtcaccccctgccttggagggaaacagccaggacatcctgaagctcggtggggtgggggggcagtggaattttcaggttgccgggtcagggccatgcaccaggtgagctgaggatgggccaggtgtgtcctgggagccgct

SEQ ID NO: 12323 - DNA, 6000 bp, Homo sapiens
tggcgtgatcttgactcactgcaagctccgccttccggggttcacgccattctcctgcctcagcctcccgagtagctgggactacaggcgcctgccaccacgcccggctaattttttctactttttagtagagacggggtttcaccgtgttagccaggatggtctcaatctcctgacctcgtgatccgcccgccttggcctccgaaagtgctgggattacaggcgtgagccaccgcgcccggcctcagctttcaatttctataatgtcatttcgagaatattgtataaacaaagtcatagagtatgcgaccttttggggttggcctttttcactcagcgtagttcccttgaacgccctcctgctgctgtgggtatcagcagttcacctcgttttatggctgagtctcccataaggcagatgtactcgtctgtctaaccattcattcacggatggagttttccagttattagctattacaggcaaagctgctgtggacaattgtgtaccgggttttctgtgtccatttatcccatttctcgggataaatgcccaggagtaaaactgccaggctgtatagtaagcatatgcttattatttttgtgttgttttgttgtttttttacacggagtcttgctctgtcacccaggctggagtgcagtggcgcaatctcggctcactgaagcctccacctcccaggttcaagcgattctcctgcctcagcctcctgagtagctgggactacaggtgcacaccaccacactcagctaattttttgtatttttagtagagatggggttttaccatgttggccagactggtctcgaactcctgacctcaggtgatccatccccctctggcctcccaaagttgggattacaggcgtgagccaccactcctggaccagcatatgcttagttttaaaagaaacttccagctgggcgtggtggctcacacctgtaatctcagcactttaggaggccaaggtgggaggatctcttgagcccaggagttcaagaccagtctggccaacatagtgagacccagtctctattatttaagcttaaaattttttaaataaaaaacaaaagcaacttccaatttccagcatggctgaaccattttagagccactcaaagtatgcatttctcaacattttgagagattcagtttgtctccatccccactaatatttggtttggtccctacttttcattgtagctgtcctaataggtccctacttttcattgtagctgtcctaataggtccctacttttcattgtagctgtcctaataggtccctacttttcattgtagctgtcctaatagctgggctgtgatagctcactgtggccttaattggtgctccttgatagtcaatgacattgagcatctttttaggtgcttatttgccacccatagatcttctctggggagatgttccttcatggtttttgcccattttctaggtggattttatttttgctgttgaattttcaaagttctctatatcttccagacaccagtcctttgttggatatgaaactttcaaatgttttctccaagtttgtagcttgcctcttcatcctctttttttttttctctctctctctctctttgttttttgagacggagtctcactctgtcacccaggctggagtgcagtggcgtgatcttggctcactacaacctctgcctcctgggttcaagtgactctcctgcctcagcctcctgagtagctgggattacaggcatgtgccaccaggcctggctaattttgtatttttagtagagatggtgtttcaccatgttggccataggtggtctcgaactcctgacctcaggtgatccgcccacctcggactcccagagtgctgggattacaggtgtgacccatcacgcccggccccgttcatcctcttaacaaggtctttctggagcaagagtttcagattttgatgcagtatgatttaccagtttttttcttttgtggatcttgcatttggtgtcaagtctaagaattctttacctagccctacgtcctgaagattttctctcacgctttcttctaaaagttgtatagttttatgttttacttttaaactatgagttaatgcatatgtcaggtgtgagttttagatggaggttcttcgtttgcatgggatcgattgcacgtgatgaattgctccagcaccatttgttgcaaagactgtccttcttttagagggactcccgcttgccaggcctctggtttaatgaaacatgaccagagtgactccatcttaacgtgaataactagacactcacaaggcacctataaggttatataacgaggctatgctgctcgatactgactacgacaatttcctgtttctctgcctacaggacaccaccacccccatccagagcatgatgtgccagtacctgggtgggtctcacagcacatgagctcaacgtgggtgagaggcagcagctacttccatggctgggaaccctggggagctgacaactggcttcctgtccacctcagtgcctgtgggctggttttttctttcttggtttttttttttatttgtttgtttgctttgttttttttgagacagggtctcattctgtcactcaggctggagtgcagtggcgtgatctcggctcactgcaacctccacctcccagattcaagcgattctcgtgcctcagcttcccgagtagctgggattacaggcgcgagcttatggtctgaaaatacccgcatactaagctgaccaccaattataactgcagaacatttatgcccatacgaggcatctcccaccaagcctggagaatgtaccgatgacctgggagtgcagggggttatctttgctcacaaataacgtcaacgagtaggctgaggctgaagggcaaatggtcattgatcacactaggagcccctatctttagcgagtgcatctgcatgatccaggtttcactgtagctcattacagcttcttacaaacagaggcactcacagaggacgggcgttcctcctgctcgctgaggttgcccggctctggcacagagtcatttcccataaacttgctttcactgtgctctgtgagtcaccttgaattctttcccgtgtgagatctaagaacccattcttggggtctggactgggaccctcttttccgacaacacttcccccacgcactgttcttgcagctttgttaaaggtctgttgttgttgtgtgtgagtccatgtttggactctctatttcccattgatctatgtgtccatttctctgccaataccacaatctcttggtgactattgataatagtgcttgtaaacttgggtagactaactctttatactttattcttcttcaaaatggctttagcaattgtagctcctttgccttgacatgtaaattttagaaaaaaaaatttctctatatatctacatatggtggggtgtggtggctcacacctataattccagcactttgggaggccgaggtgagcagatcacttgaggtcagcagttcgagaccagcttggccaaaatagtgaaaacccctctctactaaaaatacaaacattagccaggtgtggtggtgggcgcctataatcccagctactctggaggctgaagcagcaggattacttgaacctgggatgcagaggttgcagtgagtcaagatcgtaccactgcactccaccctgggcaacagagcaagacttggcctcaaaaaaatgtatatatgtatatatgtgtgtgtgtgtgtcacacacatgtctatagctacctacaaaatatcttgctgagaatttgataggaattgcattaaatctctaggttgagttgaggagagctaacacctttgctgtgttgaagcttccagcccatgaacacattgtgcctgtcctttaccttaggtctttgatttcccttccttgggttcagagtttaagtcctgtccatatttggtgagatttttgcctacatgctgtgtgtgtgattacaaatcctgaatttccagtttcgggttctgtctactccttgacactgtgtgggaacacggtggatttttgtgcgattgaccttgctgacctcactcggttctaggaggggttttgtagagttcttgcaattttgtacctgggcaatgatgttatatgcgaatagagacaggtatacctcccccttcccaatctgcctgcctttagttaccatttcttgcctagctgctctggccggaatgacctgctctgatggatgggggagtgggagtggacacccgtgtcttgcctcaggactcaagtgctctccagggagtgagatgcgggctcgattgtaagttacaaagtgatgcttccctgtgggaaaaagtacatccaatatagactgtaggacaaagtctgaaagtccactgcctcccatttccacccagtcttgcctgtgagtcagagagaaacagtgctaacaggcagtgtgcacctgtccagaggctggctgtttgagggacacaggtgtgcacacctggggatgtctgagtggaaggtacaggtcaggattatgaccgtgcagtcagtcacccactggcatgatgtctgtggcatcctggggcagccatggggctctcaggccctctgcctgccccacaggccatacccctgccctggacacagctgtcctcagtgctggcctctgacccaacattgtccaggagccccaacccagaaggtgctcccgccgctgccagcctggacccgacccaggcccctcccgcctgaggccctgccaagaactgcccagcccggacacagaggaggttcccgcgtggacgcagggaagagcctcccattgccccagtggaggaagctgcccaggggccaaggatgagtcacaggttcgaggaatcacatggcgaggctgtgggcggggatcttgtctgccctcctcctacataaggccccctgagcccacactgcctcagcatccctctggctccagagctcagagccacccacagccgcagccatgctgtgcctcctgctcaccctgggcgtggccctggtctgtggtgtcccggccatggacatcccccagaccaagcaggacctggagctcccaaaggtttgaggctgggggagcgggcactttactgtgggaggcctggggcgggtgggagctgcgggcaggcaggaagcccaggatctcagaaacctacaggaagcacagaatggacgccatgacgtcaggaagccctcagccctgctctccatctttagggtggcctctctggtttcccagcatcctaggtgactcattatttggactttggaacactcctgagttagcacacactggtcattttaagtacaggaaatttcatagcccaggatctggtagatagcagacaaccatccaatgctcactgtacccatcccagttagactcagccccgtctgcaccgggtgcaacgagagccatggtggggtgggaccgccgtgcagcccaaggccccctcagttggcagggacctggcactccatggccatggcgaccaacaacatctccctcatggcgacactgaaggcccctctgagggtccacatcacctcactgttgcccacccccgaggacaacctggagatcgttctgcacagatggtgggtttctcatcattgagacgggctgggcgggggctcagtctcccccctcaggggtccaggactgggtgggttgggcggagctggacttagccccaggcattttctgacagccaggggcttcactgtggcccttccatgagggtggggtggaaaaccagggctccagacgttccctgtccccttggatcccctgccccaggctctgggccaacagccaaccacacagtgcagccccaggtcagactgaggagaaggtctgggcggctgcgggctgcggtgctccttggacccggggaagttcccgtggtgacctgattttaggagtgacagtgaaggcaactcca

SEQ ID NO: 12324 - DNA, 6000 bp, Homo sapiens
gtgttagaattgttagaggtgggccgggtgtggtggctcacaccagtaatcccagcactctgggaggccaaggcaggtgggtcacctgaggtcaggaattcgagaccagcctggccaaaatggtgaaaccccgtctctactaaaaatacaaaaattacccaggcgcggtggcgcgtgcctgtaatcccagctacttgggaggctgagaatcacaaaagaatcgcttgaactgaggaagctgaggttgcagtgagccaaaatcgcgccactgcactccagcctgggcggcagagggagactccatctcaaaaaaaaaaaaaaaaaagttagaagcgataaaggccccacaggaaatagccataatgcattgccctggccatcgacgcagtaattccgaagtggcaaggggtaatgttttcgcagactgcaccgccgggcattcagccagtgacagcatcgaaatccaggcgcccttaatttcccaaatagacttcacggccctcgagccccggtatgcttctgaagataaaaaggctgcagaagataaaggattcaaactaaaggaggaagggtggaggctagagaggaaacagcgcaggcataggctgggcggcagtgcatctcgtccacccgctgttaaagtacgttcacgatagcctgcactttgagagagtcgcttcattggcctttgtacaaaattatttgaaagggaaaagactaaaggcccacgtagagaatatcattcaacactgtcatctgtgcgcccggaatgagcctaataatcatagccgagggcagcctgggcaacaagaaagaggcagtcactcaccagaaaaccagcaaatagacttcacacagatgccaccagcccctgggaatgcaaataccccctagttctagtgggcaccttctctgactgggtggaagtgtgcccatgtcactccgaatgagcaactgaagtaaagttttgctcaaggaaagcataccacgatacgggctccccgacgtaatccaaaatgataatgggcctttgtgcacctctgagataactcaacaaatgaacgaagcattggaaatgaagtggacgctgcagtcagtgtggagacctcaatcttctggacaagctaagagaatgaaccgcagcctaaaaacattcattgccaagttgtgtcaagaggctccgttgaaatggactcaggtacttagcattgcactgctccctgtaggtgggattaaaataagtccctgcgaaaccgtctttgggagaccctttgcagccaatctgtctcgggccaccaaagtgcccctaggtagggagtcggctattcagaatcatgttgctcacttaggacaaactcttaacgttttgcataagtttgcttccaacacggatgcggtgaattccacagacacctgccacccactcctacctggcgatcaagtgctgctgagggaatggaaggaagctgccgcgatgggaaaaatggaagggccctaccacgtgctcctgaccatggacgcagcattgaagctggcaggcatcaagccttgggtccatcacacatgagtggaaagatccctgccggccaagagccctgcagcacaggaatctctggccacggctgggaagcagaacccctagaaggcctgaagtttctattcagaaaacgctaagactttctcttctagcgctccgtcttgcaatgcctgctcttacctctcatcttctcttacgctgggcacaggactaggcagataacctgcagccagcctccttcagggtctgtggcctctcacccctctctagcacctcagggttgccttggcgggggtcgcccatccaagggaaggactggatttacctgcaaacctttttgggaaatctaaaatcttggactgggtcacaaatgacaggagtaaccagcgcaaatgtctcagagtggcccataaacaaaactttagaaggcccagggcacaaaaggccattctcagtaaacaaaacaagggatgatgcaaccgctttagctatgcccttgctgagtccgaaggtggatgtccaggctattgtaccacaaaatgtccagtataaaaacggctttcttcgaatttggaatggatttatttggctaactgcctccaccggacatttaaaccaaatagcccccttacgctacaaacgacagaacccctcccttgaccaccgactttaacataagtcgaatcatgagacagattccgcccaccgcacattgaccactggcctaacaactcgaatcgtgggacggattccgccgcacattgaccaccggcctaatgtaactcaggttatgagacggattccgccacacattgatcaccggcctaacgtaactcggatcatgggacagattctgccgcacatattatagtgctacaacaaagagatttgggttttgtttgtttttttttgagacagagtctctgtcgcccaggctggagtgtggtggcgcaatctcggctccctgcaacctctgcctcccgggctcaagcgattctcctgcctcagcctcccatgtagctgaaattacaggtgcccgccaccacgcctggataatttttatatttcttttgtagagacggggtttcaccatgttggccaggctggtctcgaactcgtggcctcaagtgatcctcccgcctcagcctcccaaagtgctgggattccaggcgtgagtcactgcgcccggccctcagtaaagagatttgtttgccaccaactggtcccaatggccttgcctacactggtatgcccctgacggaagccagtggctttgtggcaccattttatggccatggctggcctcgggcacgttgagacactgcactctaggcctcctatgggcacagggaccttggtaaaaaccatccaaaatccagtcaatctcccacatatgcgtaacagatggacaaggccagtctttcacaggtacggtcatctggccgtaatatttatgccctcaatgggcttagaaatggtcatatggcacacagaggcactcgctagttttacgcagtgaggcttaaacgacagtctccaaagtgtttcccgtgtgaatgctgaaacataccataggtggaaagctatcctgcaaaatcaaatggccctagacattctaacagcggcctagcagggaccctgcaccctcatcagaaccgaatattgcatgtatgtacctgacaattccgggaatatttctctggcattaaaagctatcatccaccgggcgcggtggctcacgcctgtaatcccagcactttgggaggccgaggcaggcggatcacgaggtcagcagatagagaccatcctggctaacacggtgaaaccccgtctctactaaaaatacaaaaaattagccgggcatggtggcgggctcctgtagtcccagctacttgaggggctgaggcaggagaatggcatgaacccgggaggcggagcttgcggtgagccgagatggcaccactgtactccagcctgggcgacagagcaagactcaaaaaaaaaaaaaaaaagggctatcgtccacagatgcaggtcatctccagccctaggttatcggttaatgaccgaaccacatcatggcttagcagagggtctccctcggggctgaacgtcctcgcagtccaggccgtccttgcaggcaccggcatcatgttacattgtggaatgtattgctgttgcacattgttccaaaacatccctccagctcatactatttcaacaggcgctttctctaggcccccaaaacagagagtactactgggaacaaatcaacatctttcactccaacactgcgtttggtgccccgtaacaatgacctcctatcagcaggaagtagccagaaagattataatgccccatccccccatgattctcataagaaataaatatacaagcatgatagcaatcatgcataatttgacagtggggattgtggcaggccaggtctcactaacggctgaataggccggcctccacgacaactgtttcagcactgaccgggtggtgaagtcaaatattaaaagctgagagggccagcgcccttcaacagaggctggaatgtaacaaaagcccaccaagagttttgcccaggcctctcctgggccttgaagcatgacaagataacaaaggaattcttaacaggacccgtttaggattaaacaagttttactggggtctaaaggaacgccccaaacctccatgatttagcaggagaaaagataaggggaatcaccccagcacctggacccctccagattaagtaaatttactgaggctccagaggaagttcttcaggactcaggccttaattatagattagaagaagttcatcactgtgtctttagctgaatgcacacttacacgtagacctacagcttcgaagatatataagctctggaaaactgcaattttgagctggtctagtgctattttcccgggcttctgcctgtacccggtgacagaagcaaactctcttatttcccagctcgtctgcatctcgttactgggctgagagaataaggagcgaataagcgcccggccgtcggttgagtctggggacgctgtgactcaccattggctccggccccagacgctgtgctggggaaggagcgggaggggatgggaggggaacagggacaccctgtactccacagacacagccaccatgggtcctcttgcaggctgagagagaggctgtcccctgcatttgggacaaggtgcctgcctccagtgaggggacagcaggttcctttgcccatggatccaggaagctcccacaagggagtggggtgatcttccccaaggtagagagggcagcagcctcggggcctttggctgcatgcccagtgggcacaggatgtgtgtggacgggccacagagtgggccgccctgcagggctggaagccgcagggcagcagggtataaagggggtgggccgagggctgaggcgtccacggcaaagatggctctgcttctgctgagcctggggctgagcctcatcgcagcccaggagttcgatccccacaccgttatgcagaggaactacaacgtggccagggtgtgtctgcgttggggtctgtggggaaggggccaggcttcaaggcacctgtcttcccccagcctggggtctctgacctgtgaccagggcaactggtccaaggggagcccacctctcctccccaagctgtgacagcagcctgggagagcaggggttactccgggagggtcgggtgggagaggcctgggagagtgactggggccctgagaggttagagggggccctgggagggcagaggggaaagctggagagtggagtggcggccagcagggagatgggggccctaagaggacagaggggttcctagaagtataggggagacctagggaaaagagggggactcagtgggaaagggtggagcgggggaccttgagaggacagagggggacctggaggggcagaggagagacctgtggggcagagggggccctggaagggcagagggcattctgtgagcagaggggggaccttgggatcaaaggggggatctggggacataggggagacctggggggcagcgggggccctggaagggcggagggcattctgtgagcagaggggcgaccttgggggtaaaggggggatctggtgacgaggggagacctgggggcactggaagggcggaggggttctggttgggagccagatgctaaggggccgggccctgggagggaagactgtgggcgctaagcatccccagggctgtcccgcggccccccacccactggagctctttgtcttcaggtttcaggggtctggtattctattttcatggcctcagatgacctgaatcggattaaagaaaatggagacctgagggtcttcgtccggaatattgaacacttgaagaacggcagcctaatatttgatttcgaatacatgtgcgtgttgcccatctcagctg

SEQ ID NO: 12325 - DNA, 6000 bp, Homo sapiens
atgagggaggtcactgtatcttttaatcaacactgtctagtgttgtgacttgcacaatgatatgctcccccaaatgttgttgcattcttttcaaattttgtctgcagccaaggagaagaaaacacatcgttacatttctaaaagttcctaaagcagtgtctgcaagaatgtcaggcattggagtcacgtttctgcaattagaggctttaaatgatagaatgaagatgtctgtcttttgcttcagaaagtaaggatcatccataaccttcaactagattgagtcttgagttggtgaaggttttaatatcaggttgcaccaactggtttcttccaactaacgatttctcaaggaaagtttcccaaatatttgctgtctatttatctgtacttctcttgctcacttccacttggatttttttttttttgcctttggtaacacaatgactactacttatggcacattgcaatgatggggaagaactaatgaaaatccccaagtctcatcaataagaagcacgaaagagctaaatcataaaatttgggtgatgttgaattatgtgtcaggcactattccctgtgtatattaactcattttatcatctcagcactgtttctaaatgggtatgtcgatgaaaagagttgaactctgttaaatatttgaagacatttattctgagccaaatatgagtgatcatggcccatgacacaacccttgggaggccctaagaacatttgcccaaggtggtcagggcacagcttggttttatacattttaaaaaggcatgggacatcaatcaaatacatttaagaaatacattggtttggtccagaaaggcaggacaactcaaagcaaggggaggagggggttgggcttccaggctataggggaatttaaacattttctggttgacaattggttgagtttgtctcaagacctgggattcatagaaagggaatattcaggctaagataaagattgtggaaaccaaagttcttctgaagttttatagtggctgcccttagagacaaaggatgacaatgtttccttttcaaaatatgtcaaagaaacatgttttggggtaaaatatttttattttcttccttgtctcataatgttatgcgagtcaggtttgaaagtaagtcatgatatatagggttaaataaaacccatctgggccgggtgcggtggctcacacctgtaatcccagcactttgggagggcaaggcaggtggatcacttgagatcaggagttcaagaccagcctggccaacatggtgaaattctgtttctactaaaaatgtaaaaattagccaggcatggtggcacacgcctgtagtctcagctactcgggagactgaggcaggagaatcacttgaacccggaagtcggaggttgcagtaagctgagatctgccactgcactccagcctgggcaacagagcaagactctgtctgaccaaaaaaaaaaaaaaaaaaacccatatgatgagaatttatgatttgtagggcatgactccccagaccccttagatcataatttgggcaagataaaaaaaaaatcagagcttagtcctcaggtactgttatctccgttttatgaaggaagaatctgagatacagagaactcagctacttgcccaaattcccatggccagtaagtcttcccacctcagcctcccaagtagctgggactacaggcacgtaccaccacacctggctaattgttgtattttttgtagagacggggtcttcctacattgcccagactgatctcaaacttctgggctcaagcgattctcccatcttggcttcccaaagtgttgggattataggcatcagccaggtagtggatattttgtctttgagccgtgtggtatttgtcacagctactcaattctgtccttatgggatgatagcagccttagacaatacataaatcaatggccatgtttctgtttttacaaaactttatttatagacactgaagtttgaatttcatataactttaatgtgtcaggaaatattcttccttttaatttttttcaaccatttaaaaatctaaaacccattcttagctcttgggccatataaaagcagcagaaggttaggtgtgaccctcaagctgtggttggctgtagttatgaggtagagtccaggatttgaacccagaccacaggttcctgcaagcctttaatcattatgtatacactgtacagtctgtatcatgataacaagaaaagaaaaataactcccacagtctgagctatgtgagatatgcaaaatctatcaggcccagagagactgggcctcagtcactgataaagagaaaacaaaaataactcacacagtcccagctatgtgagcaatgcaaaatctatcaggcccagagaaacggagggttggacttcagtcaccactcaaccctgtgcccgggggcaatttttttttgcttttgttttttgtcttttgttttttttttgagatggagtcttgctctgtcacccagtctggagtgcggtggcgtgatctcgactcaccacaacctccactcgactcaccacaacctccacctcctgggttcaagcaattctcctgccacagcctcccaagtagctgggactacaggcatgtgccaccatgcctggctaatttttgtagtatttagaagagacagggtttcaccatgttggccaggctggtctcgaattcctgacttcatgatccatctgcctcggcctcccaaagtgctgggattataggcgggagccactgtgcctggccaggggcaattgttttaaaggaattttgttcctgactggctgcctttctgttcctagaatgtgtgatacaaatagcaatgtatagccaatcaatagcttatgttattttaatgtaaataattggtaaacaactcagaaactccttcttttcctttaaaattcacttgtggccaggcacagtgcctgtaatcccagcacttttggaaaccaaggcaggtgggaagattgcttgagcccaggagttcaagacaagtctgggcaacatagtgaggcccccagttctaccaaaaaaaaaaaaaaaatttagccatgggtgatggcacctgtctgtagtcccagctactcgggaggctgagacaggaggatagcttcagcccaggaggtcaaggttgcagcaagccatgatcatgcactccagcctgggcaacagaacacacacacacacacacaagaatctacttgtaactgctactaagtgtatattcagagcaacttgaatatgtgctcccaagttgcaatctcaaacttagaccaaataaactctatacttacattaagtttgtctccgttttttcctttaggttaacaataataaaagtaaatcattctctttatagaaaactcagcagcatttgaaggagaaaaaaaaaacaccaactgcccataaaattaaaaaccgagaaataaccactcataatacttggtattttcttactttttctttttctttttcttttctttttttttttttttttgagacagggtctcactctgtcatccagatgggaggcagcggtgcgttttcggctcactgcaatctgtgtctcctgggttcaagcgattctcccgcctcagcctcccgagtagctgggactacaggcgcacgttatcactcctggctaatttttgtatttttagtagagatggagtttcgccatgttggccaggctggtcttgaactcctggcctaaagtgatccacccgccttgggctcccaaagtgctgggattacaggcgtgagccaccgcaccaggccttttccattcttttgtccacagttttgcagtattttaaattgtactaggggggaaaatccctattttaaaagaattctacagctaatattttcataaagcaaagtgaattgctttatgaaaacaaagcacttctattcacttttgataattgaatagctggtcacctttcatttacttgtcacatatcggcatttctgtaagctggatttttgaaagcagcccagtctgaagcagggatgtaataaaaggttttggaattaaccaaacttgaatttgaattctcattatccctttattagctaaatgacactaaacaaattgttaacttttctgtacttcagtatagaattttgagttgttcggaagaagagccaagacccttacctacctacctatctgtctatgtatctatccatctatccatccctggtatacagtaggtgatcactgagggcggcatgaccttatatcctgtgttcactcaccctccaccccaccaccactcctagtctttaacaccacccacaggaaaacagaggatttcactaagcactatagagaacgtgtccttttctggctgggcacggtggctcatgcctgtaatcccagcaatttaggaggccaaggcaggtggatcacttgaggtcaggagttcaagaacagcctggccaacatggtgaaaccccgtctctactaaaaataaagtcagccaggtgtggtggcatgcacctgtaatcccagctacttgagaggctgaggcaggagaattgcttgaacctgggaggcagaggttgcagtgaaccgagattgcgtcactgcactccagcctttttttttttgagactccatctcaaaaaaaaaaagaaagaaagaaagaaaaagaaagtgtccttttctgttttgtgcaccacaagagttttctccccaggagtgcaaataggatgccaaaaatggggataaaggaaaagattaataaggtgggcgggccagcactagatgcctccaccccgccaacccgcccgcctctctgccccaccccaaccaggtgtcagccctagtcattcaggagattattgcagaagtttccaaactgaagcaagctgtgcccaggtccctgtaacagcaggtggctttctgacatcagcagagactggtgctttttcccaggtacaaaggacctccagaccagagccagccagcagcaaaaagagcatggagctgaggagtacagcagcccccagagctgagggctacagcaacgtgggcttccaggtgagcagagctttcctcttatgttaaaggccttcagtggaaaagctgccctttccttagccccttggcaagtttcttacctaagcagggagattatcaggacaatacgatttttaacggcacactttaagcccattattttttcttcttgggctcttctgggttgacaaacctgaaaagtctcttttaatcgatgtgttgtgatccctatggtcacttagaaacaagacagccttcttctcttgccttttttcccttctggctcacagcaggggtccattatttatcttcaggcacttttccaaagaactggtgagaagggaaaaatgggggaatttagatcctggctggggtagtgtctcagggttccttttactcaagccaagtcctggagcccctgtcagatggccccggtacctgccccagagcagctggattacgcaaatcagtctcacttcatcaaccaaaactcactgagtgattaatgctgctcagcccgaggctgggtgcccgcagagacatagaaggagacctgtcagaaacaccaggctattttgactgggtctgggatggggatttccagggctgtttttaggtgtgcttcctttccttagctgacactcagcatgggcgctctggagaagatgggaagcctgcaccggcaagtgtcaacaatcccttggactttacggtctgctagatgggcaaaacaaaactttgaggtgctagccaagaaaggaaagagggaggtaaaagggctttgacaggagttcagactccagcacccacaaattcctgtaacttcccagagcccaagtttgatcatctgtcccatggtcacagtgatgcccatctccatgagtaggcatcgggttaccacttataggtcacaagtgtaggagaggaaacaa

SEQ ID NO: 12326 - DNA, 6000 bp, Homo sapiens
atgtctatatttataattctcttttccaacacagagaaacccattatccttgatatatttactcatttggtcccttctagagcacacggaaagtagtatcagaattgctcacccaaaccactgttagtcatgaacctgcccatgagagcttaggatgtgtttacagctctttctgctgttagcttgagaatacagagaaaaactactgtgttcagaagttaccaggggcagtcctttccccttcagtgtggctgtcatttatctataatgcaactatatcccatgtttggaatttgtttattttacttttgagtataacagtataacataccaaattactttgattccaaagtcaaaactatacaaaaacgtttactcaaaaaagtctaacttcatccccccaccctgttccagctccccaccccagcagggaactagtctcattagactctgaggtttatcctttgtttttgtttgtttgtttgtttgtgtgtttgtttgttttttgagacggagtcttactcactctgtcacccaggctggagtgcagtggcgcaatctcggctcactgcaacctctgcctcccgggttcaagcgattctcctgcctccgcctcccgagtagctgggattacaggcttgcgccaccaccacgcccggctaatttttgtacttttactagagatggggtttcactaagttggccaggctggtctcgaactcctgacctcaggtgatctgcccgcctcggcctcccaaagtgctgggattataggcatgagccaccacacccggctgatgtagcgtgctgttttgtggctgcctcgagaaccaggctccccgcagcccttagggacactagtggggctggcaggtgtttccttctcagaggcctggcccagctgctcggcttcctcctttttgtatttttattttattttagagatggggtcttgctccatcacccaggctggagaggagtggcacgatcacagctcactgcagcctcaacctcctgggctcaagcaatcctcctacctcagcttcctgagtagctgggactacaggagcacgccaccatgtccagctaatttttaaacttgcttgtagagacgaagtcttgctatgtcgcccaggctggtctcaaactcctggactcaagtgatcctcccgcctcagcctcctgaagtgctgggattaccgcgagcagccacggctccctcctgaaggctccaggcctaagtgtcccgctcccttgttctgtggctcagcccctgggcaactcctgcttgccatggctgtggctggcacctccgtggccccactgcccggtcagtcttcgcaggcccagcccccagtagctgtgtggtttctgccttcctcctgcactctggtggtcacaggccctgctgcgtgggtacagggcaggtggccagggctgcagcataagctctgtgagtgcaggcggccctgggcactggagccttgttgcatggacgtgctccttgcacccttgttgatgaatgagcgaaggtgtgtgggagtgaatcccagagggtgcaggccacggcactgggggaggaccctcccggctgcctcccagtgggcttcaggggctcagatagaccctgccgagcacctctgtcctctgctcccggactggggctgcagagagctctcaaggggccttgggaggcacaagcaggccagggtcccagggaggggaggcaggaggcagcagggccggatggtgggctgcagaggtggaaggaacaggacagtctgttctgggggtgctggctgtgggggacagaggccaggccacaaagcagaatggtgggtgggccaggaggaggtgggagcctttttcaaaaggctttcagggactttttatatttaatgattgaaacaaaagatatccaaaaccgcagttcctgagaaccacttgttctcgccctggttcctctccttgggcttgaccttggcctcctgccgggcctggcagcggacagcagtctccctgcttcccaggctgggcgagggagagcgtgggtccccaggaacgggggaggtggtgcggctggctttaggatgcccattctggaaccttctggtggaagaaagcaggggatcagtatagtatggttgatccacacactccagaccctctcctggctgtgcagctggtctgatctgggctcagaggctgccactgctcagtgctcccctgggtaattttgcaggaggccaggagggttcctggcagttagtgccacccacacggagaaattcagagccatataaacgggtctccagggcctggagggactgcacatcctgggcctgcggcgcagtgtagacctgggaggatgggcggcctgctgctggctgcttttctggctttggtctcggtgcccagggcccaggccgtgtggttgggaagactggaccctgagcaggtacagtcctcctgggggtggggagagctggtcctcgggggccagcccctcctttaaggccacacagcttctgggccccccagggctagcccagaccagcatgagcagtggggaattagttgggccagcccttggggagtcccacaggcaggagcctcagggcaggaggggtggatgctggagggttggaggctggagggctggagaattggaggctggagactggaggttgcagggctggagggtgtagggttggagaactggaggctggagggctggaggctgtagggctggagaactggaggctggaggctgctgggctggaggctggagggctgtagaactggaggctggagggctggaggctggagggctgcagaactggaggctggagggctggagagctggagactagaggctgcagggctgcaggctggaggttggaaggctggagggctggagcctagaggctgtagggctggaaggctggaggctggagggttggaggtctggggggttggaagctggaggctggagggctggagaactgaaggctagaggctgcaaggctggaaggttggaggctggagggcgggagggttggagactggaggctggagggctggatggttggagggtggaggctggaggctgcagggctggaaggctggaggctggagggttggaggctggaggctggagggctggatggttggagggtggaggctgaggctggaggtttggaggctggaggctgaggctggagggttggaggctggaggctggaggctggagggctggcggccctaacgggagccgcctcaatgcagcttcttgggccctggtacgtgcttgcggtggcctcccgggaaaagggctttgccatggagaaggacatgaagaacgtcgtgggggtggtggtgaccctcactccagaaaacaacctgcggacgctgtcctctcagcacgggtgagtgggcgggtcctgccaggccttcccgcaggcaggactgtggctcagccacatcatgtactttgcacatctgctcccgggcaccgcggcctgggggcttcccacggcccctctgcacccccgtcacttttcccactgggctctgtgcagagccaccagccctctgcccagctactcacatctgtgtccctggggcctccaggtggcactcccaccttcaataccgcggcgggcactgctctgactatgctccttcatgcatccctgtcctgggtcatctgggctgcaggctgtggtcagagctggggaagcctgtcctctcagcaggcctttttcgggaattctgtttaaaggaggataatgcattcggacctaagaaccactggttctttcataacataaatccccaaacaatatggtcatggacgctgttggccagactggccttgtggcctcaggcaggcgcacccgaccacatgcatggctggtggcggcgtgcaggggtcgggtgggccaggctgtggggcggccgtgctacacaggggacacctacagggcagccgggctgtgggggtagccgtgctggggcaggagtcggtgcccgcctcccttcacagaagagtggcctgctgggtggcgtggtgggtgtctaccccctggcaggctggcgacagagcccaggcctgaaccactgagccaggtacggggcccagagagaagaacctgccctcctcaccagcgtgccttccccctgcacctgcgcctgcagggtatgggcaggggccccactgcaccccccgggccaggcctggcctcagggcgagctgggaccaaggggctccaggctgaggtggcagctcccacgtggctttcctagttcttcttgctgttcctcccgcatggactcagcctcagtttccttccttggcaaacaccattgcacctttgctgggttttgctcactctggggactgaccacttagggagcgccggccccttcccccgagtcgcaggcaaacccccaccccgccccatccttcccctgagtcgcaggcgaacccccaccccaccccatccttcccctgagtcacgggcgaacccccaccccgccccatccttcccctgagttgcgggcgaacccccaccccgccccatccttcccctgagtcacgggcgaacccccaccccaccccatctttcccccgagtcgcgggcgaacctcccgtctgtcgagtctcctgttgtgtcctcagcagcattcagcgttcctggtggagatctggcactgaggatctctcaggaagtgaatgggagtgtccgcccctctcaggactcccacgccgtccactctccgagaacaggtttccgggcatcggggcatctggcagaagatggaagctctggcctcactgctggctggcctggcctggactcctgagctccgtctcctctcaccgggccccggggtcttgaccctgagtgggtgacaggccccttcttttccaggctgggagggtgtgaccagagtgtcatggacctgataaagcgaaactccggatgggtgtttgagaatccctgtgagtctgacggccacggcctcacccaggccgttcttccctgcagcatccccaggccccctgcgggcagggacggagggctgactccgctcccgagagccaggaggctacaggttctggtcttgggattgctgcccatcctgagggtgaagagaagcccctggacagaggattggaaccttgttcccagcaggctcagacaccagtgaggtccagccaaggtccccataggtgcagagggcgaggggcctgtttagtggctgtctacaggtacagggctgggctggtgtgacccagccgctcctcgttcacacctgggacaggctggggcagtgcttgtctgtctgtccgtcagtgtctgaaagccccttgatgctggcaccaggtggggtcgggggtgggggacaaagcttgggggctctgggtgtgcttggaggggtctcctggggaggggggctctcacttgaattggcccctctgtccctgtggccagcatcagctcagcggcccctggatggatacagcagctgccctcccctgaggcggggggttttgtttcctagcaataggcgtgctggagctctgggtgctggccaccaacttcagagactatgccatcatcttcactcagctggagttcggggacgagcccttcaacaccgtggagctgtacagtaagtgtgctgtgcggggcccacgtagggagctgtgtggtgcgtgggccactcggggcccacgttgggagctgtgtggtgcgtgggccgcttgggggccgcgtggggagctgtgtggtgagtgggccgctcgggggccatgtggggagctgtgtggtgagtgggccgcttggggccacatggggagctgtgtggtgagtgggccgctcgggggccatgtggggagctgtgtggtgggtgggccgcacaggaccacatgcaggccaagttcccccaccttgaggctcgctgcactggaggtggctttggaaggaccgg

SEQ ID NO: 12327 - DNA, 6000 bp, Homo sapiens
atgtatcaaattgcattccagagtgtggatttgactctagtgccataatcagtctcctgggacaaacagctgtttctcttccctcattatagaaaaaaattgcccttggcaaatgtcaaagaacatccttttatcaatctctcttaccaatcaatccaagcaaatgcagtgggatttcttttccccagagttgaagtcacctcctgacaggaagttaagtctttaggcactgaatcatagcactgagctgaagcccaggactaagcaagaatgagtgagaatttggagacttaaggtttggtcatctgtagaggattgggttttgtcttgttttgtttttgttttggtgtcctgcaaggtttctcactgcccttcatcaggtaatatgccctgtccctgaactggccaattgtgttaccccattcccttagcaacagtgattgctactgaagaaacaggaggccaacaaagaatatcactcattcaccagtagagtgtctatgtcagagatattagataaacaggaaaactaacaattacattgcaggctgtggaaacagagagaggtacctaaggcacacctgtgggaatatgaaagtttggtttcataaaaggattctggaggaagtcacctctgacatttgagttgagtcctacaggatatgaagaaagtagccccatgttccggttactatggctgtgtaataaattacctaaaacatactggattaaagctatgaaaacatcttttctgcccagagattctgtgggcctgaaattcacatggaacacataaggcataccttgtttctgctccatgatgtctaaggattcagctggaagactgggaggctgggggctggaatttatctgaagaatgactcatttacatgtctactggttgaccctggctgttggctgagggggcctcagctctctctacattgtttctctactttggctagtttggatttcctcaaaacatgatggctggtcctcagtgtcagcatcccaaaaagagaatgccggacacagtggctcacacctgtaacctcagcaatttgggaggctgaggtgggaggttgcttgagttcaggagttcaagaccagcctgggcaacatagtgagactctgtctctaccaaaaatttttaaaattttaaaaatcagccaggtgtggttatgcacacctatagtcccagttacttaggaggctgaggcaggaggatcacttgattccaggaggtcaaggctgctgtgagctatgaccacaccactgcatttcagcctgggtaacagaatgagactctgtttcaaacaaacaaaaacccaaaaaaaaaaaaaagagagagagagggagttagaaggaagatgcatcatttttatgacctggacttggaagtcaccaagcagcacttctgcagtaccctgttggttggaatagttgtagcccaaacccgaattcgaagggaggagaatagataacatccctgggtgacaggaatgtcaaagtcccaaacagcatatgacatgtgacaaatattggtgtggccttctttggaagatccaatcttccataccaggcaaagggatggaagactaaggaacaacatgagggatagccagagagggaaaaagcatcacttgttctaggaactacaaatagcttgaagaagcaaagatgtctagatgcctcccaatatgcagagtggggtgtacagaagagagtggtaagggcgctgggagagctaaggtgggcaagagagcttcctctgtcatgctaagaaagttggaatttatcttgatggtggtgaaagcagagggctatggttagattcacatttgagatttagatttttagatttaaaatgatcaccctggtgacactggcttaactcacaattttgcccaaggcctatgctaccacagtgcttctgaaactttaaagcacattagaatcacctggaggtcttgttaaaccatggattgctgggccttgaaaccccagagattctgattcagtagatcgagaatagggcctgagaatttgtatttctaacaagtttccaggtgatgctgaggctgctggcccagcgaccacatttgataatcatagccctctgataaatcctatcaaaatatcctaatggcagagcaagggaattctggtgatatcctcccctacccataacctgacagctattaggatctgcctacttgaggctaaaagcaaccaagagaggaacagctacagtgtaccacagagtccctcaacatctttgcccacgccacggtgccccagcttcttaccaagtgtgcctgattcctcttgactacctccaaggaagtggagaaagacaagttcttgcgaagccttcgtcttctctgatatgctattctatgtctatttctttggccaaaaagatggggcaatgatatcaactttgcagggagctggagcatttgctagtgacctttctatgccagaacttgctaagcatgctagctaataatgatgtagcacagggtgcggtggctcacgcctgtaatctcagcactttgggcggccgaggcgggcggatcacctgaggtcaggagttcgagaccagcctggccaacatgatgaaaccccatctctactaaaaatacaaaaattagccaggcgtggtggtgggcacctgcaatcccagctactctggaggctgagacagaatctcttgaacccaggaggtggagattgcagtgagcagagatggcaccactgcattccagcctgggcaacaaagcaagactctgtctcaaataataataataataataactaatgatgcagctttctctctctgagtatataatgcagttctgatgatgtgaggaagggcctcactgttggtgtggcagagtctgagaccatggctggcaatgaaaacactaccctttgatgcctatgggctctccctttatggtttcaaggagggcttctcaatcttggcagaattttggactggatagttctttgttgcacaggtggggggctgtcctgcacatcacaggatgtttcatccctggcctctacctactagatgccagtagaacatacccaccccacagctgcctgttgtgacaatcaaaagcatctccagatactttgcagggggaaaatgatttctccaggcctggcatatacataacagtatttaagcagctgcctagaattaattaaacacagaaggatgtctctcatccagaatgccctggaccacctctttgataggcaatcagatcccacctcctccaccctatttttgaaggccctgtgccaacaccacttcttccatgaatacttccttgattcccccatccctagctctatataaatctcccactcaacactcacacctgttagtttacattcctcttgacacttgtcatttagcatcctaagtatgtaaacatgtctctcttcacgattcacaaagtggctttggaagaactttagtaccttcccatcttctctgccatggaaagtgtacacaactgacattttctttttttttaagacagtatcttgctatgatggccgggctggaatgctgtggctattcacaggcacaatcatagctcactgcagccttgagctcccaggctcaagtgatcctcccgcctcagcctcctgagtagctgagatcacaggcatgcactaccacactcggctcacatttgacatcctctaaagcatatataaaatgtgaagaaaactttcacaatttgcatccctttgtaatatgtaacagaaataaaattctcttttaaaatctatcaacaataggcaaggcacggtggctcacgcctgtcgtctcagcactttgtgaggcccaggcgggcagatcgtttgagcctagaagttcaagaccaccctgggcaacatagcgaaaccccctttctacaaaaaatacaaaaactagctgggtgtggtggtgcacacctgtagtcccagctacttggaaggctgaaatgggaagactgcttgagcccgggagggagaagttgcagtaagccaggaccacaccactgcactccagcctgggcaacagagtgagactctgtctcaaacaaacaaataaatgaggcgggtggatcacgaggtcagtagatcgagaccatcctggctaacacggtgaaacccgtctctactaaaaaaaaaaaaaaatacaaaaaattagccaggcatggtggcgggcgcctgtagtcccagttactcgggaggctgaggcaggagaatggcgtgaaaccgggaggcagagcttgcagtgagccgagatcgcaccactgccctccagcctgggcgacagagcgagactccgtctcaatcaatcaatcaatcaataaaatctattaacaatatttattgtgcacttaacaggaacatgccctgtccaaaaaaaactttacagggcttaactcattttatccttaccacaatcctatgaagtaggaacttttataaaacgcattttataaacaaggcacagagaggttaattaacttgccctctggtcacacagctaggaagtgggcagagtacagatttacacaaggcatccgtctcctggccccacatacccaactgctgtaaacccataccggcggccaagcagcctcaatttgtgcatgcacccacttcccagcaagacagcagctcccaagttcctcctgtttagaattttagaagcggcgggccaccaggctgcagtctcccttgggtcaggggtcctggttgcactccgtgctttgcacaaagcaggctctccatttttgttaaatgcacgaatagtgctaagctgggaagttcttcctgaggtctaacctctagctgctcccccacagaagagtgcctgcggccagtggccaccaggggtcgccgcagcacccagcgctggagggcggagcgggcggcagacccggagcagcatgtggactctcgggcgccgcgcagtagccggcctcctggcgtcacccagcccagcccaggcccagaccctcacccgggtcccgcggccggcagagttggccccactctgcggccgccgtggcctgcgcaccgacatcgatgcgacctgcacgccccgccgcgcagtaagtatccgcgccgggaacagccgcgggccgcacgccgcgggccgcacgccgcacgcctgcgcagggaggcgccgcgcacgccggggtcgctccgggtacgcgcgctggactagctcaccccgctccttctcagggcggcccggcggaagcggccttgcaactcccttctctggttctcccggttgcatttacactggcttctgctttccgaaggaaaaggggacattttgtcctgcggtgcgactgcgggtcaaggcacgggcgaaggcagggcaggctggtggaggggaccggttccgaggggtgtgcggctgtctccatgcttgtcacttctctgcgataacttgtttcagtaatattaatagatggtatctgctagtatatacatacacataatgtgtgtgtctgtgtgtatctgtatatagcgtgtgtgttgtgtgtgtgtgtttgcgcgcacgggcgcgcgcacacctaatattttcaaggctggatttttttgaacgaaatgctttcctggaacgaggtgaaactttcagagctgcagaatagctagagcagcaggggccctggcttttggaaactgacccgacctttattccagattctgccccactccgcagagctgtgtgaccttgggggattcccctaacctctctgagacgtggctttgttttctgtagggagaagataaaggtgacgcccattttgcggacctggtgtgaggattaaatgggaataacatagataaagtcttcagaacttcaaattagttcccctttcttcctttggggggtacaaagaaatatctgacccagttacgccacggcttgaaaggaggaaacccaaagaatggctgtgggga

SEQ ID NO: 12328 - DNA, 6000 bp, Homo sapiens
acatatctgttaaatgaatgaatggcttaagtgttgattattacagggatattcctaaacactgctgagccaaggttctatgcaggtgaggggctgggcctggaaccagcgtgaaccgccgctgggccctgtcctcaggggcttcacagacaaagcgggaaagcctatgccacgtctcaaattagcactgccagatgcacgctacatgagctccagggtagagacacgaggctgggcaagggtattgctaagaccatgaaggagctgtttctgattttagataatggaatcagaatctatgcatgattgcttccttagcgctccaaagaaaacaatttagaatgaataagcttgccagctctgtcatgtaaatgccaatacctattgctttttctgaatagctctaagttgaaatcacagatttttcaaatgacagaagtaatggcataactggtctggagagaaagattaggtattatattgtgaatagggtgaggatataagaagtgccttaacaacatcatatactatataatcattattggatgacccgcattagaaggctggcagaattctcactcagtaattctgcttggacagaattcccacttagagcataaaaccttccttcagaatttacatacttaaattatatttatataaattatatatttaaatattatatttaaatgaattgaggattagccggtggggcacaaaaataaatgattcattctttccatttcctctttaaagaaatgaataatactacagggacagttattagctcagacagagcaggtcatcaaaacacttgagtcaccctaaattataggcgggacactaagcaggacacagaaagagacatactatgagagaatttatttcataagaaaatattaattttctcataatcaaattattcagatttaccttaaaataacaactattgagtgctgaatatatgccagccacacaactgagtatctttcacacctctaataacaaacgaagtaataagtaatatctccaatttccagatgaggaaattgaggcttgtagggaaatacacagtttgcctgcatgatagagcttgatagtaccagaattcaaatcccaaggactcttcactccaggctctgtgctcattctaccattctatggaagcagagaataagcctataagaattgtaatgaaagccgtgaaagtgtttctagtggtattttagcagaggattttcctgtgaaaatccaagatactattttcaggaccatgtagggtgtcgcagaaatttaaaaagatggtcacctaactattgaatcccttcatcttgtgaacaagaatttgagaaatgtttagttcttagcatttccttgtccatgaaaagagtgaacttccacacctaataaagatgacccttattacatttcccctcatgtgctgtatcttgaaaaatcaggctttaagctggctcataaaaatctttgcctcttatttctataatcaaatatttcaaagtattagggctactgaattatagtagtgactgaacatttcattgcattattatttctttaaattattttttttagaaatagagatgagatcaggctggtctcaaactcctgaactcactcattcctcctaccttggccttccaaagtcctaggattacaagtctgagccactgcacctggtcagggaccaaacatttgaacggctataatcagaagaagatgttttgtcatgatagttaataaatttcacagttttttttcttctttaagttccacatgctgaaaagtccaaaagggaggctgcattagagctcttgcgatttttctggatcagttaaggcagttataaaataagctcttactatcattatctagcaagggtttatgaatagactcagtgccactgttataagtcactggaatttcactgtcaattaaacaaatcagcccttacagactacacaaacaagtatgagtttccactcaggcccagtactctgaagaaaaaggacaagaaaaggacccctgttaatgggcatatcgggggtggtctaggtttgagacttctcagaccagaagcaggactgccctttgttgccatctgaaggaacaaatatctaggaagatttcagctgggcacttgatttttaagtggtgactttcctttctggagaaaagtactcaaactaagctcttggggctcacagacattaaaattggaggaaagtgcccatctgagaccaaaggccatgtctgcaaaatgagcatgtacttcttcttattcacgcaactgattccaaaggccagggaacaattgcttaaaaccttctccaaaccagtctccagtgaatcgcatgctgacgagtggtgtgcaacacttgggtagcaagtgagtatctctggagagccccatgctgaaaaggcaggataactccacttccacagggaatcaggagggagactcaagccaatgtttatcctgcaaagtcttttttttttttctttttagacaaggtctcattcttgttgcccaggctggagtgcagagtcacgatcacggctcactgcagcctcgacctccctgggctcaggtgatcctcccacctcagtctcctgagtagctaggactacagatgtgcaccaccacgctaatttttgtacttttttgtagagatggcattttgccatgttgcccaggctggtctccaactcctgggctcaagcaatcctccttccttggcctcccaaaatattgggattataggtgtgagtcaccgtgcctggccctctaaaagtccttttcctttttttttttttttttttggtggattcttgctctgtcacccaggcgggagtgcagtggcacaatcttggctgacttcaacctctgccttctgggttcaagcaattctcctgcctcagcctcccgagtaactggggttataggcatgagccaccttgccctggcatctctcagtcttcaaaaagagatttaacaattaatcctcgactcttatcactaggaaaacaaacaaggccatctcttctctttggcctaaaggaaatcaagtcgttctttgtagcgtatgctatttaaatatggtagagtaggataaactttcccttaaaaatgttcaaaaccgaaaaaaaaaagttccaaaaccacttggcacttcttgggggaaatagtcaagatttgcttctgtacttctctcctttcctcctacaaatagcctctgctagggccattccaggatgttatttatttactagaaacctgactttcctttccccaaggttctggagaatccaatctgaccccaagaatcccattaacttccaaaggccatttccatgccctatccccaccctgaggggagggggcggttcggaggagaagcaagcaacaccatatattctgagatttaggagcagcagttggagaggaaggtacctgaggttgggaggaaacaagctgtccccacttgccttttcagcaaacacagctgcagtttccaaggggaaggtggagcctgccgaggaatccacattcctcagagggtgcaacagccctcacctgctgaggagctatcactgggaaggcgacagatatggcgctaatcccaaggaagtgcatccccgggccggagctagaaacacacaaccttggtaaaaaatcagaatctaaataggaataactcatacctctgagcaatggctcagacatccacctggtccagtgatctgtgaggggtggatcacttaaatacacccttgtttaaaaacaggcaaggatggcttaaacattatcttaaatacaaaaacaacgtggagagcaaggaaggcaggagaagagacggctgagttctcttagctctcttccccggtgacctcccgcgggccacagtggcacatcccagaattcaggcacgaatctggcagcttttcagagcccgggtgcaggcagtcggcgctcgccgcgtgggaaggcacctttccacgcactgcccaggatgagcggcgacagcgttctcagcctccctcccctaagggtccggcccatcccggaggccagggtgcctcttccaattcgactgagaactgtaatccacactcaatctctgcccgcgcagcgaggctgggggtgtggggtgaggaaggtggcggtgatagggggagatacggtgcgggattaacaaagaaaaaaatcgaaccctgttttcaaacgagcagaaccaagagctacttgcttccctttctacccccaagcccctttgatcattttgggtagagcaggaaccagcagctcaaggagcactcaaatgggagtcccagaggagctttgttcttggtgtgcagtaattagagcgcttgggggaaagcccccgcagggggcccgaggctaaggccgagggggcatcgagggaccctgcatggagtgcgccagcgccaagcccaccctcagccgcacgcggcctgggcgcagagagcgcgtgagggtgcgcgcatcgcccacccgccgcgccgctcacctagcaccaccgcggccacggtggacagcaacacccagttattcttcaggaagcgcttccactcgcatcctttcctcgccggtttccccatggctgtcgccgctattgtgcgctgggctcggccgtgcgcgcgtgggctgggcgacccggggactgctggctgctcggcggcgcggcgagatgcgggtgcacaggggagaggtgagagccggccgctgcagtcgccgccgtcaccaccgccgttgccgccgccacccgggatcgcgcaccgcgcccgccgccctgccagcccggtagttttgcgtggcaggcgcgcccggctcctcctgctgccgccgcgctctgcggcgcctgggccaaccagcgaggaaggagggaggagcggcaggcccgggaaggagggtgggtgcgtgcgtgggacgcccggggtccctagggagcaggcgtggtagggcgcccagcgctgcggcaggagctggggcggcctctccgggaaccctgagtcccgccccacagccttccactggagtctgtctcgctttccacgcctcactcatgctagggctttgggttaagggttttcttctgtccctaacccagagaggcggagccactgccctcctgggcgcggacttcatcctgcacgtctccctctccgttctccacaccagctatttccagcgccggcacctgcagaacgggtgccctttcaagtcgggggaagctgatcctgccttgggtccctcttgctcggctactcaggctgggatgtgccagcagccgcgaaagcctgaagcttctgggaggagagaaaggagtcctggggcagaacatggctttggaaactttcacgcggagcctccagtgcccccacagggattattctcctcttcgagtcgctggaggtgatttgtctgtggacactgggcttgggagtgttccctgcacaaggagatggtgatttctcttagaactttacttctgctccttgggacttgctctgtgaccacaggccctggagcatggaggcttggggcagtgattagaactgagaaccggacccgggagccgctctggggagaaagtgggcggtccatcccctaaggtccaacggattggaaaggcaaacacaggagaaactaggttagtggtgccaaatatatttggtgttgctaagtgaatttctgatgctcttccatttttctacccaattttttcactctcacgtatacaatctctttccctccctttaccaaatcagtacctccgcagctgtaagcggtcttcttatcagcgttcctaaagttaagtgagcctggaaccctttttgctattgtagaatctactctgattgtgggtagggagaatttcccctactagattttctgatgactaaatccccacaattagagcttcatccctttggtgtaaattgatacaagcatctttt

SEQ ID NO: 12329 - DNA, 6000 bp, Homo sapiens; identical to SEQ ID NO: 1345

SEQ ID NO: 12330 - DNA, 6000 bp, Homo sapiens
gacacatcttacctcaaatattgttagtgcaagaggatgagctaggaactccagagactttagtactatcctacgatcttggccattcaagtccacgctggataacatgtgcaacttagaatcaagccaatagaggcgactttttataaggtctaggtaggaaaagaattgtcattacatgacaagccactactactctggcttccattaaaaatatctaatgaattaataatctactttcacggttctttccccagcagggtttcttaacggggtcaccataaaccttgcgaagcagcatgcagagcctgtatccacgttcatttttggggactaacagggtacctgagattctcaaagcaaatgacttaagaaatattactcacattacagaaaatattaaaagaggctaccattttgttgttctcctccaaaaagccagaagaaaactgttaaaagcctgcaattcaggaaatgctaaggcactcatgcccagaatatttagtatgagtgcacccaagacccaacgttcactgaatttgtgtcacatattaggcccagctggacaacaggccagtaattatggaatgtgtaatttgttaatccaccattttacttgtgttgttcagttactcccattgaaaattcctgctagaatttaggcggaagcagtagagtcatctgctagtccagaattcaccatggagataaatggaaacactatgaagatagttgagtgggtggtcgagaaggaagaacatacataccaagtgtaattccgttaggccactggatatccgctgtcaccagtggacgtctatcgaatccattcattcctgctttttctattttagctggttcaccccagtctgaccagtaaacaaagctgtgaaaaattaaatgagaaataagcctcagtggtttagaaggaataaagttgtagtagctggaaacaaaaatttaaaatttgagcagaaaactcaaggcattctctagtgacaaatagtaacacttaagggtctaaattatgttctaggtaaataaaattgaatattaagaatctacaagctcattattaactataataatctatgtttgtctgacatttaaatttcggcccaaagtcacaaggttatgtttcctttttaaaaggtcagttcttacagaggagtgcaagacgaacatccttcaaatttcatagcaggggttggctggctgactgagttctaatgaggctgcacgggggccagttgtgatgacaactacagccttagtcaacttcctgagctgctcttctatgttacttagtggcaatttacagaacccccttagtgaaatgtttctagaaaggtctgtttatttctgctggactttcagacaacttgcacacttagatgcaatgtggttacccaaatcctcacaattcaggctgtcgtttaggtttgatcatccagagctagcccagcaaagctttcagtcaaaaattaaaaaatcacttgcgtagaaactgggtggacaaaagggttcagatacagcttttggtacacacatcaaatcaggaatgttaattcattaatgtcagccagcaatcagtcatacgagagtcagacaggaggacctgtcatatagataaggacatcccagggtcactcacctggggcaaaactgatatcttaaattagaattctaattctttgttgcagaaggctcataaaccttgagatttgagtactaattcaggtatgagaaagctcctgacctacacagataccattccaaagtctgtgatggaaaacagactacaaacccagacagtgggtccacagctatggaggcaggctctcgcaagtcagagttaaacaggaacttcctcttggttccatctagggtagctactgaaatagtcttagaagccgcatcagtccagtagatggtcttgtacacccaatcaacagcaatggctgcaggattatagacattgtcgatcattttaacatgtctaccaaccttgtcatcaattgaggcactgaaacagaataggtcacaagaaatttaagagtttgacacaattagagcttggagaatggactttttgcttacaaaatggtcaatgactttgttcagaaagaaatccagttaacaccacagctcaccactcaaattatttaaccatgctgcttactgatcctaaattaataatgctgtagattatctagttgctggtatgtattctatatacaagaacaacaaatttctaagtgaagctatttgtttcagtatccatcatctgagtttctatagttcccattaagaaaaggctgtactaccatttctatttgtagcaacaatgaacagttctcaattaactgtagagaaaagggagaaaatataaaaaatatgaaagatgtcatcttttacttcatagacaattgttagtttctaattaggaagtgataacagtttaataaagaattagcattagatttaatgtccccaggtaattcgatgctagatggggctagacacaaaagaaactcctccaaactatcccacagatcacttcccaagtgacaatgacttatgtcaagacaccacaaaaggaactgaaagttacctgaagatagccttttggcttagatcggcccagaatagtttctgggcagcaatgtcagcatcgagagccacagtgtttcttagctgttcaactagttggatatattctttcctctctaagccaatcttcctgatgtctcttcgattagtgaagatcagacttggctctttgcctgcaagatggaagtctgggttacttagttttgctttaagaaggcaaggtctttctaaaccacctcctcccagcagaggagcacttagaaaataaaggtattgtggaatacctcagtagtatctgttctggagttcctgcccctgggacctgcaagtgcttcctacagtttaggaaggcagtcgtggggttacagccttcaagaacagggtgagtgatgaataagtcacttgtttgagttggactcaagttttggaaacagagcatgcaaacctggtaggtattcatggtatcatatgcaaaaggaatgatcaaggtacatatctaggggagagatctgctatttgacctatactgctgtattatgaggttagcagcattgttctcaagtacaatttcatgtttagtttgactattgtagtcactggctgtaccttttagaggcacttactcataaaggtacaacagccataccagtccaagttcatttacctactgccttgcacacgccagtagcaagatccatttgatagccacgactacattcacacttgtaaccgccttttaagttgatacaaatttgactgcagattcctggattttggcattcatcaatatctgggagggaaatcagaattagtcttgctgctcctataccttactaggtacatactatcctttcccatcacctgcagggtccaggttttcttcttagactcacctccacaggttttcctatctatcagttcaaacccagctgcacagtcacactcgtagcctataactaggtctttgcagatatgagaacatccaccattatttaccaagcattcgtttatatctggaataaaaatgtagtagtcacttgacaacttattttcaattaatatctttcacatttaaaacccaggctatttgtgataacttatctagttggcctggtcaaacccacgatttgtctaagacctaatcatttattttataggtatatatttcagggtggattatctaactcctcggcaagttaccagctggtcaagcatttagtcaagtttctctattgatgatcagttatctttaaggaggttaaactataaactagtttgggccgggcgcggtggctcatgcctgtaatcccagcactttggaaggccgaggcgggtggatcacgaggtcaggagttcgagaccagcctggccaacatggtgaaaccctgtctctactaaaaatacaaaaaaaaaaaaaaaaattagccgggcgtggtggtgggcgcctatagtcccagctactcaggaggctgaggcagaagaactgcttgaacccgggaggcagaggttgcagtgagccgagattgcatcattgcactccagcctgggcaacaagagtggaactccatctcaaaaaaaaaaaaaaaaaaaaaacaacaaaaacaaaaactataaactagtttgtcctacctgggcttttaagtcataaagtttcactctgaagtctacaattgaacttcagtacattcaaaagtttaactagccatcacggggggtccacacagtgttagctatactggattgtgtcaaacttccaggatctgtacttgaacaacaagtacacttacgacactctttcaggggctcatcactccagtccctgcagtcctgctcctggttacatactttgctgatatctatgcattctccacttctgcacttgaattttccagggcccaagcactgattgactacaaagagaaacaaagaagagagattccatgagtgggtctggtcagagcaatccattgcttaaccaacaagaagaaacccttaccatttttgcagttgacttcatcggaaccatcgacacagtctcggataccattacactgcctgctgccatggatgcagctgccatcctcacattcaaattggtcaggtcggcaagttcgagaggctacaaagggaggaaacaccatggaatgaagccagcaaattgtcccagttgatacagggaagagaactgaacatgccatgctagaaagctacttacgacagttgacctcatcactgccatccttgcagtcagggtccccatcacatcgccacttcttatggatgcactcgccagagccgcactggatttcgctggctggacacttggtgtgtatgactggctgacggccacactgctccagggactcatcagattggtcggagcagtctgcatcatcgtcgcatacccagctgatggggatgcaggaggaggtgctgcactggaactcatgggcgccacaggttggcggggcacagtccagctcatcactgccatcgctgcagtcatcctggccattgcatacaaagttcctggagatgcagcggccactggagcaggtgaactcgtcgggactacatgttatattgcctattaagagagaggatgccccactgaaaatgcatcaagattggtccgttcaagattcttgtcccaaaatctaatacattgatctttattcattaatcctaacttactagcccaacttaaaggctacaatggagttaaatcaagaacttttgtacagtctcattgtacaaaaaatgaaggcacacaataaataagaagaacagaaataaagaaccaagaaaatagttgaagactggaaattaatttgagatgagaaccacaattgattctaaaagtggccatcataaataacaaactgtaacaagggatttcaatttggaaggcagagattgagttgtccttgaatcaacatactgcttgtcagatcttatcactagttgagaatatcatgcaacgtaatactcacaacaagcattaagactttgtcaccaaaagaggtgaaccacataccaccatatatggttcctctttttggtcctttaaataaggatcaggaataacaagtcttaaacactttccattttgaaaaagtcactgccagggctataatcaccatttaacaatcaggtatgctgacaatgataagctagtcctactagccaattggtactttgacttaaattcctgccaaatgtttcaaggtcacaatttggtggcaattagaatagagaccacgactctcttgggaagcaaagtctagatttataagggaaacacttggcagcaccagggcttaccaatacagaaaacccaattctaggattgaacactaaaactcattggactaggtgcagtggtat

SEQ ID NO: 12331 - DNA, 6000 bp, Homo sapiens
cctctgaaagtgctgggattacaggtgtgagccaccatacccagccacataaattgaaagacatataccaagtgtttcaagagttggactgggaacaggggtaatgtgtggctgtgtattcccctttataccttctcaatgttcccattttctctcctaagcccctataacatttgaaatcagacaggtgtggtgtcttatgcctgtgatcccagcatttcaggagactgaggcaggaggatcacttcagctcaggagttggagaccagtctgggcaacatagtgagacctcatctctattaaataattttaaggccgggcgtggtggctcacgcctgtaatcccagcactttgggaggctgaggcgggcagatcacgaggtcaggtgatcaagaccatcctggctaacacggtgaaaccccgtctctactaaaaatacaaaaaattagccgggcgtggtggcgggcacctgtagtcctagctactcaggaggccaaggcaggagaatggcatgaacccgggaggtggagcttgcagtgacctgagattgcgctactgcactgcagcctgggaaacagaggaagactctgtctcaaaaaaaaaaaaaaaaaaaaaaatataaaacaaaaaaatttgaactcaaccaaagtaaaacgttaacagaaagggatctggcctaaacacagcctcatccctaaccaggtctagacaagtgccagggtctgaacaggagaggcagtgcaagtgatccctggagggcaggatgtctccaagtcaatgcttgagaaagacagaaatattcaccatccaccaccccagctgctcctggacactaggtgctggcttatgggtcacttgtgagtggtggaaacacatctttcaatggaaaaaataccacagtctgctctcaggcagttacgatactccatatgcaaaggagacgaaggaccaaagaaggaaaggaagcacctgtcggctttccagtcaggaaaattcaatttgtagacaaagaccttggtcaaaggcagaaatcctcacaccgaagagtgtggagcagtggccccatggccaatcaagagcaggactctcccatcaggcacggcaccttctaggggccaattcccaccctacaccctctgcccggctagaccacccttggagaagctgctcagcgacaggaatgctgcctttgaaaggagaatgtgggtttgcttccttctgctttttggtactgtccatcccctctctattgagcttatagaaattttaaaaggacacattttcttgttaaagaaatcaaagggccgggcatggtggctcatgtctgtaatcccagcactttggggggctgaggtgggcagatcaagaggtcaggagttcgagaccagcctgaccaacatagtgaaacacgtctctattaaaaatacaaacgttagctgtgcgtggtgtcgggcgcctgtaatcccagctactcgggaagctgaggcaggagaatcacttgaacccgggaggcggaggttgcagtgagctgagatcacaccactgcactccagcctgggcgacagagtgagattccgcctcgaaaaaaaaaaaaatcaaaacacccccacggcagtctgagggtggcccaagctcatgggggccaatgccccaatgcccctcttgctgagatccttagccagtgggcagcagcctgcctccagctccccagcccaggagctgttcctcggcaggttaccactcccaaggccactgttagaaagcgctgtctgtccctgtcacagccctgcagggaagtccacctggcgctgaggactctggccacaggtgaagctcccaaggcactcccacacctgctagacacaatcacagatgtaccaacaacagtaactaacaccctaagggccttctaagggttccgagcagccacaccagagtcagcaccaccctggtgttctcaacggtgtcggggatttggctgttcttcctgaaccaaaccttcactgacaggacgttttcctggttctccagctgcctcctgacccatccccagtctccactccccctgccctcctccctgaccccaatcttctcagcctggtggtgcccaggactaggcctggccccttcttccaacgtttccagaggacacaaaccacctatacctagggactcctaaaacctgtctcccctggcagactctgatcctggcaccacctgcccaccaaggtctccatggcgcctcccagacatctcacagtgggcagatccaaaacggagctcctcagtgtccccaagccagagcctgcacagcctttgctggcccctccacccggggactcaccctccttctcccaaggcccactcctgcggagcactcctccccccactcagcttttcccacggccaggcagctctcctggcctcctgccctccactgtgtctccacccagccagagcagtttcacagtaaacatctcagacctccagtccacgccaaaatcttcccgcatacatcaactggaccctccatgctgcctccaggacctgcaggaccacagctggactgagccaacccctgctccctctcccagccctgggaatttcaccttcccgcatatgccaaggtcctccttgcctcaggcagtttcactcaggctcaagtctgcctctccccaccttgcccggtgccagcagcttctcagccctcagatcttgccctcagtgccacggcctcccctgaaccctcaggaccagccactgttcttcaccagcgccctgctcttttccacataggatgtacaccatgtgccatctgcctctgcccatctgtgcctggcttctcaccagcctctcctaccagctgtggcctcttgagaggaaacaggtctgtcttattcaacactgcacagtcagaagtaaaaccggaactggccatggctggtcttcaaaaagaatgaagcaaagactacgcctctctttccccaagtattatccgaccagtccaaaacgagagagaggtaaacacgtggtaataaatggtaaaggaaaataattcttctcaatcttcagtggtttgaaatgcctctggattgaaccccagttataaccccacaccatttgctcaaagtacctgtgacgaaatctcaggtaagttctcagggtcggtgtccgccttctgaggagctggtaagacgggtggatttgctggttttaacccagcaatttctggcctcatcttctgctcttcctctagcctgaaagccagagctgaataacagaagctattttatttcaaatatgccacaaggcctacaagagatttaaactgctttataaaaacacttggcaggcactatccattacaaatcaacattatgatacctgatagtcactgaaatgaattcaacaatgtcccaagggaatgaaatctttttcaaaacacttggcagtttgtgtccttgtccataacacagaaccccacatcttttgccttcctattttccattcagggacgttcagcatgtggcaggtgggcaggagccctttagctttgctccaaagagaagcatcttagaccaagtgagaagagattctccacatcctcaccagaactctgcctggtcttttccaaacacacgctaatgagtgctacgaaatttgtgtggttatttaggctgagtgttcaagcccaccagctgacttactctataagggaggctggacatatcagtacttacaccagagacctagaaagtagtcagacagcatcaaattaacatctgtgttctagccaggtggttacatacagctctacctttctctttatcttgatttcttgccaattcgttgccatatatgcctcctggagctgtttaaggtagaatgcaagattgcttctgcccaatcaaccctcaacacagatatcgttttcaagtacacgtgtttctgatacctttccaatggtcagccaagttgatgtagaagaggagtccacagaaaagcagaaaggcaaggaggaagagaatcatattccgctgcaatctcgacagttgcttccatttctaagggaggtacagagaatgacatttcttactgaatatatcacacggaacgtctcaactgtcacaaactgtgaggacaataaggaattcttctggaagatccagtgttcagctctatttctttttttttttggaaacagggtctcattctgttacacctaggctggagtgtagtgggtggaacgcgggatgagccaccgtgcccggccagctctatttattttgaatggggagaagttccctctcagcagggagtaggaacattgctgggacaatactacagatgtcgttaatacagtggtgcagatgagacgaggataagaaaaaagcagaaacatttctgtcacatttcatcaacagtggagaaagactcctgcgactcccacagatgtagcccaggcaccgcccaggcgatgcacagtccgcatgtggttatcaatgcccttcggcctgagaccaccacgaacagaccaggagccaatcaagaggggctcatttctcactgtaccgaggggagcatacaccacggggaacctccggtttccgctccaagaggggcaggcgcctgggccaggaccttgcagaaaagcgaacgaagcccagaaaacctgctggggctctgagccctcttcccaccaccgccccgcagaatttgggccgctgagaccgctgcaggcgagccgcccacggctgccccaaccaggaacgcacatttgcccctttttgcggggaaggggtggagagggcggcgcctggggagtcgagtccgcccgcccaggtcccgctcggagccgcagtctgggagggcggcgggcacggcagccccgggccccagtcagcccggcgcgaccctcaccctccagcacgagcgccgccgccaactcttgctgttgtcatagttctcgccaaagctcagcgtcaccgagatgaagtcccgatgaggcggcggcggcggcggtgggtacatgactacagtggtggcgacggcccaaggggccccgcccactggcggcgtcaggaagtccgactgagaggaaccgagagctccgcttctcctgccctcgcaggcagccatcgcagcgccgtcaacagcccgcccatcacacggatacgcgactgcgcgtgcgctgcgtctctatgcggccagtgcgcccgcgcctgtctccgctgcgctccagcgtacggggctgcgtcctacggcgactgcgtcagacaactgctgcgactccgccctgccctcaggttcattgcgcatgcgtccggcagcgcctgcccaggtgtgctacgagcgtagctgtagcaacggggcgggccttggttcgcctggggcgtggtcgctgtctggggctcccacgtggttcgcctcatgggcctggagctgggcttctctcgcctcctgtcgtctggctgcaccgactttgcccacgccctcacgggagacgcagacactagggacccggggaggcgcccgggcggggccgccatgttggcagagagtcccagcgtcccgcgcctcggttccggaacccgcggcgcggggatggagctgggctgcccttgggcgccgtcctgggctggtgcccaccctggccgcgtggtcaccggcaagaagcccagggcctcacccaggcgtgggggccgggggaaggaccggaccctcccgaagtcgcggaccaggccgggcggcacccgggctggggtggctgctaccccgagctaagctggctgcgccgcatctcacggtccccggggcccgagcgctgcgcctggaccggcgccgagcgaggcggccaatcggccggctggacccacagtccccgcgccataggcgggtcggggctttcagacccggctcccagccctcgaactcggtaaccttggaggtcagcttgagatgactgcgcttcctgcacgcgttgtcctccccagaaacgcc

SEQ ID NO: 12332 - DNA, 6000 bp, Homo sapiens; identical to SEQ ID NO: 2602

SEQ ID NO: 12333 - DNA, 6000 bp, Homo sapiens
gggcgtgggcgtgggggttcctggagtggaggggaggcccagctccagcccctgcccccgtgccgagaagcccagggtggctgcgagagaggacaggttagaatgagagcactgggctagggacagggccgtggggcaggggaagcgggggtctcaccaggctccgggagccgctgtcggtccttgggtaggggcggagttgagtgtccagactccttccgggcaagctcctgggccaggaagtcaatctcatcttccagtctgggctggggccggcccccgcctggggagggtgaggggccatcaggtggaggggtccgtccaggaggtagccccaggcccggcctccccgcttctggcaggttcctcccaggagcctgaggactgggtacacgcctggaggccctctccctcccagattgccatggtgacagcgcgggcgcttcctgtgaggggcagtgcttcccggaaagtggaggcagggcaagggaggaggcgctagggaaacgtccaaagaccgggcacggggaggaaggagtggggtctctcgccccaacccatgtccataaagggctggccagcacagccccttctgcttccccacctccaagcaccttctcgggtagaggggcagggactccccaaggagtggggggaagccgaaggaagccaagcacccgggacccctccccaggtcattgggagaacgggggcagctgtcaggggtggggctggtggcagggctccaccggtacccactgtgggctgcacagtctgggtggacgctcccaggttggcaggaggtgcatccacacagacccttacagccacttctcggtgctcctctcaacacctcctccaggaagccgctgctgctcccacccccagcacctctgagcaaagccctcaccacacctgaagtcactcagtgactggccatcccgacagatgcggctcaggctggcgagcggggcatccccagcacccagccagtgctggcacccttcaacatttgccaacaggcggacaggacagtgagtggtggaaaagagcaagctgcctggggacggggaagtgggggcctggagggcttctgggcagaccctgcagagcccaggcccggggagaatgggcccttcctctcccgtggccatcccagcatttcacatcgtgcagcccttctcctgggagggcctgactgccccaggcctgggcccacctccatttggaaaggatgggaggcttcgtggagagtgaatgaggatctcccaggccttggacccaacaccccacaaggtccaggggccccaagaccacctggcacaggcctgggcattgaggctgcaggctgctgcttttttttttttgaggcggagtctcgctctgccgcccaggctggagtgcagtggcgcgatctcggctcactgcaagctctgcctcccgggttcacgccattctcctgccttagcttcccgagtagctgggactacaggcgcccgccgccacgcccggctaattttgtttttgtatttttagtacagatggggtttcaccgtgttagccaggatggtctcgatctcctgaccttatgatgtgcccgcctcggcctcccaaagtgctgggattacaggcgtgagccactgctcccggccttctttttttttttttttttttttgagacagagtctcgcactgtcgcccaggctggagtgcagtggtgaatcggctcactgcaagctccgcctcccgggttaaagcaattctcctgcctcagcctcctgagtagctgggactacaggtgtgtgccaccacacccggctactttgtatttttagtagagacggggtttcaccatgttggccaggctggtcttgaactcctgacctcatgagatccaacagcctgggcctcccacagtgctgggattacaggcatgagccaccgcgcccagccggccgcttcttacagggagaggttcatgcagggacatccccccatcgacttccccctttgctctcgtacctggaggccggcgcatcctgggcacacagagcccttgctggtcctcctggaagggctgaaggcagggcccacaggcatgtgcaccaggaggacaccttgcccgcctcttcagggcacagtccaggctcccgggacaggcggctacatctgggaaggaagcagaaggcagggccggctcacggccccgcagggctcggcccctgcacacggcagcgctgccccagccacccgcccccgtcaccccccgagctggccgggcctggttctggccattgttctggacatgcccttcctccctgacgccagggctcagaacccggaagcgaacagtcctaggacttatcagaactaccctgccccacccctccccagggtccacttccaggcctgatagagccctcagctcagaagctgagtctcgccgtccaggcagtgctgagttctcctgggcagggccgtgcagccccacaagcccagcctccggcctcaacatgccccacagcaagccaggaaccccgtccagattgggagtcccagagggaagggcccaggtctgtctctggggagcagcaaacgatgccgccagcgacctctccttcccgtgcggctctccccagaacccggcactgacaagtgtgcagcctggaagggatgctgctcctccagcctctggcttgtcccccaggcaccgaggacacctaagatggagtctgctgacctcactggcctcagacacagaacccaggcaggtcactcccaaagccaccacaccaggggctgcagtcaggggccaggtggcacccgagggcctcaggaggccgaggttggcagtgctggggatggcaggccaggccctagttccctagttcctaaccacactttcatctcgctgatgaggggcccaggccacggtgccagctgacacatgtggctaatcagtcttatcctggtgctggagaacggggcgagggggcaatggccctctgcctcagtttcccctctgggatatagctgagttgcctcaaagctaaggaatgtccccagtcacagcaagccagtggagccaggggaaccccagcagggccatcaaccctgcctggggagtctgcggtggcacctctggctaaccaggactcttcctctctgcccagccccacactgcacactgcaggcagggccacgggggccacacggggcatcatccttctccagaccttggttggctggtttggtttccttggtaacctgacactcagggccctcaggctgtccgccttccttcaaggcagttccagcagccgcagtggcaggtgggcacaggagccaacgccaggcaccgcacaccctccacaacctggggcagcagcctccagtatcagtgggccgggacttgggcacgttaaacattaaacctgtgccagcaggtccacctgggcccacccgccaacttggcacctggggagtgaggcagtccccgctcctgtgctgataccccaccgtccaccacgccaaaggcaggggcctgaggtacaaagctggctctagggtctgggttccaggcccctcctagcccttttccccagcccaggagcctccatcccccacttcctcctcctgaaaagaggtcgcaggaacaagagcagctggacggtggctggcacacccccctccacccgccaacgtctgggctgcctgagggccctcccttccaagcactgggcactgggaatgggaggagttgcctagggagggccctgccaggtctcccggtgaggcagacacgaagctgcagaggccggtgaactgaggactggcacctgccacccacccgggctcagcacagcagctgcagccccgtttcctgaataggtggcctccgcctttcctggctgagcacactctgattctcggaagcctctcctgttcatgcccacctcccatccaggggcactgagcccaggaggaagccggcctcactctggccccttgaggccacacacacagaaccaggctgcccaggacagcgcctcagctgtgccacaatccacttaacttctccatgcctcggattccttgcctgtaaaacgggctcacagcacctcttctgcagggctgccaggagtactgtacgaatgcagtcgcaaagtctcccagttcagtccccccagaaaaacgtcagctttgcatcctgggttcctgcagggagctctgctctctggaccctcaggacccatctgtgcaggtgagagggtgtcccaggaccctgggcttatcaccctcctccggagtccacctgcagccctcagtcccaaagacagaatgccagtgccctcgagggcaggggatgcaggcggaggctctgaggctgcaacagtctccctcctattgaagctagaacagcaccccgagcctgcgccataagtgcccccagaacttcagcgcccaccatggcgcacaaggccggtgcccagcgccacccaaggcgtgaggacaggcagagcagcactgaggccccgaccccgggacgcgcaccggcagcgaagccggcgggcactcagggccagccccacacccgcaggagccccgaacacggagacacagagacgcacacaggcagactcccggcgggcccgcccagagccagatggccgcggcgcggaggcctgagccagacgcgctcccggcggaagaagccatgaatgtaaggtacgcctctgggaaccggcagaagccccatccggcgcggccttttggaggctccgcgctgcgccctccggccaggcctgtttattccatcgtgggcgaggcggggcccccgccaccagcggaccaggcctgcagggcctgcgggcctgggcaggacgagggcggcggcgcccggcaacccggtccccgcccggcgatcccggccccggggcgccccgcggcctgcgcccagcgcgctcgctcacccgggtggccggcggcggctccacgcagggcggcgccgaggacgaggccggagagcagcagccgcagcagccgcaggtgccgcggggagggcggaggcagcggcgtcgccatccttcagcgccgccgccggggcagcatggcaccgcgaggccaggggctcggcgcgggctccgggctccgcgtcgggagcagcggaggcagcgggggaggacgcaggaggaagaagaggcggatgccaaggaggaggaggaggaagaggaaaggcacgggcggcggcgctgacgctgcagcaaggatccgggatggaggcgccggcgaggcgcgcacgcggagactgcgcctgcgcgctccacctgagggggcgggagggcggctccagactgcgccccctccccctgctccagttctggtcccctctccgggcctcgctggacctctctcggcctcagggtgtctcggcacctgcggtctctggggccggtgcggttcccagaagtccggctgggtttgggccgcgggtgggcttctccaggatgcgctcccttctggcctcttcccggtaggactccgagcccctcacccgcacccgcgatggggcagaggacctgtgtgggcctagcctcgcgagcgcacagagacacaggagcgccgggcgcacgcagacaggtgctcacgagctgggcaggtgcacaggaaggcacaggtgtgcccacagaggcaggggcacccccactcgcgggaaaagcaaatacaggaacacagaacggccccggccccgactgcagctttggctggagccgcggcggccgcgctcagtgaggccaccagggggcaagagtgatccggagccactgaggaccggagctgggagctgtccaaggtgttcagggtccccaggtgacagccctttagctccctcaggacaatgggcatctttttttttttttttctttgagacagcgtctctgtcgcctagcctggagtgcagtggtgccatttcggcccactgcaacctccacctctcgg

SEQ ID NO: 12334 - DNA, 6000 bp, Homo sapiens
agccttccttgtgcccctcctagtcaccacctgtccccaagcatgaccactacctgggataggactctcccctaggtgagtttagcctgcttctgaccttcacgtgaatgaaaccctacaggatacaattgtgtccattgctttcctctccccatgatgcttgtacgagtcatgcacatagatgcacctgcatgctgaatattcttgctctcatggtgtgggtagatacactaccctctattcattcttgtttatggacatggggtaatttcttccatggcccatgtgttgattatcatcaagtagcactgctgggattgattgaggatgttctcttggcgaacacatgtccatgttttcgcaggtcgatgttgatttgtgagcggtgtgttggtgtctgagatgggctttaaccatgactcggaggcactgggtttctcagaccccagccagcccatcttgcaaaactggtgtggggagaaggggcggcccctaacagagggcaagactgatgcagtattagtgttcactctttgctttattccaaaagtaagtgtccagagctggcagtgacattgtaaatttgatcgcggcttaaattccacctgaacacttagaaataaagccagatgctgagacatatggctttttgcagactagttttgcatatattcagagagcttggcacattacggaagacacaggagtacagacagctgcagggtagagacgctcctcctcattagcggtggtcttctaaccaatacagatgctgacactgggctgctcccactgcccacctccacggcacatccttgcctggtcgttccactctcttccaagtgctacactaacacatctccctgaccacctgggaagacccccgcccaccacccagctcttcaagagacttaagtatttgattgtctgcatcttcagtcttttcatgtttactgagagacactgcttacatctgaacttacctgagttctactcaataaagaccccattagctaagggttttcatgtcatcctcactaagctgggttcatccagcctacctcaaagcattttaataccaacacattttttttttgtcgaggaggaataagacgccttctggaagatgagtatgcagtggatgaccccaagttagaccctgccaaggtcagaggtgcctaccttcccccaacttccaaggagaaacattgctgggaggagggtgagccagagagaggaggccggatggattccagatgtgctttctatactagcgattcgctttctctacccatgtcaagttgaaaaataaacaaactataaaaggaagaaaaagagaaaaaataaagaaaatgtttccacagtctggtctccttcccaacacccccctttctctctccgcataaaagataggcacaataagatagtaagatagcatcttggtcagatgcaggatgctatatttttaataggcatgtactcccagggaaattaactagttcatcctccaaactgaatcaaaacaccaaacatatgccaacaagcaaaatttcttggaaagcaagatgttttttaaaatttcatttaaaataacttggaaaggaaataatgagtcggccgttacaaggctccagcaaaattcctttgctaatgagtattttcccttgctctagatttcttgggtgacctcgctctgcttttggagacagtccattgcaaaatgcatgcttcacacacccagctgcacaggcttggcccattaatgcagctcccctgagaaataacaactgttacagacaaaccaggtgagggttttgtatcttttctcccttctcttcttcaaagcatgcaagtcagtgcacttccctggttagacttactgcttcccggtggcttttccccaagtccttctccatcacaaataaggctgggacattatgagctatctgggcatagtccagggaaccccagatatggaggctgtgccccaggaaactcaggccccggccccgagcatctgcctccgtgaacaccatcctgagcttccagacttgtgtgtgggaaggcaagtgcgtctgagccaggaggtgtttgaccgctttgcctgtccatgagtctttttaaaccttctccattctgctgctgcttcatgacagcataggataaatgattctcaagatttccacagggatgaatccacagggatgtggaaataggctctgtgaggtggctaaaggcacattcaaataagaggcatcctgcccacgaaggctaccggagatccttcctatcccttcccaaagcggcagtctcacctggtgactcggcatgcgtgccaccttgcaccatggacatagcacacatggcctcatggcagcatctgccttctgaatgtacacaggaggagaccgaggctgggggagggggggtgtcacttgtccttagtcacagagctgggaaggggctgggccggtgtccgtgccatctgattccaggatgtcacattagggatgagctctttgggaggctgccaccttgccactggttctttgcctaggtagtgacaagagattctctggcatgttttagagacaaactgcctcatgctcccatgccagcagaatgttagcatgtcattctgggggcactgaaatatctggaaaattttgaagccaggaaaatggagcggcatctgcaaggccgaagagcaccatccactgcttgaggagcggaccgtcacctcgctgtgtgagctgaccccagtccggcctgtgagcagtgaagatccactcactgggcaccaatctgcactggacaatctcgtcactgatttaacccaactggcctattgtctcttacagacacagcttcaatgcctcaaaaataggattcaaaaaagggaaggagactttatgcccagtagctataacagtaacatcaactgaaacatgttattaactgaaactagatacgattccactcagtctattctttttcttttttctcaaacattatacatttccaaaagcttaaggaaaatcttaaggcaattaatttggcagaaaacatatggcagaggaataataggaaatgcctccaaaactgataagaaaggaattacaaagccaaatatgaagaaacagaaagtttcatagaacccacagcacagcaccctggttccagctaaggtaaacagactgcataaggctggcggcctggctctggtaacacttgggaaacagtacaaagtcctggcagttaaagggttctacagcagggcaacctcagatttttcaagattgtggcatgctcaaattctcctttttttggtaataaaaatatacctacagtatataataaaaatatacatacagcacaggcattgaggaagatgaaagagataccatgaaatcaagttaatgtcataatttccagaaagaggaaaccagttcctgaattttgagaaataagatccttcggccactatgtgaagtttcttctataggaaactgtagtctctaccctttgtatatggtagaaaatcagagactcatgcatttgaataaaaatcacaatgataaagggagaaatggcactttcaaagatgaaaactggttgagaaatcattctctctaaatcttagggggaggctcttaagggctagcttcagtttgtatctctggtgttaggtgatggaagtgatttcagaggcccaaagtgagtgcttactggtttgctaatgaaaaaagcctgacgtgcggttcttcttctatggcaacaaagttattcaacctagcattaaggtctgcatccatgaaataatactttacagatatgaacacttccacaactcctcaagcgcacacacacacacacacacacatgccccgcaccatcaccacctcctcaaccaacaccagccctgggcatggccagctatccttgttagtcatgtatctgcagagcataatccttcccttgtactttctaggaattatatttttcttaactatgcctgcaagattttcatctatgaataaaaaacattgaaaagataaattatgaatatgtggttatatacaaagtctgtgacttctaatgtccagattttagaatgatgcctaattctggaggtctcagaggtccaagtgggagtgggtaccatgaatgggggggcctccatttaaaagtaaccttctaaagagctctctgttcctgtagctcccctttccttattggaagggtcaaaacgaagtgtgttcccttaaaaatccaacaagaagttcctctcttatatccaaatataaaaacaccacaaagaaatataccattgggagtgtccaaagccagaaagtcagaggaagagagagagagagagagagagagagactgactattgggagactcaaaaagcccaaagccccttctctagctgttatctcagttacgaacacaacgtactgattttccgtgggaacctcattattgcactgtggggacttcgtcttccagcaccgattctgacggccctaattgccttgtttgagaaatgttaggaaaaaactaattttccggcgaatattgtttaaaagaatgattttcccaggctaacgaccacaaccctctcccacgtccagcatccccaggccctggcactgtggaagcctaacttgttaattgtccaaggaaaacgactgatggaacttctccacgaacagcctctccactttcatccaggtattcagctccagcccgttgtaaacgctccgggtgcggtggaaaaggcctcctccctgttcctgcagcggctctgggggaggggtgctgatgtggagcgctccggccgccgtggcgcgcccaagtccccgtcgcgcccgggatcggtggggattttgttggaaaggtgggtccttcggcccccagccccccaccctggttccgcgccccgcccgggcccgcctctcacctccgtcggctgagggcgctggggccaccggcatcctagcgggtggcgcgcggcggtgccggggcgcccggtcctgcgctcgaatgccagatgggctgggaggcccggcagtctcagcgctcgcgacgtcgttcccgggcctggggtcctgctcggtcgcgtcctgcagccgccttctggtccctgagtccctgttgcccgtccccggaaccggcttcctcggcctctgcccgagcgagtcagagactaaacttttccagcggcccgccggggcgggacccgcgctccgcccctcccctcgccgcccccgactcccgcccctctccccgcccccctctccccgtcccccgcccgcgaacccggcactcctccagctccccacctcccgctcaagccgcctggtctccgtgcgccccgcccgcccctagcctggaccccttctccccgaccctaccaatcccctagggtccggctcgcccttcggcccctgttcccaggccggcctccagaccttgtcctcatcgggcgagctccaggtgcagaaaccgggcgcccagagacccagcgggaacaggcttggaaccaggtccgaggtctgggcttgggcgggcgcctgtcgccctgacagcgagggtttgtttgggccgattcttaataggaggattaatactatcattatcgttgtccagatcctgaccatttcttttgtaactggccgagcaccggcttgggcttgcaggtgggcgcctggcgccggacagcgtttttgtttgggcttcttccttttccgcgcgggtcccctccggcgcctgcctggtccctctccgcgctctacccccaggcacgcagagacttgggctccaggcgggggcagcactctcccccagcctctgctggtgcaccagagcccactccggcacagagcagcgcccctcctagaccggcagccagcagatctcagccgacccccatgcgacccccttcctcacgcggatttgccccttttgtgtggcaaaaataataataataataat

SEQ ID NO: 12335 - DNA, 6000 bp, Homo sapiens
tcttttttcttttggttttaaataggagcttcttgtgtattatgtaaacctttacatagactttgcaagtattatttatctctttgtcatttgtattcattttgtagtatcttttgcatgtaggagttttaaaatgtttatgtagttaatcctatctgtcttttactatggtattaggttagtgttatccaaagaaaagccttttataattccaatattagaaaaattattattattattattttttgacaaaatttggctctattgcctaggctgcagtgcagtggtgccatcttggcttactgcaacctctgcctcccaggctcaagccatcttcccatcttcagcctcctgagtagctgggactacagatgcacaccacgacgctcggctaatttttgtatattttgtagagacaggatttcgccatgttgcctaggctggtcttgaactcatgagctcaagagatctgcctgcctcagcctcccaaagtgctgggattacaggtatgagccactgtgcccagccagaaaaataaacctattttataccagaagttttacagtaaaacaacagcaacaacaagtattttaaaaagtagtaatctaatatttaagataagctttcctttgagacattctaggcatttataaatctaaattcctagggactcattgacaaaattcattcattcattgaataaatatttatgaaacattcctggataccaaactgttttctaggcttttggtacacagtgggaacttgtctagtggaagtaagaaagggttaatagggaaaaaaatgtaacagcattttttaaataaaaaaaaaaaaatcaatctttgtggacctcctttacgcttatatagtatgtggacttttccctttcattacatttaaactatactctgttcttggtttaaatatctttccaccccttaagaatgatctaaaggcaaggagtgtacttcgtctttgaatcccaggcacccagctaggtatttggttcattataatggctcaagacatgcactgttaaataaatagatttccctactttacaaatttcttctttccttctcaaattaatactcatcaccctgcttccatttcctctccttcctcatcccagcatcccaaaatgaaaaaccaacactaattttatgttggaaacagctcaaatccctgagaactgatgcatgagcacaggctacttaatcaaaatcgaacatgcttagctcatagaaagcagtcaatataaaaattattaaatgaattgaatgactacaatgtttaaaaaagtcattcagaaaagtagtaggaggaagatacacccctctaaacacaagtttataacaagcattttaaagagaattcatacattgtttgatcttgcaacaaaaatccaagtgaaaccacaaataaaagccagagttattaataaatattggaggaacatcaacttacaagtgtgaccagaaacaaagttgcagagctaaggacttaagaattgccagtcttgctgaatacaatgttgtctttttctgttgcatgcctgagttagggaaagctctcttcaggtaaagtggatttctaacttctggtttaactgggaggctgagatacatttctaccttctcaaatagagactgctcttgcctctctggcaatgaatgaacagttacagcccttggttacaattagttttggcttttggagcatctccctggggtgatatgtgaatgctcaggaggaagaggttgtgaggcaaatctggaagctagggctctgctgaagcaaataagctcttgtgggatgtgactgtgagcacagtatgtgctaaaatgtaaataacacagccacagcaccaaatgccacggtttttaaattaagaggactattctgagcagttatagacatatacatgtagagacgcatttgtatttctgttaccccaaaacctgaaatcatgtgaacaagaagtcaggcttcataaaaatcattggaaagaccattaattcaatgttttccctcagtgagtgaccagcaccaagacctccacctgaagctggaacccttggaattcacacagccaattatgcaataccagaccactgggaagcatttctggctggctcagctggtgatccgattttaccctgcagcaccaagattgatagaccttataattttatcctggttagcgcagatggtttttacataagtttctaaaaacctcctttctcccaaaagaaaaagaaaaacaacctaagcccctacgaaggggcttgccctggtaacatctcaccatagtagataagtaccctgatcactggcttaagaaaaaaaaaatcccttttgtgatttctgagtttgctgtggtttaatttcattgaatgctgtgtgtacttgtttataagagtgaaaaggaatagtaatttgcccctctctaaatcactccttttacgaggctttttttgggcatgagggggatgggaaagagactcattcttagaaggtacagcatatcaatgcaagagctgttagtttccctcatgctaatgacgaagtataattttgaaacatcagattcatatgcatatatggtgcatacatacataattggtgtatttacaaagcaccttgcagaatcttagaactcttagttctattaacacttaaagggaaaaccagagtgcagatcagtcaagcacaacggactgtagttgctttcaattatattcacccattatctatgtctaggaaagagatctctaaaaaagcaaaatacattttatgaagcactgccacagtctgttacgcatttatctccttctacagttccaattacagaataagcactagctactacacggaacggcagcactagccaaaaagatttttctaatctgagagaaatgctcccatattgactctgcaaagagaaacaactcccctttccttgactataaagaaggaagacagatggcttcttgtttaggactgtagttttactttcagcctcctccccgagttaaaaacaagatgtacttttctggctttgagggaaaatctcaagggaatgttttttattcttggctgcactgaataattcaacaaacatttgagagagctgagggagatacaaaggagaaaatacttttccttgttctcagggagtttacaatctaattctggagtttacaaccagaattgggactagaaccattagttttatgtcttcacttgtatttattggtttaatggttatgggaaacacatgtaggattcgccagctccgtggtatggtggaccctctgattaacctgaaaggaaactagaaagaatgcagaagaattcaagatctcaatcagttgagtacttgctgacctagcagcactttcttatgttatttaatcttgaccacaagcctttgcagtcatccctgctaccagcatttcacagaagcggacaatgagatttggagagataactcgtccacagtcacgaactcaggaaatggcataggaaaacatcaattaggaattcttcttccctggccctttctgtagctgtccccttacaggctaccattccaactttccttggcttagattccctttcagtgcatgtaaagtcaatttaattctgtgttcttttcttccctctatactttaactaatctttaaaacttgatgtctcatatttggtgaatcagtccttttggaagtctcactcccttgcagctttgcaaataaagtttttcttttctttcctgtggctgtcttttgagacattctttgacaagatgaaatgacatatgaaggctataacagtgcctgataatgtggggttttttttaacatcattatctttagttttatttctttcactttttaactgttttcacctcatactgtatttcctaacgactcgtttggaattgtaaatttcttgaaggtagttaccacgtctactctaacttgttgctacttccttgagtcttactgatttagcaacaggaacttggtaagtctcttttgctcgcctctttattcccagtactagtcactggaacgtagtgtgtcttcagtaagtatttttaatatgaataaattaatgtccccttattgttttttgtagactatcctgtataagaaagtttagcttagatccagtatggctttgacttgcgagcctggataactttttgccttttcctcatttctggctatttattaccatttcaaccttgggaacatttcattaggttcttggtccctttcaagcctcagtttccacatcagcaaaatggggacagtagcaacagatgcttgtttcttcccgtcttcttatcacctattccttctccaggaaaggtttcttgtgtacgctttcctctggagaaaaaaaacagccgacggggcggtaagaagccatcaggatcctgagttgtgcgtccagtagggagagggagaagtcccgcttgcctcctagatccggaagcaatccggcccctttttggcagcgagttggcccggtctttggctgcctcagaccgcgttgccctccagcctcgaggcagagagctgcctcggtgccacagctaaataagcccggcgccgcgcagcctctgacacgcgcggaagggcccggccttgttctggctgccgccgccctgccaccagcacggcgctgcactgggggcggggagtctgatgggagacgcgcgcggcgctgaggaggcggcggcccgggagagggagcgggagagggactgggcgcgggaggcgggaggcggggggacagagggaggcgccgccgccgccgccgcccgcccctttccgctggggagcagctgctgcagcaggagcagagcaggagacgcgtagccgccgtcgccgccgccgggggatgtggccggcgcctgcctctagccgcgccgcctcttgagtaccagccgccgctgcagccgccgccgccgcctagccgtgcggtgccaggccgcgccctccccgggcgcccgccggctcgcatgccgaggggctccggggcgtagctgcgcgcccggcgccgcctccgggctccttcggccccgccatgggctgctgcagctccgcctcctccgccgcgcaggtgaggggctcccgcctcccggccgcccgcccggatgcctcccgtgcgccgcgtcgcgcggcgggcgcccgccgcccgatacctctcgctgtccccagcctcccctgagcgcaccgtgcagtccaaagacccccactccgcctttccgtccgccgggtcccgccgatgcccgtgcgctggctccgcggctgccgactcaaaggcgcctctgcgcggcgcctagtgcgccctcagctcttcccggccccttccccagtcggccccctcctcccagtcacacctgagctgcccgtcccgcccgcctgcaggtagaggctgcactggcgcctcctctgccccaggtggcatccccttccctgttcttccgggcctggctcctctcttccacctccgtggagtctccccgccatccgccgcccgttttctgtgctcctcgcaggtgtacccccagcaagagctcttcacctctcccaccgaattccagtttctgcttcattagatattctgtcccttttctcttgcccgctgccccctggctgggttcagatggtttcagcgggtcccggagcccttccacggcccgctccgcagacctcgcttgctcgcttgcaccccatccccccttagtgccgtgacccgggccccgcggcctccccgcactcggaggcccctgcgggagcgccgactctgggctgggaaggagattgggcacctggtgggtgacgggagcgctacggaaactccctctttgttgccagtgtaacaggaggaagaggttccgaatttagtttttctgtgggcactggctgaatgttgtcgctgagggctgagatgcagagatttctctcagcttctaccctg

SEQ ID NO: 12336 - DNA, 6000 bp, Homo sapiens
gggaggcagaggttgcagtgaaccgagattatgccaccacactccagcctgggcgatgagagccaaactctggctcaaaaaaaaaaaaaaaattaccatttctacattattttccaatttcgaaattaactttgatttacatattttgaggagtagatcctctatgctaacaacacagtattcagaagatgaaggaaaaaaaaggcttcatgccatgacttctgttcccgttagatgaagtttactttgcaggtcttaatttaactgagcaactttagtctctgtgggtaattcccactacactcttcaaatttaatttttaccatctcacttcaaactccacaaagctgatacagatgatggtattattaaaattgttaaagcacagttagcatatgcaaatattaaccagcatttgtaaaccacttctgattgttttttattactcccaaaacagaatatgagtgctacaaaaagacagttaaatatacagccttcaatttgaagacaatgggatgagacagtggacaaatgtctcctaacgctagacagacaagcggcagtttgttcaacttgaaagattctcctccatccctcttacaacatttaaggttagaactgaaggacacagaacttcacagaacttgcaaaatctcctggcctctaaagcactgctgtgagaaataatcatctagccattaaggacaaagacttacggcaatttgctaagtaatctttcaaaagattcattcaaactggtttgtcaatgggaaagagcatttaataaatctgaagatttacaagtgaaatttgaagtttaacattacaaggatagaaattatgtcaggttataccagaacaaatgaattatagggagatgggaataaattttaagagccttagggaggattagtactgtaaaaagaaactcaagactatcttacttttacgttcccctcaaaagacttttaggcaaagactgtcctgtgttggtttgtattgagcaattaccaatattagtaaacaacttgtaatggtcactaatttttaaaaaataatttaaaaagttccttaagagccctgactcactagacacttttaagatcctagatgtacatagctgatacagcacaaattattttgccaataatctgctcctctagcaatgaaatgctagtatagaatgtgacacttttctttgatctaaatcctaaaacagtataattattttgatggaaaatcatgatacccagacactgccaagaaaatgaaaataataccaggacagattacaagagatcaaagtttggaagaccacaaactcttttatgagaatctacaacatagcaagagactgtaagggaaaataaattatatttcaaaagtgaagccctgctacaaaaagaaaatgcactttatttacattgataaaacctgccagagctttaaagttgctgaagatactgctgagaaaagctaaactgaactgcagattacctcaaagcacactgttttcatgtgttgtgtaggttatcattagagtttgcagacaagctcttttaagatgttgtagccactgctccaactaaaacatacacattaagcaggtcatcaggagcaaaggaaaaccttgaacaattttgcaagctgatggtaccactgaaagaacaggaagggatatagaaaaggcaggtaaattttaacttaaacagtccaggtttgagtttagaagaggacagcttggcaaaattaatcaaccagcccatagaatttacaaacagtagatgggtcaggtctagattcacattcgatgccacttgccagccagaggttcaaatatatgtctacatattccctccagtgactactgctgagcaactattaagtacaaggtacagtgaggcactgcagtagatacacaaataaggaaaacaaaaacagttcctgtgctcaagaagcttacaatccagtagaaggcatgaaacaaacatattctgagtgaaaatacatttgagacccctgatagggagcggtggctcatgtctgtaataccagcactttgggaggccgaggtgggtagatcacccgaggtcaggagttcgagaccagcctgaccaacatggcaaaaccctgtctctaccaaaaatacaaaattagccagatgagctggtgcatacctataatcccagctacttgggaagctgaggcaggaaaatcgctcgaacccaggaggcggaggttgcagtgagctgagatcgcaccactgcactccagcagcctgggcaacaaaagcgaaaccccgtctgaagaaaaacaaaaaaaagaagaaaatacttttgagacccctaagagaggctggagaagatgtggagttgcaaccctattttgtttaaaaacacatataggaacaacagtattctaaaactggtaatgctcctgaaaggagagttaaaataccagccgattagtaacatttcacaaatgaagaaggatgccaaaaatctcaaataagaaaaaaaaaaaaaaatcaccagctctttggcacaaaacctgctcctcaatgctccactgaacactacaagtccctaaagctgaacttaaaagcatgtgacagctgttgattggttataggaatccacaggaaaaaaatgcaccccttgggtgcatgacatgcatcttatctgtggaacaaggcatgttctacagtgagaggaggtaaaagaaaagaaaacgtatacgatagcattctgaaaagtatgacgtggagctagacaaatgcaagacccactatcggttttaaagcagagttctgatgcagcacccatccctcccaaatttaactgttcatgcactgaacaagctatccataaactatcaatacttttctgtcttaaaggcatttcaccaccaaaagggaatgtaaattaactcaattctgaaaagaaaggcaatctgaaaaacacctttttggtgaaaattatacttaagtaaatattaaagagcacccaactagacccccacaaattcctaaccagttgaaagttatgtgcaattctacacctttatatgttaatatgaaaactctgatataccaagcctctccttcctaacacctctacgtatagttttactttgctattataactgaataggaatctttaactacaccaaaaagcctgactataatgctagcaggaaaaaaaaaagctaacgggtaagcaaacactcaaaaaaaaaaaaaaaagactggaggaataggatgataggatggatacctaataaaacacaaatgtcccccattcatctgcaattctagtcattttctctctaacagatctcagattttcagaacaagtatgcaggttatttaaaactgagttatatatagtcatttagcagcagcaaaaacacttctggcattatcacagatgctagctttctggaggaattttttccccccaaactagcgtttttcttcaccaagaaccaaccatcctttatttctaaaaacaagagcccttttctgccccctaaaacaaacaaatcacagaccacagttaatgaaactacgctaatgaaactgtgagattacatcccaggcgttgtcagagcctatttttcatacaccaccacaagacagtttgatgcagtattcctgattgctttttatagtatttgtaaatacactcgctaatccactaaattaggtaatttacaaacaggtcctctcagttattagtggccagtagtcgagttctattacatttgatcctcgtacagttgtctaaacatttccacccaggttaagggctcggatccgagagaaggaggttggcgaaatttggatgggggcagggtagaagctgagagaaatctctgcatctcagccctcagcgacaacattcagccagtgcccacagaaaaactaaattcggaacctcttcctcctgttacactggcaacaaagagggagtttccgtagcgctcccgtcacccaccaggtgcccaatctccttcccagcccagagtcggcgctcccgcaggggcctccgagtgcggggaggccgcggggcccgggtcacggcactaaggggggatggggtgcaagcgagcaagcgaggtctgcggagcgggccgtggaagggctccgggacccgctgaaaccatctgaacccagccagggggcagcgggcaagagaaaagggacagaatatctaatgaagcagaaactggaattcggtgggagaggtgaagagctcttgctgggggtacacctgcgaggagcacagaaaacgggcggcggatggcggggagactccacggaggtggaagagaggagccaggcccggaagaacagggaaggggatgccacctggggcagaggaggcgccagtgcagcctctacctgcaggcgggcgggacgggcagctcaggtgtgactgggaggagggggccgactggggaaggggccgggaagagctgagggcgcactaggcgccgcgcagaggcgcctttgagtcggcagccgcggagccagcgcacgggcatcggcgggacccggcggacggaaaggcggagtgggggtctttggactgcacggtgcgctcaggggaggctggggacagcgagaggtatcgggcggcgggcgcccgccgcgcgacgcggcgcacgggaggcatccgggcgggcggccgggaggcgggagcccctcacctgcgcggcggaggaggcggagctgcagcagcccatggcggggccgaaggagcccggaggcggcgccgggcgcgcagctacgccccggagcccctcggcatgcgagccggcgggcgcccggggagggcgcggcctggcaccgcacggctaggcggcggcggcggctgcagcggcggctggtactcaagaggcggcgcggctagaggcaggcgccggccacatcccccggcggcggcgacggcggctacgcgtctcctgctctgctcctgctgcagcagctgctccccagcggaaaggggcgggcggcggcggcggcggcgcctccctctgtccccccgcctcccgcctcccgcgcccagtccctctcccgctccctctcccgggccgccgcctcctcagcgccgcgcgcgtctcccatcagactccccgcccccagtgcagcgccgtgctggtggcagggcggcggcagccagaacaaggccgggcccttccgcgcgtgtcagaggctgcgcggcgccgggcttatttagctgtggcaccgaggcagctctctgcctcgaggctggagggcaacgcggtctgaggcagccaaagaccgggccaactcgctgccaaaaaggggccggattgcttccggatctaggaggcaagcgggacttctccctctccctactggacgcacaactcaggatcctgatggcttcttaccgccccgtcggctgttttttttctccagaggaaagcgtacacaagaaacctttcctggagaaggaataggtgataagaagacgggaagaaacaagcatctgttgctactgtccccattttgctgatgtggaaactgaggcttgaaagggaccaagaacctaatgaaatgttcccaaggttgaaatggtaataaatagccagaaatgaggaaaaggcaaaaagttatccaggctcgcaagtcaaagccatactggatctaagctaaactttcttatacaggatagtctacaaaaaacaataaggggacattaatttattcatattaaaaatacttactgaagacacactacgttccagtgactagtactgggaataaagaggcgagcaaaagagacttaccaagttcctgttgctaaatcagtaagactcaaggaagtagcaacaagttagagtagacgtggtaactaccttcaagaaatttacaattccaaacgagtcgttaggaaatacagtatgaggtgaaaacagttaaaaagtgaaagaaataaaactaaagataatgatgttaaaaaaaacccc

SEQ ID NO: 12337 - DNA, 6000 bp, Homo sapiens
ttcaaaatacacgacaaacgtgctctttgtggatttcatgtctgtctgccccgatcagccgcaagcctccccaagcaggatgggtctggctgactcacaactgtatcctcagggcctggcacacagcaagtgccaaggaaatattagttccctctgccccatccaggtcatcgatactctgcctaggatgtctcatttatcccctaatagactttggcctccatctccaaatctgagaaatgggaccactatgatgcatcctggtgtgttcagaggaagagacagagcttaatagtggggagggggctgtctcccctgggaaaggctaggtttgacaaagagaagggctctcagagtccagagaccagcatcacgtccatgctgggatagaatgcagagcagagagctgagtgctatggctcacacttgtaatcccagcactttaggaggctgaggtgggtggatcactggaggtcaggagttgagaccagcctggacaacatgatgaaactccatctctattaaaaatacaaaaattagccgggcgtggtggtacatgcctgtaatcccagctacttgggaggctagggcaggagaatcacttgaacttgggaggtggaggttgcagtgagctgagatcgcgccattgcattccaagtctgggtgacagagtgagactccatctcaaaaaaagaaaaaaaaaagaaaaaaaagaatggggaggaagggacaagggcattgggggagacagaaagcctgggggtggggggtaggcagagttacggggaaacctaaaacccttcctcccaggctgctccttcggctctgggcagagggtcgctcctcaggacccctaccctaccctggatggagaagatccccaacccgtgcccccatcctggtgcacctcccagcccacgccatcccagagggcttgcctgtctacgcccaggcagggatagaagcagcgcgtcctccatgccaggccctgccccgagtgcttcctggggattgtttcaacactcaccataatctcacaagggatgtgctattattatccccattttacagatgaggaaatagcagctgggcagggtttggggaacatgcccagggtttctctgcttgtaagtggcagagttgagcttcatactcggcaggtctgactccacaccatgctctcggcccctctgccacattcccaccagacttggcctgccctaggacaacccactcttggccctagaggagcactggggtggggggtgtagcggggcgggggtgacaaagaggagctggagggacagcgaggaggcccctttggcctagggcaccaggcatctgttcatgaaaggctggtgtgtgctgggtccacaaacactcccccatctacacttacccccaggatgagctcatctactctcgggtttaaatcccatctctacaccaacgacttccaaatttttacttccagcccgtcttccccctgagctctcaacttgcatcaccaaactgccagctgacatcttccacttagaagtctaacaggcatctcaggctcaatatgttcagaaccaaaccctggtcttcccccatccccccagtctgctcctccttactcttcccgactctgttaatggcaccaacacccacccaggagctcaggtcaaagtcccagaagtcatcattgattcctctttcctcaccctccacattcatcctccagcaggacttcctctaaaatatatcctgaaacccacccaccattctccttctggttgcagctgaagcccttgtccaggccccccactaccccctgcccactgcagcagcctccccaccagtctcctgccttttccctcacccgctccccaagtcacacccttgctagaattagctcatcactccactactaaaaagcttcccacaagagagaaaataaacccaaactcctcactcctcatggcctaagggctttgtagatctagcccctgcctatctctcaggtcctgtctcccccttgctagctgaataccagctacagggtctcctttctgttcttcaaaggcaccaaattctttgctaccccggggcctttgcacctttcccttggcctggaactctcccgcccctggcaagttacacagcttctcatcccttggttctcatctcagatgccacctcctcctggagacctctgacctccctggggagagcagccccactcccctccctgacgttcaccacattttccagttgtcttctgagtttctccctctgcagtgcagagtcttggtcttttccaccatagaatccccagtgctgagacatcgtgcaccctccacaaatgtttgctaaatgactgaatgaattggcctcagttttcccttctgtaaaagggaagggggtgaagaaatagtatagacccagacaagttctagcagcatcccaggcagctgcaaggctacctccattgcagagttgacagcaggatcctcctgagcacccagaagcccgggtgggcctggggcagccctgatgcattttcctgtgaagcattttctgttggggattggctcctgggaagccccaggagacagaatggctgttactatgctcaccagtctggggactgagccctgttggagaggtcaggagcccttgagggagctggcaggctgagacagtggaacccactgagcctcagtttccctggccttctcactagctttcagaggatcatgaatgcttttctgcctactccttcacatcaacctaagccccctcccctgccctgggcctgcatctggacaccctgcacatcctcctgtggggacaacggccaagggcattggggtggagagggcagccagagggcccaggcctcctggggcacggtccaaaccttgctccaccactcaacaagcaagtactcgatgaaatctgctgtggtcagggatggcccctgcgtcatgggctccaggaaggcaggggctgggcatgcaggtccccaagcctaattggctatcagcgccccctcccgcatgtttacaaaagcacctttccacccatgaactcggtggagcccacagtcaccttctcaggaaggcagggcagcggctgtcagcgtttccattccgcagatggggaaatggaggcccacccacccacacgtccctgtgcctggtgcaggacccggctgtcagaggatgtgcagcgtcgagattaggaattgggctttggagtctaacagctgctgccctttctgaatgtgtgaccttgggcaaggcatctaacctccagggtctcagtttcctcatctgtaggatgggcatcatggtacctgcctcttgggagctcctgtgagcctatgaaggactcagcatagggggatgcatgggatgggctcagtagatgcgggctgaaatcaccagttggtcccctccctaccccaagcctgaagcacgcagcctggcatggggcaggagttcagccaacattcaaaggacgagaggtaggaatatggtttctccattctaaactgctggatatccctgactgctggcccttggggaaggggcccgtggtgtgtctcttgcctgtgtctctgcagctccgggggtcatgtgatcagaaggggggctctgcaggagccattggagagacagatgccttcccctctgctgaccagatgggcacggccgcccccacggtggccttccaacgtcccacacacacatggctccagtcaggccctctccctctcacctctagggctggcatgggtttcccaggacatttgaggggcaggaacaaccacccagtcccactgtccatgttagagatggggacactgaggctcagagagggcaagtgacttgcctgaggttttgcagcagaacctggcttggacagaactgctgtacctctgcggacaagggcccctgcctccctctcccatgtgccagtcacttttttggccctgaaggtcattggaagaaagcaagagtttctgaagaagatgggggggagatgaaagacggggtcagtgtaaactctctcacttcatcccccagtctgcccagccccccaacccacctccagtacctggagagctcctatctttcttctctctcctcagcaccagaaaaactatttctgcctccctttgggggtttgtggggagcctgcgggtcacgaccctgcctgccccgctaaacccacgaccctttgtctttgcggttgttcctctctccgccacctaggcctctcagcgccttgtgggatcagaggcgggagggggattaggttctgcaaatggctcccccctcccgccatccctgtcttagtcatctctgccctctgccgcctctccctccaacacgattcctctggccaggccaaggggagggcgacactgacaggcgccccccacccaggggccgtggcgaagcaaggggccggctgctcagaaaaggataagaagtggtttctcctcccctcttcccttcctcatcctgcagcccgcgcctcccccctcgccgcgctgcgcacggatggcggcgggagccgcagaggtgtgtgtgtgctggcgggaggccgtgcccggtcctcgatgcccgcgggactacgtcctcttctagggactgggatgcgggggctgacctctgccacggcccaggaattcccatgggggtagggggatgtcccccattgagcccggtgtgggggacgctgcccccgggtgctgcccgctccaagggactcccggagcccaacggagacgctgagtaatgcgggctctctccatgcccatgttgggggcggggggcagctctttgcccggggcttctggcagagcgttgtctgccctaaaggatgggacggaggagggggcgtgattcggtagccggaggcttgacgacgtttgcagactagcggggggcgctgctgccccgaggggctctcgtggtggggggagggcctcctcgctccggctgggggtggggggcgcgccggccgcgggtgcagcgtcgggggctgcgaggtcgccgcgccgtcagtgccccgggcggggactccagggatcccgggggtcgggggtcggcgcctgggggcgcgccgcgcctacctgcctacgaaattctcgagcaccgagctcttgccggcgctctggccgcccaccacagcgatctgcggcaggtcgaggtccgcgttctggccgatggcagagaaggcgtcttgcagccggttgaccagcgggatgagatcttccatgccgcggttgcccatggctgcggcgggccccgcaggctgcgatccggctgccgctagcgctcccggctccgactccggctccgccgctgcagccgcgcgcccagactgcctgcgccgcggggcccccgcccctcggggatcggagcgagcaccgctcccggacgccgctagggggagcccgcggcgctgcgggccggccgccgtgcgcaggcgccgtccggggcatcatgggtgtcgtagttttcaccttctgcggcttttggggtgctttagcagtgtctggggtgcgcggatgctgcgcagaatatatttgtcaatgggttgggtctcactcctagtaccaggcctcttggagagtggtctggatgtttcactccatcttaccgatgaggaaacaggcctggagagcagatgggcttcctctgaggtcacagcctcctgacctcagaggtcagaactccgagatgagttccccttcatctcgctggcttctatccctagatcctgactctgatctccaacatgtcctcttctgcctttggtcctcagtttccttgtttctagaaggagaaagttggaacatgaattcaacaaatatttactaggtacctgctagaagccaggccctgtcctaggcactgaagattcagcaacgaataagacagccaaggcctctgccctcatagatcttgcatcaagctggggagacagacagtaaataag

SEQ ID NO: 12338 - DNA, 6000 bp, Homo sapiens
aaggggtgagtggttggaatgtctgatcagaggaaacatgggccttggagtaggcccttgtaaggagtgaaaggacagaatgagatggaaagccactggttaggtctcagcagagagtgaaagtctgactggctgctgcgtggagaaccctccacacaagatgcatgcgtgaagatcagttagggggccattgcaatagtctataggcaagagatgatggtgtcttagaccagggtgggggcagtggaggtgagaaggcatgattagagtctggatatattctgcagataaaaacagtatttgatgatggattggatgtgggacatgagagaaacagatgtgtccaaaatgactctgggcagctgggtaaatggaggtgcccttaattcacagtaaagactacaggatggtggtggtgtggggctgggagagaattcggtttgctttggatatctcaagtctgagatacctattagacagccaagtggagatgttgagtagagatgaaggcagtaagatttccaactctggtgctcagggcagagatttaggctgagacaaaaatttagaagtcaagatatatagatggtaaagtcacagaatcacctgggaaggggtgtaaacagaagaggtttgaggactaagcccaagaaagtcagagaatgaggagataggaatccagtagctgggtgcagtggctcacacctgtaatcccagcactttgtaaggccaacatgggcggattacttgaggtcaggagtttgaggccagcctggccaacgtggtgaaactcttgtctctactaaaaaaaaaaaaaaaaaaaattccagtaaaggaggcaattaaggaggagtagtgtcccagaaactaagagtgccttcagagtgattaccctgtgtcaaatgaaagctaagaactatgaaacgaccaacggatttagcagcagagattaggaggggcctgggagcctagtcctttgtggacgtttgggaggaatgacagggcaagctgggtcatccctgacatgtgggctctgagcctagaggcagagctgggttacagagtaggaatcccccaggaggcatggatttgcaacctggggtgagtggagaggagccagccagggcctactatgcctgacacggtggtattgggggtgaagagtcggtttcaggttggccaacttacctggactccacattcagtcacaaattgacttttgatgttgtttctaaatgcagttatacatatagtctttcggatttgtgttctttagaatgttaaaatatctaatttttataaccatgtttcttccatttttaaaataccaggaatcctgagaagcaggagtgatctatgccttaccctcagaacagggccaggacgagggtgaggcatgcttggtgtgtaaaatgcagaagttaaggcaagagcagggtctttgggaatgaatgcactttaggcacctctcttgccttacctgagtccaggccctacctacctcacatactgccaggtagtgtgccttcctttcattgtgggagcctccacattagtggtgggtcctggagaaggcagaccatagactggaggatctcctgttttgggtgggggcagacactactctgggagcccagaaaaaaagccaactgagaactatgcctttcagctaaaaagtgggtgcacactgccaccctgtggtcagccaggggaagattcttaggactgttcccaggattgcaccggcagaggtaagaccaagacacactccaggtcaccctgccctgaatttctcaaattgtggcattcgcagctgtgttggaagaaatcttattgaacatgttgatctctggcaatggagctcagtagtctgagttactgactcaaagagtgtcttaggtgattctaaggcacactcaagtatatagtccctactagtcaaaagccactgtcttgtcaggcatggtggcttgtttctgttatctcagctactctggagactgaggaaggatcacttgaggccaggagctggagatcagccggggcaacatagcaagaccccatttctaaaaaaaatttaaaaagctaaccaggcatggtggcatttgctactcataaggtcccagctactcataaggctaaggcaggaaaattgtttgggaccatgagttcaaggctgcagggagctatgatcatgtcactgtgccactgcactccagcctgggcaacagaggagaccccatctcttaaaaaaaaaaaaaaaaaatctaccatgaatcacacagcaagagagagatcttcctgaggtccccaggggtcagaggctttttccggctgctcagacacacaaaaagatggaacagatcaacaaatctttattaatagaaacagacagatggacagagaatgcagcaggggctgtgtgaaaactgtgatatgtgtgtgtgtgtgtgtgtgtgtatgtgttgtgtgtgtgtaaaaggccttctccaggccaggaagggccccttggaattaggcccacctgtctagatcctctcctcagtggtgggtcctgggctgaaaccagcttccacatcatacccccaaaggaagaatgggggtctttctggaatggaagacgctgacttcaagcattcttcaaattactctcgttccccagctgagctttgttgctgagggggttggggacaagccacaggggcacttgcatagcaggggagtagaatggggataaggcatatggtgaggacaggggagaaggggaagggcatcatagctgcaggtgaagggggcctccaaaaggcagctcctcttccccctcatcccctcaaattgctgctgggttgaggagtcagactgaggcagtataataccctcccccatccttaactctagaaccccggtttggtggggaggaggtgggaagctgtggagctatggaaaggcctcagttagtgagtcaagctgtgatgtgtgtgtctgaacacaactggctcccttggtataccgggggctccctctccagatgggtgtgagtgcatggtcctactgtacacacaggtctcagtatctatatgtgtctcatttgttcccatgggtctctgtgtttggatacataagcatggatatccctgctcatacagcaggaactcaggatctgcatggtgtatgtccctgtctgtaaacatgggctccagcaagtggatatgtgcgggcctgcccgctcctgtctatccgcaggtcttccttcaggcctggctggtcaagggtcctggccaaagaggtaggtggtgagctcaagccggaggccccgagcataggagcgaagagtatagaagagggtgaggaagtcctgggtgctgaagacagtgtcggccagcgcgaaggccagggtggatgggatgacgccccggccgtactccaccatccatgtgtttggcccccactccacagctgttgcctcaccaggcccgtgtactaccgtctcccctgggggacagggagcacccaagtgaaaagccagctctgccctgcccttccatggctgctgcttccctggcccatggactaactaggggtggggaatggagagggagcttcagaaaaacaaaaagccctacctcactgggctggcccagatggccactcctaaatgttctgtggcatcatctgacccacgtcctctctttggagaagccatggacggctacctcgcttggccatggacccactgtatggaagtctgcactcccaagcctcactcgaatcaagcagaaatttagctaaacctgggctgggcttgtagctaggaaaggggtagttccaggacttgtgaggctttatctgaaaagtgtagctgttcaaccaccatgcctgcgatgcatacacccaacctcaaatatactgggaagtccagtgctctatttcttaagtaaattgtttcactattaaaaaaaaaaaaaaaaaaaaaaggcaggggagcggccgggcgcggtggctcacacctgtaatcccagaactttgggaggccgaggcgggtggatcacgaggtcaggagatcgagaccatcctggctggtatggtgaaaccccgtctctactaaaaatacaaaaaaaattagccgggcgtggtggcgggcgcctgtagtcccagctactcgggaggctgaggcaggagaatggcgtgaacccgggaagcggagcttgcagtgagccgagatcgcgccactgcacgccagcctgggcgactgagcaagactccatctcaaaaaacaaacaaataaaaagataactgtctgtcttgtcttttggggtattgagagcatttctgattacccattgtctccccaacagttgttggaatactgtctgggcaaaattgtgcctgggcagataaaaatcagacatgtttaataggaagttgttatgttttgtttccccttgacagaggaaagcaagagtccctcagctctgccccaaccaatcacctgtggcttatgggagggtggaggaagggaaccatgaggagggcccccccaacacactccttttccatgccatgctccccgcaattgtgggcaccccccgcgtgaagggacccacttctctgacagagccttcttacccacctgggtagaagacctcacttttggtggtgccctctctccactggtggaaggtgccagagatgatggtatccgagatctcagcccagtagcgccctgagtgacaatcgcacatgacactatcagggtattcgcgccattgcatggcccagccaaacatcagaaaggagggcatgggcccctttacaaccccagcctcccagtctggcccgccgctagcactgacccgagtggccgcgggagcccaaggcggtgccgaagagcagcacatactcggacagcgaggcgtgcagaaggcacatggcgcccatccagccacccgcattcacgaacacccactgcagctcctcgtcgggcagcacgtggcctgggtgcagccgccgcagctccacgatcagacgagagaaggccagctcgtggtccagccctggcggaggcagaggggcggcggagtcagggctggcaccggtcctaggtccggggatggcgccttcggaaccctaggctccgctcccaggccggccgctcccctccctgccctctgcccgctcaccagcgtactgccgcgccaactgcgctatctcttcgcgctggaagacgaagctctgcgtacccagccagagccagacgacctgggtcagcaccgctgcgacagccaggagcagcgcggcccacgcccaccgccggcccacggcccactgcatcccggcgggcggcctggcacggcgcagctcaggagggagccggggcctgaggctttgcgctcacggcctcggagcccgccggctgcccacgaagcgctcccccgccaccgccgtggtacggctcgccctgaccaatcggagcggcccgggcaccttggcaccgcccttcggttgaaccatttcctcggggggagcacggaggagtggggcggtgccgcgcaagggaggcaagggggcggggccaagtcgcccagcggcagatgtcagggtcttcaggcgaggtctgacctagctagcgccactctacatacggataggtgtggggatagtgagacccagaatggacgggctcgcccgagctcactggctggtgaagcagacgagcccggaagtgaagccttctgggactcaacgattgttaaggcccgcctttaccaggactgaagcggagaggaggcagttcaagctgggagccccagggtgggcattccagaggcggtgacacctgagcagtgtctttaagagctcgcagaaggggcatgccagcccacagggaccagcccctagagcaaaggcctccgaggagagacagcttggggtcttcaggggcctacaattccttctctgttctgcggcacaaaatgtgagaggaggccttgtaaaccagct

SEQ ID NO: 12339 - DNA, 6000 bp, Homo sapiens
catgagggaggggggcacgcagcccagcacagccagccagcgccactccagcacccagcctgcggggggtgggtggaggaggctggcgtcagagccagggtgagccagcctgggccttgccagcctcaaagactcagcttcagagatggggcctcgctgcctctgcacatctgccctcatgttcgctactgacattgccattatcacaactgttcatgaaggcacatggcacgggccaatcacaccagctgcggaagcgacagtgggtatgacaacgcggacattactaggctgcatccgttcaacgaaacatttatgtagccacaaaaatgaaggatgaggtgcttgctgcgtgtccgcatggtatgatgtggcaccatttgtagaagaggtgggggagggaggataaatatgcatgtccctcatatgaacagactctctgaaggctaccaagaaacaggcaatggggactcccccagacaagaaagggacagaggcggaggaagcttttcactggacatctctccactctggcacttgagtgttgagtcatttgaatgcattatctattcaaagtatacatgaaagtagagaggtgagaggattttgctgtcttgacgtatgaagaacagcataagtgcagaattacctagttttatataaagttaaaaggttctcttacaaaggggccctggaataaatgagtctagggcattgctgctctaattactaatttttcctaagcccaaggcttacccatccctggttcccagtggaaaaatacctctaaggtagccatgatgtccctatttttcttctgtgctgggggtgcagacaattgttctatgaagtctagtcgttggaacatgattgccccaatgtgaagcaaacgtgccaccaccatgtcactttgtggagttatcagagttcacccaccccagtggatcgaaactcacagaaattgatcaggaaaggcaggagaagcaacaagcacatattaagatgagctgaagatagtgccacgggtgggtggacacccagtacctgtccccgaaatgatgaatgtcaacacctgcacacagtgggggctttggtttactcaggtctcccaaggtagccagatcgctggcaggattctgaatttgttagggtggttaagtgggtaaaaatgaaacaccaaagacctgtgtatcatccgccctgacgatgcagagggcttgtgccctgggccaggccatagcccgtcaggcccccgaggcctcctaccccgatgatccccatggttctcaagtcatcccttgacaattctcatttggaacccactgttaggcacttttcatgtgtcaattaatttaatggacaggtactggactagatgaggttatgcccatttcaagacagagaaactgaggctttcagaggtggtatgacttggccaaggtcacacagcacgtaggagaggctatccccaaactcaggatggtcagatttgaagcctgcccttgttttttctttctttttgagacagagtctcactgtgtcgcccacactggagtgcagtggcgcgatctcagctcactgaaacctcagccttctgggttcaagcaattcttgtgcctcagccccccaggtagctgggattacaggtgcccaccaccacgcctggctaatttttgtattttaaatagaaatgggttttcaccatgttggccaggctgatctcgaactcctgacctcaagtgatccgcccacctctgcctcccaaagtgctgggattacaggtgtgagccactgggtctggcctctaaagcctggcctctttctaatgagaacacacctgtctcctgaagtttcttcatgctggcccagctttgcccctcggggtccccaggaccccggcctccttcacgttgcaactcgccgacatggtgaatctggcactgacattctcaggggacttgctcagccctttactcgcccgggctgaagatttttacagggacccacccacctctggagccctctggtttgtcactgcacagtaaggtactgacctaagcagtcagcccttcccacacccctagagggggcttcaggaaagctgagggtatcaccttctccagctgtccctggaactcagtcataagacacacctatcggccgggcgcggtggctcacacctgtaatcccagcactttgggaagctgaggtttggcggttcatgaggtcaggagatcaagaccatcctggctaacacggtgaaaccccctttctaccaaaaatacaaacaattagccaggtgtggtggcacatgcctgtagtcccagctacttgggaagctgagacaggagaatcgcttgaacccaggaggcagaggttgcagagagccaccactgcactccagcctgggcgacagagcgggactctgtctcaaaaaaaaaaaaaaaaagactcacctatcccaaggtcccaggaaggcgagcctggcatgttgggcactggctatgtgacctcagacaagtcccttgacctcactgaacctctgtttacacatctgtaaaatggccacatgaccacaaacaggaagcaagagataatgacaactatacctgccaggtaggccaggaggatgccgacgacgaccattagctgcacacaggagccgagcaacccccggactgctgggtaggcgatttcggagatgtagacctgccagcaatcagatgaggatttatggctgggcgcagtggctcatgcctgcaatcccagcactctgggaggccgaggcgggcagatcaccagaggttgggagtttgagactggcctgaccaacagggagaaaccccatctctactaaaaatacaaaattagctgggcctagtggcacacatctgtaatcccagctactcaggaggttgagggaggagaatcacttgaaccctggaggtggaggttgcggtgagccaagatcccaccattgcactccagcctgggcaacaagagcgaaactccgaaatttttaaataaaaattaaaaaaaaaaaaaaaaagatgaggctttactcaggctccaagagttcttaaaatggaaaggtctcagccattcagagctgaggaaagtccttgcagggggttacggcaggccctgaagccccttagtggaacctgcctaggtgagcagagccatccccaggtccccaccactgaaagatctgtggcaggtgtttaaaggggattaagggtaacggagagggctgcatatgatgacgagaggcggtgggcacagagcttctcaagccttcgtttaatgtgcacagacaccctggataaatcatagattccgatgcagtaggtctggacaggcgaaagattccaccttgttaaccagctccacgtgacgcccacccaggatcctagcccagggcccacgctttgagtggtggccttggactagaagcacgaactctctgcctcggtcactaccagtggctgccactagctccctcctgggcccacaggccaccaggccctcacccatgcatctaaggttattccatagcttaggcccctaacacaggtgtgtttctgcccagttaaaaaaaccaaagacataaaaggcccagcttcttccccaccctcttctggtccagctgctgctgccggttagcaaacgttggtgaaatgagcacccagggaggggcctgagtggctgctttcaacctcacttgggggagatattgtccaagcccatggctgggggcagttcatgggtcaccaagctgtcaggatccagtcctctacaagccatgccaggggctgtctatccaaagtcccactgaatcctgaccactacctcaggggctaatgccataatccctgttttccagagaaggaaactgaggcccagggaggcactctgctcaggttagtggcagaaccaggatttgacccagatgttcggggctcccaagtgggcagcctgggtcaggagggggaaagggggaagatggggaagccagaggggctggcctgtgagaagggaaggggaacacagaggccagcagcctttgccccaagagaaatcaggacaggaacttcctgctaattgcagtcattgacccgaagccagggatgaaaaccaaaatgtagggagtgggctcctgtggatcatccgcaggtttgcagagcaaaagaggggcacggctaagtgggacaaccctgggttcctgcaactgcttcccctctgactagctgtggacctcgcctgggcaaaggacttcacctttccgagactgcatgtcatgacctcagtgtaaaatggagagaacagtaggatccttcccagggtcgacgggagggaccgcgagataacgcagggacttcaagcctggcacccagaaggtcccgccagggggagccgcgcccccaggcctggggagcggtttgtcccactccccctcggtctcaggccgcgagacaggacactcgagagacgggacactcaccggggccactagggaggcaacaccgcaggccaggccggtgaggaggcggccccccagcagcatccacacgtcctgggccgcggtgatgacggcaaagccggccacgaagggcacggagcacagcaagaggctcagcttgcgcccggcgcggtccaccagccagccgcccagcactccccccgccgcggcacccagggtcacgacagcctggaggcgggcggctgctgaggagggggcgccgaagccgcagcccatcctccccctccacccactccccgcgggctcagaggtaaaagagccggggccccgcgcccgtcccgaggggaggggtagggggctgaggggcccggtgctcgtcccgaggggaggggtgggggctgaggggctcgatgcccgtcccgagggaagggatggggggcagagaggcccaatgcctgtctcgtggggaaaggtggtggcggcggggcccgatgcctgtcccgaggggaagggtggggggcggagggtcccgatgcccgtcccgagaggagggcgtggggtcccagggcgggaggagcgagcccggggcctcaccccgaaccaggaggcggcggcgtcgtccaggcgcggggccgggggcgcggcgcgctgcaggctagggatggccggggagctgtagccgagcgcgaagccgaagctgagtgggcccagggcagcggcgaaggcggcgaggaagacgcggcggccgcggggcgcgctggggggacagggccgagggtgagcggagcggacgcggaggggcgggagggcgaggccgcatccgggcccgggttccccggagctcacctgccgccaggaggccccagaagcggctgggtttcctctgggtcctcgggcgtcatgtcggcggccaacgccgatcggccagctctggcgcctgaaccgccacgggccctgcgagtgcggcccgcaccggcctctcgcagccaatgggcggcggggggtgggggacggtgctgggcgggatcggaaccgcagagcaggagcagccaataggaacgcaaggcggggctagcgaatcagctaggacccgcccttcacattaaagcagaccaatgggagcatagaaccgattagcgaagcgcgctggaaccgcccctagggcggagcggtccaaggtacaggtggggcggagtttccgtctgggagaacaaccacccaattggagtgtagtgcgagcccatagacggggccagagagctgcctcagaactgagctggccaatgaggttggagggaggagttttttttctggcacctcctctcaatctggcttcaaccaatgagggtagaggcggggcgaaggcgaagcacgtgggcctcagcccgagacttcccgcccccaactccgagaagctgcacctgtcctgcccggtcgggtctgcagttcctgctccgctttaatcgctgccctggggactgtattggaggcgtctgacctatgcctgggcccagctc

SEQ ID NO: 12340 - DNA, 6000 bp, Homo sapiens
atactggcagtaatccattgttgctttagtcatatcacttttgtaggattatctgcagacatagaattatttctggctttttgaaattaaagtctaagttcttggtaattttagggaaacttcataagctagaacccagatagcatatggaaattccagaaatctccagctgctatctgcctcttttatgattaagtcttaaacactggatctgctcactcctcttcagagcttctattccaagcggtctttggctgtttcctgctttgattcccctactagactaagtgccacaaaggaaggaaccagtgctatggtcactctgtccccatgcctggtgccatatggtaggtactcagtagatgtacattaagtggtttccagaagatgcacaaagatgaccaacatcaatctgcaacctacttagtgaacatacagatcagttaatacctcagatgtggggaagtctttcttaagaaaatgaaagattagaggcagtctataaaatagaaaccctgtttactcacagcatgtgggagaactattaagttctaacaaacttgtgatgtaactcacaaatgctgtctatcgccgaggctttgttatgtcccttggttggcaaattgcaagtccccccatccccaccacctcgtctacatacataaaggctccccagatggcccccaagttggcaaaatcagctgctctagccagaggcttcatcttatagtttccagcatctctaaactacaaagtaggcaaaggatctctaagcaagcattgaaacatttctaacagaatctccacacttactctcacaggacctaacaggcattctcttgcttagagactcaaaataactgttgggcccaagctttcctaggagacttcactcaaggggaaaagtatgctaaatttatggtccaggttgagcatccctaatccgcaatctgagatgctccaaaatccaaaactttgagtgctgacatgatgccgtaagtgtggaaattccacacctgacatcacgtgacaagttgcagtcaaaactttgtttcttgtataaaatcattaaaaatagtctataaaattaccttcaggctatgtgtataaggtgtatgtgaaatataaacgaatttcatgtttagacttgggtcccatccccaagataccttattatgtatgtgtgaatgtcccaaaatctgaaaaaatctaaactctgtggaacccttctggtttcaagtatttcagataaaggacacttaacctgtgttatcacctgccatctcatttggttcctgcagtgcagttagtgtacttaactaagtggtattaacagtgtttagagtttttgttgcaagccaatagacgaacttagcaaagagacactgatttagtttgaaaaatgcagacagtaaaattgagatgatttttacttaaaagccagattcgcctatagctaggttagactctgccccaactcttcagaaaaactatcagtcctcagattttctagcccaaaactctttaggtggcagaaaaaattgtccctggactacttacttccgcttaacaagtatatctcgcccataacctcagcagacagtatttttggactgtttgccttgaaagtagtctatcactctgttgtccaagtattcttttgagattaaattagtagggaccaaactaagcaattttgaatttatcaactaaccatgtagagggcagttgtattagccaccacaaggagctccctaaggcaggtacatttacaacgaacatcattatagacctcatcaagccctttaatacatttaatttcttataggctagtatgtgaaggtggttttccaaatgaaagtcagtatccaaagtgaatgcaatcattactttaagtcacgtaggcaactgccttgtcttaaacacttttccctgcactgaaaagaacaaatttacattctgtgagaaacagaaaatgggctagatatttaaaatgaattagctgtatttctatgctgtgtgccaagtcttcaaggtttgggatcaaaacccgaagccacacggctgggtactatgtgttcccttgatcttatggtcatgttctactctaggagttcttgttaagtcttatcaatttgatacctctcctggagcagaaggggcttgtaacaacttttttcctcttccaaaactgtaatgaaactactcaagtcaagtttacggttattcaattttatgacaggtagagacacttggatcaggtcttcacttcttttgagcatggagactgtcacctttgctagcaatgtttagtgttaaatagcagtctattgtactaaagtcttaatatttggcagctctacttgacctttatacatgctttaagtatctggggactcaggccataaaagcaaacaatcaaaatgacacaggacaggcactataggtaaatgccacataaagtgggcaagagggtgatccagggaacaaagctacactggatttcatgaagctgttactgccaaggagggcttggctggtgaccttcctttacgcagtccctgctcacatgagtgatcagtctttgataaggggtactatcatcgtcataccttcattggtgctatctggatgagccaagtttactttccatgccaaccagtttcctacctccaggtctattactaccaccagtaccaccaacccacttctcacaatgagggaattttctttctattcttaggctagttgctagccatatatgaatagctctcaaaaaaccttggttcttttagactctggccttaaagaatatatcataccacagatcttaatcttgactacttaggctgaaggaaaatgtcccagaacccccaggaattgtgcaatcaggtataccaacttcttgttagccttaagttccttgccagagtctcagtgttcacctgtcttgtccaggagtattgtggaacagcaccatgtgccagtggacagaaggggtatgtgtagaagctccagggtagaaagtcagcccacatgccctgagactttgaacttaagacagatgccggttgggattggtttagggtcaataactgcctcagcccaaatttcctccagttctggaagaatctgcttcctctcctttgaagaatttgtttttccattgttcatggcatgtcaaatatttcacatgtgacaaagtgaaaaggatcctcacctgcccaatacaaggtgaacatctggctttgactaactcatgtcagtagtttaggtgcattcctagcattctataaggtaaagttaacctctagtggaagggacatgcagcaaaaacgaaacttttctctcaccttcctggataattgtccctccttctggtataccttagcgttttgaaatgttacaaaaggcataatgcaagtcatggcactatactgagaaatcgtttaataagttagtattactcatctattaatgattaatgctagcgtttggaaactcttgtaagcagagcttttctaggctctcaggcttgttacacatcagattccatgttcactacacattcgtcctcttcaaagagtccaggcaggggaaggcatttgagagaacagcccgtaagagcctgtggagtctcctactttccattgaaaataacactgcccatgctgcccacttaagagtccgcggaaccatgtgaccaacctaaacgtgatcgcaccgctaaccaatcgcagagggcggaaaggccagtcccagttcacacgctccggacagtggcaaccaaagggcaggggcattcggagacgtaaaaaccccaggcgctgcccgacaggctccttgaccacatgctttaaagttcgctctcacttcaggagcacgtgactgcaggccggcagggcccctgaagccacccggcgacgggagccagggactctggaacgggtgttaagggcctgggcggctttcagtcccaattccctgcagctggcaagcaagcccctcggcgtcacatctgaagatcacttcggggacgcgctaggattccgactgagtcctctcagaaaggcttcctgtcgcctgtccaggaaagttacgaggccccaagtgggaacgtggctgacgaccaggcggggcccccaggcccccgcggcagagtctggggacccgacagtagtcaccgccgcccttcccaacaagacagggccacacgctcgctctcgcgctgctcctttgagctattgtgtagaatgaaggctaattacagtcactagcctaggactcaattcctctcgaggaaacgtcaccgggaaggagggtcagcaaactaacctgattaagtctcccctccactccccctccgcgttcagctacacgggagacccgagcggtttccaaacgccgcccgaggcggggaaaagggagaggagaagcgcccagagcagagtcctgcgtaaagccccgccgctcccctaccccgcacgccggagaggcggccccgcgccgggggagtcgcagtccgggtgccctcggctccgcggagcctcccggccgccgcccaccgaacgtgcgccagctcgcggccgccggaagactctgaagcccggccggcccctggcgctccgcgtccccggaggcgctcaccttctccccccgtccgctcccgcactccccggggttcgagggtgcgcccgaggctgccgcacacgtcttggccctctgcctccttcccaacactgcgcctggcagaggaggcagaaccattgttcaatgctcagaagcccacgcacctcggcgcccgtcaagagggcgagaaacgaggcgaagcagcggctctgggggaggcggagtgaggggcagaagactagttcaggcgaggcgtcggggcaccccgaaccccgctgttccccaagcccggctccctttagcctcggcgctgacagctcagaggcgccaccacggaggggagggagggaaggcgaggagaaccgagaggcgcctcctaggaggcgggtgggcaaacggagacctacgcctcggggtctcccggtgccccggctgggtcccgcccgccggcggaggggcgcgtcctcactcaccggttccggtggcgccgctctcccggggcgcccagcacagcgcgagcagcagccagagcgcccagagcgcggacgtgcccatggtgcccgcctggatggtgccgccgccgccgccgccgccgccgttcgctccgcacgacaagttaccagtccttccgaaaggaggaagaaggtgggggcggggaggggaaagggggagaaggaggggaaggagttggcgggggaagggagcggggaagaagagggcaccccctcccctacaacttgcacagtctcctccccacccacccagccacctccccgggctgcagcagcagtgcaagccgagcctgcgggcagaaaataatgcaggcgctgcagaggaggggaggcaaggggagaggagggaagggagagggggtggggagccgagagcagaagagagcacagaacggagaggagccggtagcggagcacccgcaccggcggcggccggagagcggggtgagcagcggggagggggccggagggggcgtggtcaacgggaggcgcggcgggcgggcgggagcgcggcggcttcggccctcctttccctcgacgcgctcctcttgcacgcgccgggcagccgggtgcccgcgcggggagcgtgcgagtgtgagcgtgcgtgagtgaccgcggtcgtggtcgtggctgccgccgccgccacccggaccgctctaggggcccggctgctccgcgcgttcgcctggggctcacgggggcccggggcgaccgctggttggctcgcgcgccgccctcgcctccaatcccgggtgcctgtcctaatttcctgatccagggaacctgccgccgcagcggctgtgcgctccctacagtcattactgtaccctcccggcagcctccggcagaacacgcagca

SEQ ID NO: 12341 - DNA, 6000 bp, Homo sapiens; identical to SEQ ID NO: 2583

SEQ ID NO: 12342 - DNA, 6000 bp, Homo sapiens
gagagaaggaagacactggacaggcaggaaggcgaggctgagaggccgctgcaccttggcaaggtgcccccacatgcgctcggagccgagcccaacaccacagctctgccactgcagcctgtgcgtggctgggaactcagtgcaggtggaggggcccagagtggatgtgggcttcagcccagtgacagcagagctttgcccgcagccctgccccccaacttccctgcacagggcacacctgtggatctgtccaggtggctccccgaggtgcccgggcccgcactgagggcctccagatgctggcgtagggcctcgagctctgagcccaggctgggccgcgctgggtcaaacaggttgccttcctccaccacgcggtccaggcgctcaagcagctgcgtgaccctgcaccatggcggatgtcactcactggatgggctggggaggggtgggtgctccgaggggcgggtgggcactcacgtggagttggcgtactgcaggaagccgaactcgtctcgctggccgtccgggcacagcgattgcatgacaggcaggatgccggcagacgtcaggggcgccgctgtgtagaaggctggcagacccacgggagagggcagggtcgggggtgaaaggggagagagagagagaggaatccagaaggggagggagacagaggccgagaggagaaatttagagaaagtcaggaaggagaagcagcgttagggagaaggcggcacagagccctggccccagctgggctacaggccaagcgttctggggcgaatgactccagcaggtcagaggtcaaagagccactcaccaccccttctgccataactcccagagcattcctttcctttcagccagtgcaggcccacatgccctggcactctccccccgaaaacgtttcaggtgtggcactgcctacagagcccaggggaggacaaaggaccccctctgggcagtgacctctgacctctggccagctggttagcagagtgagtgcaagagcctgaaggagtatgaagggagagtagccaggccgctccagccccagcccaggccagcccagcctcagcccagactcagcccagaagccgaggcaccccagccctagaaggcaaggccaggcagagagatgccgcctcagcttgacccaggcaccagctgtgcctttaggtggccgggcctttcactccctaccacctcccacttcactgcctgccaccccccatctggagccagctgttcctgaggccggcagggggcccgggagggctgttaatgcaagcggggagggcgctcaagccaggacggcccatgggccccccgcagctgctgcccaggccagccaggaggaggtggccgctcacttacagactgcatgccagccgaggacaagagaccatgcggggagggagggggatcaaaacagaacagaggagaccagtgagtgcccacatcaccaggaagaggcgttggcatcatcattcgcggccacaggccagccccgacctccacagcccagccaggaggcacggcccaggaccacacaggggagcaggcaccgcacctcagggactccgggagcaggacacccgtgtgcagatgtgcacacacagcgcaggcgtgcgaggtgccgcgctcccccggctgtgcctggggcctcctgccgcactcaccttccttcacggagatggtgggcttcttctgtcgcagccccagcaggataaagaacagcaccagggggatgaagatctcgaaggccaggacccactggaaagggtgggcccagtgagggataggacagacctgtgctcgcctaggccctccccagcctcccatagggctggcccagcccagacaggaccacgtgctccctggggccagggaaggtgggcacaggcccttcggaaccactgaaggtctgagccccttccagggcactgagggtaaggattgtctggctcagcaaatcaggtttcccgtccccagcccacactgggcctacgtgccctctgaggagcctcagggcctacagggacaaatcggccagcttgtggtctactctgacccatgtatatcccagctcatcttctccctccccacctccagggctacctgggcaaaatcttggggaccatctgagccactagccccgcctacacttcccacactgccccgggttcaccttcctcccacttcctccccaccaataccggggcctggggagatgaggaggcctggttgagaggcttggcctgcgcccagggccctgagcctcggagaagacctggtaaggggtctaacagccccagtccctgaagcaaaggcacctttttttttttttttttttgagacggagtctcactctgtcacccaggctggagcacagtggtgcgatctcagctcactgcaagctccgtcccccaagttcacaccattctcttgcctcagcctctcgagtagctgggactacaggcgcccgccaccatgcccagctaattttttgtatttttagtagagacggggtttcaccgtgttagccaggatggtgtcgatctcctgacctcgtgatccgcccacctgggcgtgagccaccacacctggcccaaaggcacctctttctgccctgtcccctctcctgacccggggcagccagtcttgggccttggagctcagtttccccaggtcggctcctgctaacccaggctgggcaccaaggtgagccctagtgggacctgcgtggagtgagaaagaggtgctttgctcacttcacctgaaaaccaaggactttaccggttcttgtgtcccagcccccagctcagggaggaggaggagcttgagccagctaccctccagagagccctcggcagaccagccctctctgagacccacaggacagaggggccctgccctccctagcccgagggcgagcacccagctcggaggcatcctttgtcctcatccccatcccaaaacccttcagagcccccagtgtgctgtgtggcccgggccgagtccccggtccctggggtgggggcggctgctgtgtttactgtgcttggacaatagggctttgtggccaggaacatcatgctgtgggtgtcccatgcccgccccagcccgtgccagcctccacccgctccctgagccaggacggagcccagggttcgccaaggcactgtgggcaccaacaggcaccagggcgagggtggctgcaggagtgaggcaatgtcagaggcaggggtcacagcacggggcgccagccccgcccacacccggcctgctatgggcactgtaactgcagcaacaggcccggctgcctcccccattgctatagcaacggcctcgcacgagctactgggaggaggaggagagtcctggctggcaggcggcgggcgccacagcagcatctggttacaggcggcagcacaggtctagcacgccctgggtgccccacacaggtgcctccaggtggcccaacctccgtccctcgagaccagcccagtgccttcacatcgcctggaggcctagatgccttctctgggcatgacccctccctgtagctcccgcctactgtgtcggggggagaacaggtgagacccgagggtggcgctgccatctgccatcccagtgacttcatgacagtgaccctgtccctgcaccaagagcagcctgtagcccaagggtagacccaagtccagctaactaagaggagataggccacactcacagacagggaaactgaggcaaagagcttggaggagcctgctagcagcacagaggtccttggcacccaccctccagaccctgagctctgcccagggtggagctctgcccagggtgcacccctgccccagcagggcgcatggcacacagggcaaacctctgtcatccaagcttggccccaagagtccagctctgatgtccaagatccttcccaggaaagtggggacccagcaggagtgtgcccagtgtccagccagccccagccccacatcacaagcctggcaaggactcagcctccctgggggaaacagttccccacctgctccagccatgggctaaggacctccactgtggcccagtgggcctctgggagccctgtagggtggggacccaaaaaggtcctggggggcagcccaaaccagcagctgggagtcactcttgcggtcaggacagtgcacacctcccacctgcttgccagctgccctcataggccacactcccttccctgagcattgtccccactggaacaggggccaccattccagcctctgctcccaagcccagtggggaccttcctgacaaccacccccggggactaatactaatgcatgccacatgccacatccctgttcccttggccctgctctgctgtccccagtgactcaatgccaggggctgcaggcctgatccatgggaccccactcagccagctccaggtgcctggccagggcatgtacctaacccaggctccccgccaaggccaggtgcccaggggaattctgccagccatggtgatgatggccaccccagctgactgcagcctgggtttcctgcagtgcatgttgaaagataaacaggcacggactggtgcagcccaaggggtcccgcccgggccctggctgggcaagaggatgtctgccttaggcccccacctgctctgagccctggcctggacaatcccaagggccttcagaaacctaagctggtccaggcctgtggcctgggaggtgtcccttcccttcccaggctggagccaagctggccagctgggggtatggcaggacacccatatccccaagcccctcgctccacgaaggacttctgtccctgacagccatgtgtcctgcaccctcaggtccactggctgcccaggcagtgctgggaaagccggggttcacagctccaaacagtagacccagcccccagagcaggtggggggaccaggaggcaacagagtggatcaggctcggggagaactgaccccaaaggacaaatgggtgcagagattcaggctggccaaggctggcacaaggacattcccagtggcgagagcatgagcaagggtcacggatgtgccaggaggggaggcggagagatgcctgggaccaacctctatggcaggccgcggcccaagggcaggggaggggtggacggagggaagggacagggtctcctccgggaccccagggaggctgggcccaaggaccatggagcctcgcagctgaatggagccccccaggcctgccttctgtcctgggaaccagggcctccctcgagccagagtcctgagcgccgcttgccccccgcccacagcggccccagcgagcgcgctgcagagggcgcgggtgccgtgactcagccgagcaccgcgatgtcagcggacgcgggaccggactggacacgaccgagccacctccccggaggccgcagcgccggcaggcgagggcagggcccggcggggagggggctcgggcccgcgccgcccccagcgcccgccggggtctgcgcgcgcccggccgtccgcacgtgcgcgcggggagcgcgcctctggccgcggtgcgcgcggcctcgggctgagggcgggcgcgtggggtgggctcaccgggctccggcgtttgagcgtcacgttcttccagagcagcagctgcagctggtgcaggaagcccatggcggggccacgctccgccgcctcagcgccgcggcccgctcctctgcgcgccccgccgggccccgcagcccgccgcgccgctgggcatcgcccgcgcgggggcggggcgctcgggcgtccgggacccgatccgcgctggctccgccccggcggccgcggcgacagcgactctgcccgcgccccgcccgcccccgcttaaaggcgccgcgctccgtccgcgcccgccaggaggcgcccgccgcccgcgccgcgcccgggaccgacccgggcccgagaccctgcgcgcgccgccgccgggaagcctccgggccgcccctcgccgg

SEQ ID NO: 12343 - DNA, 6000 bp, Homo sapiens
gtgttgtctgaaagtattaaaaatacataaaagaatggataagagaaactctctgtaatgtgggatgcatatttcacaaaggatacagccccagaatggtgaaataaaatgccaattatatttttctttatctcatctttaaagtttcaatttgtgagtgtatactttctgatatgtgtaatatatttgagcagtaatatattactgcaggagaaagattgcattattggaactaattctttacatctttctgtgtctaagctgtttgccatataactttgcagtgccctcctatggtgggtgggctaacctgccctgccctttgacttgcagcttggccatgtgacttactctggccaatgggctgagcaaatgccatgaaaagaaacttatgaagtgtttgcatgatggggcttgcattctctctcttgttctttgccacagccatcgacatgtggctgctggagtctgccagaggaatgcagacatgtggcctagtctctcccttcatgccagttgaccatcaggcatgtgaatgagtaacaagagcctcatgaaagagaagaaccttctagctgaaatcagagtatacgctgacttttaaattcatgagctaaataaacgcttgatgttttaagccattgaatttcagggtggttggtgatgtatcgttattatggcaataaagaacttctaatttatttataaataaataacttctaatttatttataaataaataacttctaatttataaataaataacttctaatttatttataaataacttctaatttatttataaataacttttatttataaataacttatttataaataacttctatttataaataacttatttataaataacttctatttataaataacttatttataaataacttctatttataaataacttatttataaataacttctaatttatttataaataacttctaatttatttataaataacttctaatttatttataaataacttctaatttatttataaataacttctaatttataaataacttctaatttgtaaataaataacttctaatttgtaaataaataacttctaatttatttataaataaataacttctaatttatttataaataaataacttctattttatttataaataacttctaatttatttataaataacttctaatttatttataaataacttctaatttatttataaataacttctaatttatttataaataacttctaatttatttataaataacttctaatttatttataaataaataacttctaatttatttataaataaatacacatttatcatgggtatgtgccccaaatttttaaaaataagatgcatgattaataaaatgcttagaaaccactagatcagttacttttaggaatcctcttctcagattgtcatatctgttgagtcaggtgcatttagatgagtctcttttcatctttcaaactttatctcaatgtcatcttctccaaaagggcttctctgactatcccactaaagacagactctactgcctgaatcactctcaatcttgttatcccacacaagctatgccaatacctgaaattatttattatctgtctttctccattagaatgtaagctccagaagagaaaaaacttgattgttttttcttctcctaccctgtatccctagtgttaagaatactactgggcacattggaggtgctcaaaaacttactgttcaatgaatgaataaggtgaatttttgtgggttatatgacaaattggtcctaatgttttgtttcttttcactttgcatctacataccggaaacaagacattttgtccacatcaattcaatgtgttcttttctctttgctctattgagaatatgaacctttagtctgtattatggagtgtagttagaagtacagagaagaactggattaataacatagcagtcctggggaacagagcggtcttagaatattcaagggcaattgctcccattgttttcatagattagtttagaaataaatacagatgatcagtcttttatctaatttgtaacgaattttactggtataaataattttcagaataaaatggacaaagaccattgataaagggtaaggtttgtaaatgggatggttggaatgtgcaaaattgggcctatgaaaatagtggctgatagagataatggcttcaaaaggaaattcatacagataagagcaataattggtaacatttatgattggcaaaaactggtgattcaatttttgtaaaatttatgaaaaacattgattttgagttacatagtgccagttaacataaaaagagataatttgaaaggtttagacttcattgtacattgaacagatcagaaatttaagtgagatcaatgggtattcagttcaaaaaaatttactggtaaaaatacaacctgagtaacattattctttatgtgttttattttaattaaaattttttctctagccatatccgtttgaaagtaacataacttttatcaaagtatttgttaatatacaaaaggtcgaaaaaacttttgtgggttcaaactgtagtatcagagagtgtactagctccagtgccttcatgcactagcctttaaagatgtttagatgaatagaaatttgactctcaagtgttgtatcatatcatcagcatgtggatttactcttctgctttcctgctttagtcaccccaaagtaaatgtcatttgctggggacaaatcatcaaccatgagcctcatctgtacacatggtttatctactatagggatgacctttcatcacttggaatatgatcagagaagcagaatttgcctagctcattcagaagaacatcgtatcatcctgccactgaagaaagctcacatatcctctatacatatgagctccctgctttcaagggaaggaagactcactgaactgcagacttttacatgtccagcctccccttttagaggtgagaaagcaggactggaagtgagggattaaggtttcacagttaattattcagggtcatggttaattattgacaggtctgggactagaatcaggttttctaaatcttctattatgctgcattgcactgtcagtggccttgggttggtttgtctcagaagtgcacaccagactatgggttatgacatacacaatgttgaaaatatctactttctgacatgggaaaactagttatatttgcttaatgtctttaaaggtattacaatctacttttcaaaagaaaactaaggaaaccatacattcaattctttccttcatatatgccgacttattcatcgatctgagaagacctgattaacatttatttccagggattcagctaccacagctcaaaatacagatatttgagtaaacagcacaagttataaaaaggcaaaggccaaagaaaacaatgacaaaaaataactgttacactaactgtacaaattcagcaatgcatgcaaaagaactaaaacttgaaagagactgtgcttgggtgtgggaaaggcatggagtttggagatggacaggactgagtttcagttctggctttgccacctctagctgtgagtccacattcaaactctctgtacttcaatttcactatctgtaaaatggggcaataatacagggtcctgaaagaactttagtgaagtcagagcaagtttcagtttgagatgcttctttccacactcagatttaagtggaaccagaggtggtgggatttcagttagagtcaacatggttcagccaagtctcacctccttctctgtataaatctacagtttctttcaaaaactgaagccatttctgcttgtccccttaaaaaaaaatggtggtcataaccatctcaaaggctgtgatgccacaatgagataagctttgtcaggacactggatgctcaataactggtaaataacagtaatgatgacgcatcttctttaaaacctgtcttttaaaggtttgaagacgaaatctagatttggagatttctacgactaagtcaaattcacttacttactgatctgctgagttctctttccaccacttttgacatccatcgccgttttgttagctgtatgcggcgattgggggtgggggggaagacgaggatcagaagccaaagcctggtggctgataaccaggggagggaggagcagctcactgggctggggaagaggatgggaaagcccagggcaaaggtactcaccgcggcccaccaccaggagtgggggatggtagtgaagttggtgctgggcacatcgtgctccacagagtagacagccgcagagaaagtgaagatgcccatggcgatgaagagcagcaggcagcccacctgctggtagcactggcgcagcgtgaagccgaaggcacgcagtccggtggagtggcgcgccagcttgaggatgcggaagatgcgcatgaggcgcatgacgcgcaacacctgacccaccttacccacgctgcccaccgtctggccgcgttggtggccctcgcccgtgaagcactcgagcagcagctgaaggtagagcggcaggatggccaccaggtccaccaggttgagggcgctgcgcgcgaagcgcctcaggtcgggcgtggaggctaggcgcagcaggtactcgagcgtgaagaagcccatgcacagcatctccacgtgctccaggatgggccgcaggtctgggccgccctcgccctgccccgagtgctgctgcatctcctccacggtgttgagcgccagcgccaccacggagacgagcacgaaggtgctggaggccaccccgatggccttggcggccaccgaggagaatggcttctccatgaggttccagaggcggcgccgctgcgggccgtagaagcgcatgtcgcggaagagttcctccgcctcctcgacctgcgcctgcgcgcgcagctcgtgctggatcttgagccgttcgctcagctcgtcgcgccgctcctcgaagcagatgcggcagcagcgtggcgtgtacttgagccgcacgccccagtagcccagctcctccaggaagcggcgcggacacagcccgtcgagcaccagcagcaccccggacaggtagaaattgtagaccagctggaagacggccgggtcgcggtcgaagaagtattcgtctgtctgctcctcgtagtcgtcgcacaggcttagctggcggctgcggctggtggaggtggccaggcgacctaggcgcgtcttggggaagccggccagctcgcagtagtccagctggtagctgtggccacccacgttcacattcagcgtggacagcagggccggagggtcgctggggccctcgggcttggcggtggtgacctcccctgcctgctggtcctcttctgccaggtcgtccttccactggtcctcctcctcgccgtcttcgtcttcctcgatgtagtagttatagttgccctctgtccagccgtggatgctggcctgggagccggaacgggcacccagggagcaaatgctcctgcggtgttggctgccctcattctccgtcgtgttccagggcctgtagctccaggaccgtctcctctcactctgtttgagcatggctgcggaaagtggacgcctagctttttcctcctggctgtggtaggggtccctcacctgctcactgcctctaggaggatggatcacgtggcctgcactgtcttagagaggccagcccggaccagcacagctaggggctcagacattgccaccggagctgccccttctcaggtcctgggcaggccagcccagcctgcagggtctgaacgcagtcagctgttgactgctctaatcttgctgatttggaagaagcaagtgttaggagggatttagaacctcttagcccatttcctcccccactcccttgaccctgtgaggtagaggatgattatgtggtcttaaatctctaggtaatcagaagaaggcagagattattgctaataaaaatgtcggtcaacctcgctctt

SEQ ID NO: 12344 - DNA, 6000 bp, Homo sapiens
ttctggttgtcacaactgggagggtgctactggcatctagtaggtagaaaccaggatgctgctaaacatcttatagtgcacagaacagcccccaacaacagaggatgatccagccccaatgtcaatagtcctgaggttgagggaccttgctccaaattgaaggagtggtgaaactcagttatctcctacaactgattgcctgagttcaagaacactgaaagcattaacactagcaaggtacaaacttgaaagcacttacacataccaagcatgtattttaaaaaacaatttcttctatttttcttaaaaaaaaaaaaaagtcaaagtcacaacttgcctccttcttccttgacgctggcctgcagcaatgttaacatccaaacaccaaagcaatatggattcattacaaggctgctgccctctgcagaaaaggaggccaggagctgggcaagcttttagaaaaaacaaaaagctcaaagaaataaatgaatgttctatcgctggagaagcttgacaagaaacttgttctgagggagggctgcagtgagggggctgatatgaaaagaaatagatactgagggagatgggttaaaactgcttaacaaaaaggaaataccaacaaagaaacaggcaagattaaaaataacaccagtctgtgcccagaaaggtgagatccaggtgaagcattcgtggctccagggaaaacactagaggccaacacgtgagcacactcgtgagacagggatggctagtaggaagagctgacagcccccagccaagcagggagacttctgtgaaatggccctgagggacgagcccagcttccaggctcccacccaacctcaacgacccacaaagggaggctgccctccaggaggccacattcctgttctctgagcctttgcctatgctgttccttctgccctgaatgccccctaccctctcccctccagcccctgtgcctagctcaggcctccacccttgaggccatcctggaagatgtccccgattttcctgccatcttggcactgctgtccttcatgttaactacccacacaccagtccgtgtacctgctgaatgtttggatggagttcccctgagggcagagactgtggcttttcaccaacatctctctggagagctttctgcaatggtggtgcagagtaggtactgagaacatgtgcagaatgaacgcttctatttttatacaatgacaattagtttctcccccaccttgctgccatggtcatgtgtttctgcaacagcagatgtccactacatcagtcaacatattctctatcaaacctcattactccgcacatatgtgaaactgatttgacaattttgattagcaaacactataaccctaaaactcaagctggtatcttaacatataattgacagtttattaaaaggcaatcattatatggacattttaacaacagaatacaataattcttatcaccaattcctacacacgcacacacacgcgcatgcacacacacggactctttctcatctagcatatattagtctgcacattgtggctgatgtattctgccctctttataaagccaactctttataaagccacatttccccagcatgttaaacaaagcatgaaagtcaatttgaagacacagcctttcgagtggatccctttaatttgctggctgtattaaaaagataacattaacatgcctttggcagataggaggatatgcagaataagacaatgtgcatacacacacacgctcctgtgattttaaaccgcaggagaaggagcttcttccaaactatccctcagcatccctctccccttaaaatctcatactttcctctcttctgttgttttctaactagggcaatatgctacctctatccatttcgtttgtgtagcaagcactctgttgatgcccagttcatataaaaattcatgtctagaaccttaagaacaacctaccaagaaagcagcatctaacagatttctttgctgatagtgatgaggaatttatctatgagactgatgcacaaaatgaacttaaatgtggagctattactcacttcaattcacggacgtccactgaggtataggacagcagggaaatcttactcctgaatgcaaatgctcacactacttactgctgacgtgaacactcagctcactctgtcacaaacaagatctctacacaatcacttctgctttgaaaatgaaattaaatctatatggctactgttgtatagtcacctctctagttgggtctatctgcatttatgaaactgtcgcttcttctctagggggagaatctagcacagaatgaatgaatgaatgaatgaatgagagatcaaggacagggcaacagaacaagtgacttatgtcattagtaggcaaagtagacctggagacaaacagacaacccatagtttcccatctgtaaaatgggacaatcctcatcataaagacattacatccactatcatgttataaaaacaaaatagggccgggcgcggtggctcacgcctgtaatcccagcactttgggaggccgaggcgggtggatcatgaggtcaggagatcgagaccatcctggctaacaaggtgaaaccccgtctctactaaaaatacaaaaaattagccgggcgcggtggcgggcgcctgtagtcccagctactcgggaggctgaggcaggagaatggcgtgaacccaggaagtggagcttgcagtgagccgagattgcgccactgcagtccgcagtctggcctgggcgacagagcgagactccgtctcaaaaaaaaaaaaaaaaaaaaaaaaaaaaaaaaaaaaaaaaaagataataatagctattttattgaatcgtaaggcatgcgataatatataacaaatgcctggtacatggcagttgctcaacaagtgacagtattagtactgagtaaataacatttggcccaagaccagtgagtcatgctgaaactgccaaaagtaagcaaagtgagtgtgcccctcagaagtgtcctcatccagtccattgaaaaagaaaaactttactccctctcactacacaactggcagctcccataaaactgctaggaagcacactgcatctccttccaggacttgaaatgggtcgtgttatgcagaaagcaagttatttccagaaatatgcaatgttaagaaaataaatcacattctatctccttcaacatgtcaaaggtccactgaaaactcttgctaagaacaccacaaaatcacgttttgtcatcctcatccgatggcaacaaatacaggttggatcaagtggtggatgagccggccctccctgtgctcatgccctattctgtccaagaatctacggcagcggccctccctgtcctcatgccctattctgtcctagaatctacggcagcgcccctacagtctagccaatcacatcacttccaaactcctcagctggggcccctgctggtgtcccgcccatgcctaaaatgccctccttcccctaccgtctccagttctctccccccaccccctaccaccctcttgtaactttcacagcccatttcagctgtgaacccaaatgtagtccaaatgcatcgaattctaatagttttaaattgtgcagtgtcgcacacacttgagtctcttatggtgcttaacacagtgctagggacatcataggtgctcaagaaacttgttgctaggagcataatagctgctcgataaaacccttcttttatctaccagtgatactgaatcgctgaactgaggtaaattactccatggattcaatccaaagaacgcttttgtattaattaccaaactacttaaggcaggaatgttttgtcttaattatgtagactattattttaattgtcacttctcaactaaatactccaactccaccccaggcttgcaaaactctgcaagctgaatcttcacaaacaaggagagattaaggaaatattcttcaaggtctccaacagcatcctgaaagggatcactgaagcgattatgcgcataactcttcagcttccacatgctgtccggaggaatgctccaggtattttggtttgaattatctacctagtcacctctaccctcccctactaccctcttgtaaggtaagggatgcccaaagtggtgtttagggttaaagtgtttccaaatagcaggatttggaacttgccaaaaagataaataagaaaccagcgggggaaaaaaattgaaacctttgtcaccaaaataatgtaaaaatgtttgtcttcgaaaaaatatatatctattttaaatctgcaactgctttgctaaggtctcaagaaccccaaaactgaggaacgtggataaaagactggcagaacccctctgagaggtcccttcaaccccgcgttcttaaaacatttcttttctttgcctgcaaaatgcagccttcccccagaataattccatgtaaaaagcccccacccgcgaggaaacattaatctactttgcaaacatgcgttccagtctgtgccttactatttttttttccactccttccacccccaccccgcgttttttgtaccttgagacaaatgtttttttccctcagagttgaaagctgtccaaaaacaggaccacacacgccgccgcctccgcagccccgcgctgcgcccgcccccggccctccccagcgcggcggccgcggccgccgggggcgcgcacactccagccagccggaggggtggcctctggctctccccgactcctttttctttggacgcggtgggtgggggtgggggagagaagaaagccgggccgcggagcggggccgggagaggccagccccggggcgcctctcggggcgcggcccaggcggacagcggcagcggcggcgggcccggggcccccggcgcgcagagtggtccgtcccggaggggccccgcgcccccgtcccgcccccgccgctctctcccaccacacctcggccggcgcagcgccccgagtagattacagcgcggcctttgtcgggcgggcctggctcccggccaggcgcccaaacaataaacaatcccccgggtgcgggcagggggtttcgccggccgcagccaggctctaggtgtgcgctggcgaatatctctatcaaccgcgaggagggaccgggccgggggcgcgggcgccgcggcgggcgctcttaccttccacccacagctcctccacgttggtctcgaggttcgctgcttttaatcccaccgcgaaggccccaaatatgaggaggcccacaaccaagaacttgccgcagtttttttgaatgtaacaacccagtttaaataagagtctctgaaacttcgctctcagccacagcggcgctttccggccagtagccttcccctggggacgaagcagaagggaggagtgagcgccggggagtcgcggcccgcgcgcccacgcccgcttgcgcgcacccgcccggtgagcccccaacagccgtgggggcgcgggtggccgcggcacacggactcgccctcgagactgcagccccggcggatctgagcgtcatggggggctcggtcataaagccgggccgcagcgtgggagctgcacctcggggacatcagggcgcccccacccgcgggatccctgagcgacttggggcactggggctgcaatacagaagaggaagccgaggtagagaggagagaaaccactcgacacagacaatattcaccccagagctgagaagggaggggctgcgtaatcccagcgatggagcccaaggttcaggagccagcaaaccagtcctgctctgtccatcaccctcggggacgggcgctaggggcgagcgctctttggaacaacatattgcgggttcccccaactggacccccgccgagaatggtagtaagtggggatccacgtggtgagcgcggccgccggagttcactcccgacgcatttccatagcgtggggagaggctgtgtgagctgaattaggaagtggggcagccagctgcaacttacgacaat

SEQ ID NO: 12345 - DNA, 6000 bp, Homo sapiens; identical to SEQ ID NO: 2607

SEQ ID NO: 12346 - DNA, 6000 bp, Homo sapiens
atttttttttaaagaaatggggtcttgctatattgctcaggctggtctcgaagtcttaggctcaagtaatcctcctgtctcagcctcccacagtgctgggattaaggcatgaggcactgcgtctggtttaagggaatgttgtagcttgcttgatctcctacccagaccattaaaactttctccaggtcagcaacaaggctgttttgttttatcattcctatgttctccaaagtggtacttttactttcctttaagaactttttttcctttgcattcataacttggctaactggtacaagaggcctagcttttggcctatctttgctttcaatatgccttcctcacttagtttaatcatttctagctttttacttaaagtgagagacggggattctttctttcacttgaacacttagaggctactgttgggttactaacaggcctaatttcaatattgttgcatctcaggggatagggaggcccaaagaaagggagagagacagaggaactgccagttgatggaacagtcagaacacacataacatttatcgcttaagttctccatcttacatggatgtggtacatgacaccccaaaacaattacaatagttacaacaaagaccactgaccacaaatcatcataacagatatactaataatgaaaaagtttcaaatattgaaagaattaccaaaatgtgataagagccatgaagtgagcatatgctattagaaaaaatggtgccaatagactcactcaacacagggttaccacaaaccttatattaaaaaaaaaaattgcaccaaatcatacttccatcaagagagtataaatgtatccccatttcttatgtgtactcttaccaacattatttctagtaatttaaaaagtttataagtttcatagatgaaaacatgcacctagtaacttttttttttttttttgagacaggatttcattcctttcactcaggtgggagtgcaatagcatgatcttggctcactattacctctgcctcccaggctcaagcaattctcctgccttagccgcctaaggggctgggaccacaggtgtatgccacagtgccgactgattttttgtagagacagggtttcaccatgttgcccaggctggtctcaaactcccgggctcaagtgatccgcccacctctgcctccgaaagtgctgggattacaggcgtgattaccctgcccggccccctactaacttttatcataagcttaatcttagaacagagtccaaaaattttgacaggagtggtggtggaaactagtagaaaaaggaggagaagacctaaggcatgagaactgtcagtatattttacaaaataaagttaaaatatgatatttgaaagttgaagccaggcacggcggttcacacctgttatcccagcactttgggaggccgaggctggtggatcatttgaggctaggagttggagactagcctggcacatgatgaaaccccatctctactaaaaatacaaaaactagacaggcgtggtggtgcatgcctgtagtcccagctactcaggaggctgaggcacaagaatcacttgaacccgggaggcggaggttgcagtgagccaagattgcaccactgcactccagcctgggtgacaaagcaatgctctgtctcaaaaaaaaaaaaaaaaagaaagaaagaaaaagaaatgatgttgaaaaatccagccaataacatttttgtcacaataggggaactctcaagtatagggttttggagagtcagatatttccttttctccccgccagggagaaagacctagaggtttcccccactccctctcactgtccagagcaattaccacaatttagttcagcctaaagagcatatgctgttggaaaaacagcaacaatagacttacttgatgcagggatgccataagccttaatttttttttttttttttgagacaaagtctcactctgttacccagcctggagtgcagtggagcgatctcggctcaccgcaacctctgcctcccaggttcaagcaattctcctgccttatcctccagagtagctgggatgacaggtgcatatcaccatgcctggctaatttttgtatttttttttttttagcagaaagacagggtttcaccatattggccaggctggtctcaaactcccgacctcatgatccgcctgccttggcttcccaaagttttgggattacaggcatgagccaccgcgcccagccaaaccttaaatttttaaaaaaatcacacaggaggctgggtgcggtggctcacgcctgtaatcccagcactttgggaggccgaggtgagcggatcacctgaggtcgggagttccagatcagcctgaccaacatggagaaacctcgtctctactaaaaatacaaaattagccaggcatgttggtgcatgcctgtaatcccaactactccagaggctgaggcaggagaattgcttgaacccaggaggtggaggctgcagtgagctgagatggcaccattgcacgccagcctgggcaacaagagcgaaactccacctcaaaaaaaaaaaaaaagaaagaaatcacactggatctgtagaaagaacatcagttcttttcaggccatgtgaattcaggcacatctaccacacctgtcctgtttcctcacttgagaaagtgagaataacaacatcacaccaatgtcactcaccttgaatgtttactatgaattaaatcaagacaagcatttggaattattttgtgaatcttaagtgctacacaggagtgtggcagaggaataagcttctaaagtcagcaagtaaggttaaaattgagtgcaataaaaattgcttagaagttccttaaattgcccatgagcacagtatgacaaacttgagacacatgagaacaaagactctctgagagacagctgggacaaacattcagtaacactgccagcaaaattgctgcactagaacattttcatttcctctttctgccaagtgcataactgaatctaagatgaaagtatgatgcaactttgttattctacaatttgaaattggcaagttaagaaacctctctgggcctctttgtctaatggtgtagctcagctggatcagggtttcctccacggtttgtctgacaaatactgccagcttactatgcttactatgttccaggctgctgtgttggactgggggagggtagacgccaaggagacaatctgatcgcaacaggctggtgagtggtgaggcagtttcaacctccatttgaggaatacaggattctatcatcaccttccagggaatgcagtgaatgtttagaaaaattacagaaagttacatatttggttatgaataccagctacaatgctatatctaatatgaattaagtttctttgtttccttttttctgtttatgttgctacttttttttttttttttgagacagtctcactctgttgcccaggctggagtgcagtggagggatcttggtttgctgcaacttccgcctcccaggttcaagcgattctcctgccttagcctcctgaggaactgggattacaggcacctgccaccacgcccagctaatttttgtattttcagtaagacgggggtttcacgatgttggccaggctggtctcgaactgcttacctaaagtgatctgcccgcctcggcctcccaaaatgctgggattacaggcgtgagccccagcaccccgcctacgttgctactttttaatgtggggtcattttttaaacctggctttttaattgaaaaagtaatacaaacatatggaaaaattcaaactgtactaaaaaaggtagacaatgagaagcaaatctttcttctatttcagactcctccttcccccattccacaccatatcccctcaaccctccttctattcagacgttaccactgggtcaatccgttgaaagttacagctaaggtgatacctggggtccaaaagctaaatatggacctacgctatcaccagtcccttccagttctaaaactaagtccaagccttttgcagcacgaaagagatagcctcctctcatctaaagttatggctggtaaggctgagacgaatggaaatggatttcaaagacatagatttagaactcctgaaaggcaggagacagaactcaatactttcatggtgagtggtttatttactgattaaataaacgctcccttagggatgtaagctccacaccggcaggagcttcatcaccagctctcactgcagaccccggcattaaaggagctcacacggtaaaagcccctaccgcccaccacagccacagcggccggcagcccaaagtgggaaaccgcgccggccgtcacgtgactccagctccccccggcaaccggcccgcccccaccgagaccccgccaatccggaagggaggtccaatttggccaggccagggcgtgttccaccggcccagtagccttgctgctgcgttatccctagactcgccccacttgcctcggagtctcaggccgttgcctaggtcctcccggtaaaaccctggagactgctagggagaggagcaagggaggggccagcgcgcagaagtgcggacgcaacccggcggccgcgggcgaggcttatgcagagcttcaagaaacagctagggagaccgcaggagtctccagagcgcgcgcgcgggccctccccggcccgacccacgcggcgcggcgtggtgacgcccgcgcggcctgaggaaggggcggggtcggggcgggcctccgcgctcctcccgccctctctgtgtccctactctccctccccttccctcccccacactcggccccgtcagcttgggggtgccttcgtcgcgcagccttgcgtcggcccggcccggccaggccagcgggcagatgccccgagctgccgccgccgccgccgccgactcggccggtggcggtgtgggaggtgggcgaccagcccggggccgctgagtgtgacggacgcaactgggggcgccgggggctccgcacggaccatgtattttctgagcggctggcccaagaggctgctgtgccctctggggagcccggccgaggcgcctttccacgttcagtccgacccgcagagggctttcttcgccgtgctggccgcggcccgcctcagcatctggtacagccgagtaagtagagccgcccgccgcctttcgccgctgcctccccggcctcccggcgccgtcccacccccaacttccacccagagcctaggactcctgccccttcgtgccagacccacctgccttcgcagtccgcgtcctcgttccaccgaattggccgcaggtacccgccggctgcaggcacgtcctccagccggcggtccggggtggatgaagtcgctgctgccgaaaatccctgagcctccccgcgttggaccgacggccgcggcgtgcagactccgcacgctccccggccgagcccagacttgttcttctctcccttcccccattccccgagggacaaatttgtttaaactttccacaattagaaatccggccgctgtggtgccccaaccctcccttactttaaaggtcgccgttttggagttagggaaagcctcttgggctttacccagcgccagactttacaggcctgtaataacttatttctacaaactacagcctgaattctttattcttcactaaaggtctggttatttaactcccctctttaaccccaacatcccttccccactttcgagttggtctttttctttgctgctgctcttggactcttcggaatagggggttaaaggagcggaagtagaactcaaatctgtccgcggaactcccagttataacacctggaaataataaggcttgggaggagcatggaactgaattctgtttttgctttaagtcctggttatctttttctttcttgtattgaattactgagtagatatgagaaagaaataagtggtggatgggatactccctactctctgcaaacactgctataactttgtc

SEQ ID NO: 12347 - DNA, 6000 bp, Homo sapiens; identical to SEQ ID NO: 1355

SEQ ID NO: 12348 - DNA, 6000 bp, Homo sapiens
cggtccgcacccgctctccccacagcggccgggccaattttccttagctgctttctgctccatttcacgctcattcagctgctgagctagacaattgctttgtaactctagggcgcaatttccctgtctgtgaggcgctggggcacaactgctcagaacatctcgcaccaggctcgggtgggtgtgcaaaccgcggtccctcgccccacctgccttcttgggactctgaggagggtccctggagtggcacaggggctggtcccaaggacccagcagcagcgagcgctctcctgtggcaggcctatatccacagaaagggctacctcagtgtccccgatgtcctctattcctgagtctgttcctctacacctgacagcccccagcgaccatcatggcctgttctggtccagtgctggaaacctggccccacctgacccaggcaggaggcacagagaggacctagccacaggataggggaaacgccccacaaacagactccccaaactcccagccagcctacaacacaccaggctgccttctccagcatttggaagagccaatgagtatgtccatttttcagatggacagccaaagccccaagaggccaaagagcagaccaggcaggcagcgaggacagaaggcccaaccccaggtggcctgaccacccgcccagcaatgggacaccacctgtcagaacctcttcctgggaaggtgctgatccctgcaaaaccaccaccacctccatcctgcaggtaacaaaggccctgaatgggagggggcagaggagaggaaggaaggatgaaagacagagctgcaccctataaaatggaaacatacaggcaggtgggcaaggtgcaggggggaggagggtgacccctctacccacaccatagcaccctgaaactgatcagcttaagaatctcaggacaaaggtctggaaggtgacccccaaatggacaccagcccccaacagccacaggccagccccccaggcccttgtggccctagaccccagcctcatccctagcccagcaaatggccaattcctatgaaaacacaccagttaacaggccaacccaaggccctggccaccaaagccagctaaaaaacacaaactcaagcctggcagagaagggaaggaggggcaggtcttggcttgcaaagcccgggtcccagggacagtgtcccagccctgagccagctgggggttggggagggcctctgccctgtgtctgctgggacagctgtgccctcttctccagaggacaggcattgctcaccactcgaggtcccagccctgaaacatttgacccatggcaaaaccaaacgtcacccaagaaaggaaactccccaggcagcctccactggcactgggtggacctgtaaagctttcaccccgcccccacaccaccttccatgcagctgaggtctgtcccaccctctcctgatgccagagccccctgccacatgcacgaccaggccccaggggcagaggggcacacccctgagtaccccctgttcccacagtaattccacagcaaatcctgcaggcaccctttcccaggggaggaaacaaagaccactgacagcgacctcccacacagccacgggggagatggggcaggggccaagagagggcagtcagaggggcctcctggtggaggtgagccccccacaggccctgaaggacaggcacagctggaagaaccaccaggtgctggcagagccgggagccagtcacagcagctgcccgcgtgaccagggctgccggctcaacctgcaccccacaccccaagggactcagagcacccgccccccaccagcccttcctaggggcccagctcgtcccatccacatctgggcagagggtcacagctgcatgctcgggtccaggcccagcagccagccctaggcaaggttggaggctagcaagccagggccaccatcggactgggccatttttctctccctgacacctccccagtcaacaaacagggcccctccagagtttaccaaaacaaacaccctgccgtcgggcagcgcccgcgctaaaagacgccctcgtcaggcccgagcgggactccaagcccagcctcctgagagtcacatgaccctgttatttcgggaggccccggaatgtgctctattttgggtcccaagggctctgatgttaccagaagcccctcacacaggctgcaagctcacccaggcccccaagtgccccaactccaagagtggtcagcgggcctacagctttgccaccgggtctctccacaggcgcatggggtctggtgtggtctgagacctttggactctgtggactccgcctgagtcccaccattcaggataaggccagcgggggccttctccccggcaggcgtgggagcgcggccagccccgggcagcagggccaggaagctggggctgcctctggcgagtccctcggccttgctttccttccagatctggacgctgcactcatccctgccctcactgagcggctcggtggacaccgactgggatcctctccctgcccaccaagcccagcggtagtgaatgctgggaggaggaagccctctctaccccagaccccaaaagcggctgggcagctgtaaggggtggccgagtctccccagcagctccaggtctgaccggtcggccagccgggccaagacaagccaggccctccaccaccactcaccccgaggagggattaggctgtgttgacaaaagggcttagaaaagtagccgcttaaatggaccttcgactgctctggacttcagagctggtcacaagcttagaaaaaaaataaaatgtaatcagagcccagggctctctgctcagccctggggcgtgggctgcctgggaggccatgggccggtcgggagagctgctgctcgagaacagaagactcctagcttccttgtggcaggggagtgcccagggagatccctggggcagtggctcggaggcacgacctctcctcctcacagggactccagcaagccaccatggcgactgggcaccccttgctccctcgccctacatccaccaactccgtggactatccctgtcccacccggagcattagaaacagggacctgttcggttctcagtactcagctgaagtgcaaccagccaggcccctgccacgtccaggggccagacactgagctgagcattcttgttccagaggaatcgtctgggagagcctagctctgtgtgtgtggatgtgtgtgtgcacatgtgtgagtgcaaagctttaacagggaaaggcagccccagcccactccacactgcactcggtcacagacagcgcagcattccctcctgcctcacactcagcagtaccacgagctgggggtgctaatcccaaatccaccaccttgtatcctgggggctcagcctctcccagccagttttctcatctgcaaaatgggcatgagcgcccacccctggaggctgagccctggagctcattcaaggcctcgagcccaccactccatcatgacagaggcagggagtaagcgttaggtctgacaaacctggaacccaccgcctgccccggtcacggggcagcacacctgcctgtgagtagcagaggtactcagactctcaccctcacatccaggaggggctaggtccatgctggctccccttgatgccccatctcactaaacatccctgcagctacattggcttctgagcacctcctggggtggccaagctgcaccccaggctgcagggagggtgggcaggaggggctacggatggcgggggcttcattcataatcagctgtttcgatttccattcagcacaaatccttcacccggcctgacagcctggctgccgtcccaccaccaaattaatatccttcccggagctaatttataaagtctcccccttctcactagcttccaaacccttgggagggcaatgggtgggggccccagccatgccctctcccccttctcggtaggtctgggcctggagttggcgggcagtctgggataggaagctaccgggcgggatggcaggaggaggagggaaactgaccctacgcgcctctgcgctgtcctgctcacaaatggagagccagcctgggagaacacccgggggtgccagagtgaggggccccatttctggaatggggccttcccaggtctgacgttctgttcatacagccccgggggaccctgcccacccgggcgtgggctgctttggggataacagggtcccagtctgtttcctgggcggacacacacccaagggccagcggcctgctagaagccgcagcccgacgggcgggcggcgcagaggccgctcggggcccagcgcgccgtcccggtccccaggccagggaggccggagccgcggagcgcagaagttgctcctcccgctccggccgggttcctgtgcggcgcggctgcagctgggcgccggggcgcaggcggccgccggtgagcgggagacccctcctcgtcccgggcgaacctgccacccgccccccggccccgccgcccgcccgctgcccagccccgccccggccccgcgaaaagttgccccgggtcgaccctccccgggcccggcgcccgaactcacgcgaaggtcggcgaggggtccgagcggggcccgggccggcgaccccccgcgcgcgccgccaacgcgcccccggccccctcccgcccgccggcccccggcccccggccccgtccccgcccggcccggcgagcactcaccgagcggcaggaaatgtttggtgtccatgtctgcgactaactcatgcccggccggcggcgcaggcagcgggcggcgggcgcggcggcccccggcgcggccggcccgggcccgggcggcggggagccggcggctgcggtggcggcggcggcgcgcggaggccgcggcgcggcgagttgttgcaaaagtcgcccaacaatgtaaactacttgtgtctgcgcgccgccgccgcgcgcgcccggcccgcgcccccgccgccgcgcgcccgcgccccgctccgaccgcggcgctgcggcgccggcgggggggtggcggggggcccgcgacgggcgctgactcggcgcagcgccgccgccaccgctcggcccgcgccccgcccgcccagccccgcccggagcgcgcccccctccgccgccgccgccccgcgatcgccgcccgcccggccgccgagttgagagcgccgtgcaaacttgcgagttcgcctccgccaggggttcccgggagccgcgaggaggcggcgtgggagggggcggggcgcagagggagcggggcgggggcgggggcgggagcagaactccctccccgggcccgccacacactcgcgcacacacacacttgcgcgcaagggcccggaggaggcggagagccgggccgggagcccagcggccgggccattgtctgcgcggccacacaaagcggccgggcggtggccgcgaggggaccccggcccgggccaggcaagcgcagagccgggcgggatggccgcggcacccatacctcgcaccccgccgcggcggacacgtggggaaactgaggcccgggagtggcgatgtgccccaacggcagaggacaagctcctcgtccggggaaggtttcgtcttccggacgctacccccggtccaccccacactttcacgccctacccccacggagagacccacgagcccaccgggaacgaggaggggtgcgcgcttcgcctcctcatcgacccgcactcctgggacccctcttcaaaggcaccaggctgggcaggcgctgcccggagttggacacagactttgtggccggtggctatttttataccctgggtagttctctgcctgacttttaaattcacgatttgtttgaaaacgaaaggaagcactcctgccccgggacagctcgggccgcctccgccgcgcgccgcccgccgcccgccgtctcgggcggctggaattcggatttgggtgtgagctacctgcgcgccgccaagcccagcctt

SEQ ID NO: 12349 - DNA, 6000 bp, Homo sapiens
gaaagctcatggcacagagcctgccatataacaggcattccacaactgtgaagccagcatgaatgcctcacttaatagaggagaaaactgaggcccggagagatgaagattcttggcccaagttcaaaagcatcaggctgcatctctgtctaccaccctgcaaccagacttgtcctcttgtatttaaaaaaacaataaaatataataaagttgaggagaaaccatcggatttaaaaatgaatgtcctaagtctaaaagtcaagatctgtatcttgagacacaagaaatttcctgttaatgatgaacgtacatcattagagtttcttatctttcaaattctagagatttatatggggattctttgaattacatacaaatatttttaacctttataagatttatatcaagtggtatattaataccatctgtggccagtacaaattccaccctacaccccggaattccatgtattatgaattaagtattctgtctattccatttgggtctataagcattcttatcatgtctatttgtttaaggacctcttttaagaaacagctcatttaatattttgtgtttgaaccatcttgaaggcaaatattacagtcattttccttttacatagaaaaaatacatatcatgaaaataaaataatacaaaataacattcatgggttccgagggcatatctcccaggatgtgaagtactgcctcactctggtagtatggtcagctggaggtaactaggaaacaagctaacaaaacaaaaggctgaacaatcaataaattaaacaacaaaccttcgctttgagattactaggtgatatagaacaggaaggcatgtggctgtcctgacaaccagcatctattcctccctggctggagttgaggtgatgggagggaaattgagtgacagcagaaagaatctctgtaagcagagctctcagagtgacacctttggggacccaaggccagccggggttaagattagtgtgaatgctctgaaatgtctgcttggtgttggccacacccttccagggcccctggcctgccctgccctggcatggccagttatgtctggaattcagggctgtcatcccctccccaagctctcttgtggggtccctggtgtggcttttcctcccacagtccctcgtttgcctttattatcagtagctgctccccacagtggtggcatcatgagtgctggagagctttctctgcctcagcactcttggcctcgcctctgggcgtcctctgagattgctgtcaccaccaggccggctatggactctctataagatggtggggcctctgggtgggagtcatttccatcctggaattccaggcccgtctctgtatatagaggtggaggaatgccagaggcctctctctctgcaggacagctctgcttttccacctcaaggctctcttcataagctggagggtaaaagtctggcctaggggacaaaacagcataaacatgcgtgcgttatttaggcattaatgccaaagaggcagacggctgcctctctcagctcaaattgtgcgaagctaaactgttaagaaacatggatttttgaaacagatgtacttcttcctggcatcaccagttttttaaaaatgtgctgctcttccaaaagaacctttttatcagccacaggatgcctgcctctagtcacatttttttcccagtgggttatgccaagctattccttctctattgctcattcactcatgaaaacagggccattcagtgtgagatccttgtcaacattagaggaggtgggggctttggatagggaacttctctctaccgagtacttagtccatccacatccttgctccctttctcgcatggcatcatcccctcaattgcactcactttctctgatcatcacagccaacaaaataatgaatgaaaaccaactctgtgctgatccctgaactataccagatgccatgtctctatcctaacaccctttcgagactcagtagctagtttcaaagaaaatatacaaacatattcatttctcaaatgatatcaactgacaactttacacagatttcagttgtagccctttctatgccagtaggctaaagcagccattcattcgggggctgatgtactcattggtcatcttgcctggcatttctaattgctaaatcctcctggcttctccatcatgaatgaatttgggggaaggggagaggggaggaagagagaccggtgagcttggctgagttgtgtatttatagagtgatccttccagtgcctacagggagtgtttatggtgtgtaaccacaacagaacagggactgccatttgtagccacaactccattccaaatgttaccaggcccaaagccagtagctgaagaagctgtctactataaggcataaatctcagccttcgctcagaatagccaaggctgagtcacggggcacatgtgtaaaggcattttacacagaaaggtgagatgttccctggagtgatgtgaaaggttccaggatgactgctgcctgccccaaatcccagctacctctcccaaccccaccctccttcaactgccatccatattcccagtcccctgaattccatcatcggagacccatttgctttgatatctcaacctgggtatccattttgagtgcaaatgctttggagaaatgtgacttcccaggctgacttgccagccattctgcgtgggataagcatcttattacatgcagcgagaagaggcagtaaaatgggggtgttacgatgtccataatttactttcaaacatttcagtatactgtaatattatgcagtgttagtcaatttaagctatatcctaaaggcaatcagttacatttatcagaaattcacactctagaggtagtcctctaacatttatacaaaaagaaatcatcactctagaggcatcttctacaatcacttcatttctcttaatttttaatcaaacccagaaactctgctggttagtataacattggaaataagttttggttttcataattattatcttattaattagcataaaggatgccaaaagtggatgctcatgggtaagattacttatattcaagatacatggagtagctaaaatattttagatactttctactcttgcacgaagagggcaaaataattatagtcttgtagcctgtatcttgagaatgatgcctagggtgttatccctaaatggtcctgtggctagccaagaattaggaggtttcttgttgcctgatactgactataagattaactgaatcttttttttcttgtggtaaaatatatatgacataaaatttactgtttttaagtgtatagctcagtggcactaaatacactcatattgctctacaaccatcaccttaaaactctctactcattaaacaataggtccccagtctctccttccaccagcccctgggaccactgttctactttctgtgtctgtgaatttgactacgctaagtactcatgtaagtggaattatacaatatttgccctttgtaactgacttgtttcacttagcataatgttttcaacttcatccaagtggtggcatgtgccaggatttccttcctttttaaggctaatattccattgcatgtatataccacattttgtttatctactcacctgttgatggacatttgggctattatgaataaatgttgctacaagcattggtgtacaaacatccatttgaatccctgctttcagttcctttgtgtataaactcagaatgtagaattgccagatcaaacagtaattcaatatttaatgtatagaggagtctccacactgttttccacagtggttgcaccattttaacattcccaccagcaatgcacagcgttccaatttattgacatcctcaccaacactagctgtttggttttgttttttgatgataactatcctaatgtatgagatggcgagaaagaatgaatcttgcctctagaatattatcaccttcccctgaaggaatgttttatgcaaggtgagatcacaacacctaaaaggacagtaaactgggacttttctgagctcacagagattccaggactcattttatgcctgcttcttcatttgttgtgtggcagaatttggtctgggacttgctttccttagaacctcatagccaggttatgggaagtaactaaccatcacctgccactaattaatgacagctgccatgatataacaaaagagcctgggtttctaaattggcttaggtgggttttcactgggggtggtggtagggtttctctgagatgagttgcccctgcgtcatggttttccccaaagatggcgccactcttcctaataacaaccccagagtaattccctgacaataaagctttggttctagacagacagcccatgggacatgtaagtcgctccatagtaggatcagaaattactcagatcttacacaactcagcccatctcagcccttcttggtccctctgcctgtcagcacgtacctgtctactgtggccacgggcagggccccatgagcaaggtgttgtcggagcatgtgcctcaacactcctttgctttcagtcacctggcgatagttgctccagaaaattccactcagaaggatcacaaaccccagaggcagaagcaaataggccgcaatcaggctcccctgacagtcgaatatggagccccaggaaatgaagaaggcccccaggcagaccatcaggaaacccatcaggagggcaagagcacagagaatgaggccagttctgttctgcatccttgcaccttaggaacccagcaccctgaccctgctgctcctctgcttccctgcttgctccaagagaatgagctcattagccagcttgcagctttatatgctctgggacccactggcctttggacaactaaatgaaacaggcacttagaagctattcattaaccattgaaagtaagtgtaatatccttggagaattagccaaaaaacatagcattgtatactgcaggcaggagtggcttcgtgtagctgttttgttcttcagagttgggtgggacactcagctgttcccagttatttgaacgtacagccctcctttgattaaaaggcgctggtctcttaatccccatggagggcaattccccactaaaagctggagaagttagcactctttaaagaacgatcttctttgaggtttggtaagaaatcccttcctgattccttctccctttttctgtactaaaaaggcatttcttcaaggctgttaacatgtttgtcttgcctccctcaatgaatccccacttattgcccccacactatgatactggcataattccaagacagaagttcagagtgtgaacttcgtggttcctgctctgttgacaagatcgaaagagcctgagtgggagggaaaggagagtgctggagaaaaggactataatagacagagcctcgggaatttggggggattttgggcctgtaattcctgcaatctttccccctttcataaagtacatatgaaatagaattcgttttagaggatgctgctaaaaatgttccctgtcctctcctccacacctctgctctatgtagcattgcctcaaaaaatctttccagaaccagccttctgtttcctggctggaatttgttttctttagcttgactgtctttgattgtggatagcttatttcagacgtgctttatgccctggctctgcccttttttatttgataatgtggcatgtctctgccaaaagtctccttcccataggaaccctgggttgcttttactcaggatagcttatcttcagttcctctttgctgctgttccactccactactccattaccattattttccatttactttcccaatgagagcagcagttttttgtggcgtgccctaataatccctcatataacctttagtctcacactcaccatctccttagctctaccttcatgttagggctgggagacacggatattagagaggtacacacta

SEQ ID NO: 12350 - DNA, 6000 bp, Homo sapiens
ataacttatataataactgaacaataagtatctgtttcccttgttattaaaaactttaagtcagaaactgtgtcttttcctttgttatggtctcctccaagcccctatgtcagtcccagttaaagaaggggttgagtaagagaatataaggaacgaacaataaacagaaacgtaacagggcagggagttcagaatcgttttttgctaaattcttcctaagtgctaaagccctgccacatcagactggtaaaaggaaactgaagtgttgttgtaacgcttcccttccaagacaagtctggagtagaatgacctctctacacatcctttcaacttatcaaatagccttcaccttcatgccagaaatattcccaagaccttttctaggctcttttcttgtgatcctgcaaaatgccatcaaattctacgcttttgcattttttaccaatcatagtttttctaagtgcatcctttcaagttgttctctcatctgcttatttctatgccatttctcatatttcatgtattatccaatttttatctacattcaaaaattatcattctcacttaaaaaccctcagaacattaaaagtagaagtgcaatttttctctcatgcaggaatttttcactcataaccgtccaatttacttatctataccactctttaaaactgcaattaatttgagtgaaatggcagagggcgttgcacataccaatgtcaaaatgccagaaatccactttccatttccattctatctgaatgcctccagataagagtttttataacattaatgctctgatgtgccagacactgtgctaggtgctatggatatacgcacaaaaaatgaggagcatggtttagtaggaaagagagacctactcagtacttaaatgcagtgtgataagtgctatagccactttaaaaacatgtaagtgggaccagattattctacctcatgagatccaatgttgacacagagggtaagtgtccacttgtttaacttccaaagtccataaactccctaaatccccaaaagtcaaacacactaaatacaactgcatggtcttagtttataaagcagtgtgtgaaatcataatggtttgaagttttgctgagatctggaactgtaatttatttgggaatctgaactaagcatgacttggtgaaagcatgaggccagtgcctttgccttccattattacccacacttctttttttttggttttcctccatttctccatgcacaggtaaaatctttttgctaaaatagtgatgatcaaatgtcatatcttcttgtcttaccaactgtatttaagtcatgttagtgtacttattttttaaccaccaccacctaaaaaaaaaaacaaaaccccctcaaaagggcatttatttgaccaaaaccacctcagaatcataaatccactgatgttttacataattatagtttccattttggtgatgcatttattatcaacattcagatacaggcttctgcatcccgtttttattccagagccactggaactcagcttctcccactattctatctgacctgctcttagcaaacgccacctggaccttttatccttcacaaaccctttttacagccggaggatacaatccaaacaaacagccattacatctccattgcctcaacggataatgtgcaaggctgaagccctccaaattggatgacctcagttcattaaaaccttgcattacccagaaaacatattctttggcaacttcctcacaattctccgttatgacagaagttaaagcagaccaccctgtaataattgctcccacagacagcaagtcaaagtccttatccttattccaagagagagcatcttcaatgaggtaaatagttcttggaggtgctccacttggaagatgaatatatgttcatctccataaatttaaaatgcaagttttcaaagagttctgctgggtctgattttccagggtccaaaatatctccagacatcccttttgtctcacagataatttccacagtaagacagtgggcgttctgggggagctacagaacactcccctcattccctcctccaccagtacaactccacttccactcccctgttccaagatatttgtagctatcacaaacccgtcagagtcaagagtacaagtgttacctactccagacatactggtctttaactgcctaaacgttccttgatcttgagtggatcacttattttatctagcttttcattagctgacaatgagtggtaaactttaggggtagaaacctttagaggcaaccatatagattcatcagatcagttccgggatgggggcactgatcagtctctcctggtggccctcccagcaggaatctctaccatcactatttctaccctctaatcatggcacttgttttcaaagttcttaccaacatgctcaccattctcatgccaaaactactcatctccactcctacaaagcccagcagaaggcaacagctggcagtgtttctgctgccctctcttctggaagttctccatcttccagaagatgggttgacacagagggtaagcgtccacttgtttaacttccaaagtccataaactccctaaatccccaaaagtcaaacacactaaatactattgcatggtcttagtttataaagcagtgtgtgaaatcataatgggataactgatatacaatccaaatatcactatctttaacctaattatctatatcatcctaacaactactgcattcctgacactcaacctaaattcaagcaccacaaccttattaccatctcgcgcctgaaacaaattaacatgattaacatccctaatcctatcaattttactatccctagtaaatcccattatgatttcacacactggtccagggctccctcacgcaccagcagggcttctggctgactacaaggaacagaggttggagcttcatatgctgaagtgccttggatggagagttctttcctattttttctggagtcttttttccatcactttttacataatcggcaacaaagccctttggggcctcagcactttcccagttccccagccatccctcagttaactgccaataaaaattacaatctcactaacgctagtgagaatttaatgaactaggtaaattaaattttacctagttcaattcacctagtttacctagttcagggcccgcccctccaccactcattttatgactccaaattatccaaactgctctggaaggcatcaataaagttgttagctccttgactattttcagctctggaaaaacaatctggaggaacaatccaaggtaaaattatatccactcaaagtacaatcattaaaagcaggctacctggcaacatagaaaattttgcctcgggaaaaaaaaaaaaaggctagaaaagaaatactttacaactacaatcgctgacgcattagtatgatggggcccttcaagcagtaataccaccatcaagtacgatttatacttcgtgatgtcctagatggtttgattttttgcagtagtagaagaaaacagcatcgggctaaatctctcatccccacaagactcaataaaacctgtcaaatgaaatacaaatacatattcacaaaatatttcctactagaaattctcagagttttgtacccaagtcattaagcacctatttatggatcctatggaaaggggggcggttcgcacacttatcatttaatccccataataactctgagaggaggtatcatggccttaattttgcatatgaagaaacagctatttcaacataataagtcactatccaaggtcatacaggggtgtcacagcaaagactcacatccagccttttgactggtgttcattgttcttctcagtgttttcttagttccttaaacccaaactaagcgtcaccattaacactatttccagaaaccaattttctgtcatatcaaactgatgcgatcacagttgtcacttgatattcgagactttccctgttgtgggctaccccagatcctactaataatgatcaccctgcttttcgaatgtgaaatgcacgttattaaaatattttcacgaaatcgtaagatggccaaagttttgcataacaatgtcacaaaaaggaagagggcaaggaggctagctgtgccccccaaggccccgtggggccgactcggctctttcacagggccacgtgggaaacgtgagtatcttaaaggtcgcggtggtggctgtgctcagtttcggggtcacagaggcccacgctccgcggaccggggtcggaaggcgccgtgggcttcccgcggccagtcttcgaagcccctccacgcccgcaggcctcaccttgagtgtctcgtaggcggttgccaccagcaggaaagcctcctcggcgctctgcggcgtccgcccggggccctcgtctccgggctggggccggtagcggtcagggtggtagcgccgggccagctggcggtaggcccgcgcgatctccgccttgcccgccgagcggctcacgcccagcacctcgtagcagtcccgcgtgccgcagtagagcccctccaccagggcccccgcgggccgcaccagcagcagcgccggcagcaggggcgccagcagcatccaccagcgccggccggcagccccggctccccagccgggagagagcagcggcgcccccatccccagcctcgctggcggctctgccaccccagcgattctgcagcactcagccgcgcgcccggctagtcccgtctggccccagctacacgtcagcagccgacgcctccgcgcaggcgcacagggcgcggctacagcaactacttccttcgcaacccgttggtagggagaaggacgcctcagccactaggctgcttccggtgtgtcactgaacaccttccccgtaccagcagctggaggatttgtttggtagcacctgggggatggctctgtcccgggcgcacttaggcgggctgtgcggagcgctttaccttccacagtgtccggcacacgcatccttttcgacatcatcacttgacctgctgcaataggtaacctacctggctctctcgcatcccgttatcagcgtcaagaagatttgcacgtaggcctttaaagccagccaccagccccgggcgccttcctctcactaaccccatgctgcctttccaaacggaagatgaacttagcaattctaggcgctgcctgtgtactaggtagggaccctgaaagttcatagccatctagttcagtttttctcagcctccacgctattgacattttagaccagataattctttgcctttgaggggctgccctttgcattgtaagatgtttagcagcatatctggcctctccacactaaatgccagtagtgccaccacccccagtcatgacaataaaaaatctctgtacgcgggtctgtgcgtccaccttgggctgcgcgttcccgggacaacctgctggaaggatcaagcgatccttccaaaatgctaggattacaggcgtgagccaccgtgcccggcctacatttgaatttcagataataattttttagtataagtatgtccaaaatattgcatgggactatatggcaacatgaaaaactttgcctcaaaaaatctgtttctatcattcatctggtaaatgtttattgagtctctactctgagccgggcactgttacttaggcactggggatacagtggtgagcaaagtaaacaagaagctcaacttcagagagcatatattctgatggaggatgacagtcagtaacaaataaataaacgttcagatataatcaactcttttaataaagtgaaatcaaatactgatacatagcattatatacttataatacataatgaatatacattataattttgtatttctcattgaataaatatatatctctcattacatatatctccctcattacatatataatatatataatctcattacacatatatgtctctgtcattacatatataacatatatg

SEQ ID NO: 12351 - DNA, 6000 bp, Homo sapiens; identical to SEQ ID NO: 3113

SEQ ID NO: 12352 - DNA, 6000 bp, Homo sapiens
ttccacatctgtaaactggagataatggccactgcctaagcatcctcaaatggtcaaatgagatcaccgacctgagtatgtctggcaaattacacagccgtctatacacacaccagctatgactcgggaccaccttctaggacatgcactctgccaactgcctgctctatgtcaacatatttaatcctccaaatgttctaaagggactctcctgcctctgggaactgttttccaaagcacaggccaaggaatcccagtccccaaagatgtctacacgatcaaataagtgtggggaaacacgagtcgctagctcccttatcgtgatcagctcaatcctgatgacggctctgattcaagactctgataagtcctgcagcaaggataacaagaagtctttgtttcctggaattatcaaaccactgtgaccgaagaaactggtgtctcatggaacacacttgggaaacgtggtccacgctttttgggaaatgtggtcatgaggctgcattagcaagacccagactgataagatctggggtgaaggagaaaaaacagaggtttgcaatgaaacaactcagcattcaatgagtgcggcaagcacacattactcagcgggagaaggaggaagagagtaattctgctgtctgccactctaccctggacctacagcaagaaaagcaaaggactgtggggatggagatgctaccctttgctccccaggctgggaagggcacttgactggagctggagctggctgagaaggagaggggcccagtccttaccccaaggatggctctgctatctgcgcgtcggctgtcggtgctgaggctggcccgcgtctgcctgtgcaggatcctggcattccttttgctccatggacgctgcctccctacaaggaagcgagagctgccgtcagcaggcacatgtgtgactgtcgcagttacctgccacaccgccagcacttcctgagagcctgcttggtagcaggcccttggctgggctctggggtgacaaaagaggttttttttgtatagtggtgcaatctcggttcactgcaacctccgcctcccgcattcaagtgattctcctgcctcagcctctcgagtagatgggatttcaggtgcgcaccaccaagcctggctaattttttgtatttttagtagagacagcgtttccccatgttagccaggctgctctcaaactcctaacctccagggatctgcccgcctcggcctcccaaagtattgggattacaggcatgagccaccgcgcctggcagacaaaagaggttctgacagagcacctccctccagaacctggtctactgaggaggtgccaagtcagtagcgacggtctgagagctcagagctctgctgcgggggagccaggagaagcactagacccagactagtggggtcagggaaggctttctggaggaggagttgtctgagttgactcctaagagtaggagctggaaaaagagcattccaggcaggaggaacagcacatgtttacctggaggagagagtacatggcatctggagaaggcttgcgggctcggcatggcgagatccagagccagagaggggaagtggcaagagatgagccacagtggggtggctgggtcaggcagagaccagccagtgcccagactccaacttaaacaccaaatccacccatcatctccgacagtcaaccagcctctggtgagcatctactccatatgcgccagacactgtgcagaactgtgcatgggagtggcagggtagggaaagctgtgatcactacgacacgggtttcggggagccaggagctgggagagtggcccagccaccagagagagccaaaggatcagcaggagttacccaggaaggaggagggcgggggtagacaaagacacctggactgatctaggagggatggctgtttttccatcatttctaccactgggtatttactatattgactaagttccaggccctgtgctgggagggcagacatggaagatggtctccgccgtcatgggaggtaggtcaataaccctgcaattccatacggggtggtggtgactaggcagtaaagtacctacagctatataggcacggaggccatccaagccaacctctacctcactctaccctccttgtcaaggatggggcacccactgaggctgggtggtccaatcacctgcccatggcagagccaggtccagaacttgggcccctggactccctgtcactaattattctagtccctcctcttccagaaagcataccctgaccaccccctacataaccacccagagctaattccttcttcctctgggctgcctctgtaatatttctattaatatggtggccacagtatatcagaacttatgtgtcttctggtttgcctgtcctcccagactgcagctctcaggaggccagggatgttttcccagccatcccaggcccaagacaggcactttctaaagaatggctgaatgaatgaatgaatgaatgaatgagtcaaggcatggagagacactgtgctgggctctaagagccccacatccatcccacctgaatctccaagaggtcttggcccatcagtgtgtgcctcagtttctccatgtgaaaacctggaatcagctctactctaagacgaggcagtcaggaaccaggctgatttccctccaactcctacaggcaaggtccaggccaagccaggcagcaacccagggtccggccacttccctgagttctgacccacggcagtgatccccaggattccctacagtccagaaaggtcattcaagagtttgcaaaggaaacggcttcctggtgggtgtgcctaagggatggagaaccaccacatctagtcaagttctggggggaagtcatgaacatttcctgtgcccccgctctgtttttttttttgtttttttgagatggaattttgctcttcttgcccaagctggagtgcaatggcgcgatcttggctcactgcaacctctgcctgctgggttcaagcaattctcctgcctcagcctcccgaatagctgggattacgggtgcgcagccccatgcctggctaattttttgtatttttagtagagacaaggtttcactatgttggccaggctggtctcgaactcctgacctcgtgatctgcccgcttcagcctcccaacgtgctgggattacaggcgtgagccaccacgcccggccctgcaccccctgctctgtaccctatggtccctagaacgcagagggcatcagaccccatgccaaagccctgagaccaggaaaacaaggaagcagagaccagccacccagtcactcatccctggcatgtccacaacagcctcctccagcacaggtcatctgtccttgcctcacttcatgagccagaggaagacttgaccttcatggaagcaacaccagtgagactgagcaatcagcactgcccagtctctctgaacaaactcccactcccacatcccctccacaggaagtatcagcaacagccgatctcctcccgcttcttacagcctgtctgtctgccaggttgtctgctccaaagggcagaatacagtttggcaggggttaagagtactactaacagaagaggtggaagaggtccttgggaacttcgggctcccccagttcccttcctcttaccaggtgctctccctccacacctcattctcaaaaggcttcctgaggtagggcaggggaagaggagtcagtggaagtgtggctcacccaggaaccgcccacccttccagccaagtctccatcaggaggcggctaccagacaacccccgacccatccctccttcccaaaaaaggcaacaatcgcaacagctgagaaccggcagacctcggttcaccccggtccagatcaaggggaagaagcagtcagcgaaagcagcagaatcatcatgaactccatgaccccagctatgccccttcagcctgggagctcagtttgctgggtatccagctcacctagggctgcaccaggcctggacctcactggatctcgcctcgccctcgggcccacctgaatgcacaggactgggacagggtctgggttcttagattccggaccggtcttcccaaatatcccatcccagaaaggccccaagagcctagccggggatcctgcccccaagtcagggcactgcccccatcggaacgataggaaggaggggtgcaagggaagagaaggggaccaggaactcaggagaagacagctaaggaaatctttgaaaaagaaatggcaaggagagagcccagaggtggaacctctaggaacgggagagtgtgtgtggaggggtgaggatctggggggacccaggggatgacaaggggacatgggggagccgaggcggaaactcctggtttctgaagcacaaggaggcacaggggtgcctgggagggggctcgcgcgccgcggagccggcgagaaggtggtgccccggagactccgggcactggggagcccagaggtaggccgaacaccgcgggaggtccccagggggccggcccggagacagagccccagatgccccgggcgccccgggccgggcagctggccgagggcgtgtgtaagtgggtttcgagaggtgacagctcgcgcccctttccccaccccgtccactcacctgggctcgccgcgcccggccgcccggcaggcagccccaggccccggccgctccgtcccgccgccggccgcagcgctgctccggcgcctccttttgtttgtccctcactgcaccactcagcctcctccgccccggaagtgacgtcaccgccgggcgcgaacgcggcggccagggcgtcgccatctttatgaggagaattctagcggcgctttctcccgctctcgcctccgcgctagcgccctgctgcttcggggcggaagtagcggagccgggctcggcccccttaaagggacagggactgctgcaacctacggggtgtacttgggaacgaggggtgaagcggcccaggtgagggtgagtagctgtgtcggagcgccacttccccaaggtcaggtgccgaggctgggagggtcggctaacggttccgagcttggttgtgctagagtgcttaatgagtttgatgctactaagtataacggagtggctgcacagaatgattgagccgcccgcgggaatcaactgcgcgtgctgctcgctgattctcgctcggacactggggctggtcctgtctgcacccaaatccccctcccacgaccgcgccggtggagatgatacccgagacaacagaattctggacagatctggggttggaattgggtccccagactccaactctgcagctccataaatcccgctgggtcctcgcaaattccctggctgataacagtaccggcaaccaaattaaaaaataatccatacagtggaatactgtgcagccattaagacgaacaatgtttaatatgcactaatgtagggtgacttctaagataccttaggttaaaaaaggaaacaacagtaaaaacagcgttgggccggttgcggtggctcacgtctgtaatcccagcactttgggaggccgaggcgggcggatcacgaggtcaggagatcgagaccatcctggctaacttggtgaaacctcatctctactaaaaatacaaaaaaatcagccgggcgtggtggtgggcgcctgtagtcccagctactctggaggctgaggcaggagaatggcatgaactcgggaggtggagcttgcagtgagccgagatcgcgccgctgcactccagcctgggcgacagagcgagactccgtctaaaaaaagaaaaaacagcgttgatgggtgctatccatctttgcgtagaaggacgcctgagggtgggcgtatctgcgggtgtgcgcgccagctgtctgataagatgcacaagaagttgttaattgcggttgtctccgacagaattggggtcttgggtacctgggccagggcgagaaatttactaccatgtgcacagatag

SEQ ID NO: 12353 - DNA, 6000 bp, Homo sapiens
ctcaagcgatccgcctgcctcggcctcctaaagtgttgggattacaggcgtgagccactgcgtctggccaagatccctgtcttctcaatgagtaaactgaagctcagataatgtaagtaacttgcagaaggccacacaactaataagtagtggaacactgggatcccaatttaacaatttcaaaaccctatctgctttaaaatctcatatctatctacagctatataaatatctgtccacctaagatcccgaattagatgtttattagttgcaagcagggttagaattgccaaaaagccctaatacaattgtttgcctctaaccacacagccatctatacagggtctctgttctgtttgaccggataccttatttcgttgctaatactgtccatgtgatcagattattcagtggaacatgtttgagtcccccactgagagtaggaaaaaaaaaaacataaacttacagggttttttgtttttctttttgttttcgagatggagtctcgctctgttgcccaggctagagtgcagtggtgcgatcttggatcaccacaacctccacctcccaggttcacgcgattctcctgccatagcctcccgagtagctgggactacaggcgtgcgccaccatgcccagctaatttttgtatttttagtagagacagagtttcactatgtcggccaggctggtcttgaactcctgacctcatgatccatcctcctcggcctcccaaagtgctgggattacaggtgtgaaccactgcgcccagctgttttgttttttacttaataattcacataggggacttttgtgaccaaacgtgttgggatttcttcccaccaccaaccaagtaattaattttgtagtggacatcagctgagtgtcctttaatttagtgttcttttaatttttatttttttttagagactgggtcttgctgtcaccctggccatagtctaatggtgcaatcacggcccactgcagcctcgcacttcacctgcctcagccaccatatacctggagatagtgtcagatatcacaaattgagggcttggtcctcaagactgccccccaccccaagtaggtgtcaatcttaagttttaggttatgtgatctgtcttttttgacgaactgtttataaatcagaaatctcaagtcctcctttttgggtttaatttgttacagtgcctcacagaacctagggaaacatgtttattataaaggatatagatgaagagatatatggagtacgggggaaggagagtggaacttctgtgccctctctgggcatgccaccctctaggaactttttttttttttttttttttgagataaagtctcactctgttgccggagtacagtggctggagtgtagtggcgcgatcttagctcaccgcaccctccgcctcctgggttcaagcgattctcttgcctcagtctcccaagcagctgggattacaggcacccatgaccacactgggctaattttttttttggtgttttttttttttttttttttttttgtatttttagtagagacagggctttcactatgttggctaggctggtctcaaactcctgacctcggatgatctgcctgcctctgcctcccaaagtgctgggattacaggcgtgagccaccacgtccggccaactctctagggacttttatgtgtttagctatctggaagttctcagaactttgttttttggagttttaatagaggctttattttatgtagtcatgattgattaagctattgaccattactgaacaacttaactttcagcgcctctccccagtccccggaggttggagtgacagtgtgggtgcagataaaagtcccacacctctaatcttgtcttggtctttatggtgaccagtcccatcttgaggtactaatacttagggactgtcagccatcagtcatctcattagtatataaaaagacatcattttggggtttttaaggattttaggagctatacttcaggaaacaaggttgacgacaaaatatatattttgtaatatcacaccaagatcataattttgtaaatcagtgttccctagattttactgagaggtgaaaccagtatctgcaacccagattaaccccctagataatatcagcgtttacatagagtttagagtacccctggtgaaaactgattcctaagtaggtcaggtcacagtagtttgttaatggggatacttccttgtcttagaatcacttcctcctgctctgaagggaaactgaaatggatttagttcttcctaaaaaatgctgtgctatattttagccttttttctgctggcttatttcattttatctcatggcttcatgatcattggtgtctctctcctttattttttgaagattctgacactttcaagcattttccagttactgccaaagcttaatgaagttaaagatatttgcagtgttgtataattaactcacatccatagagttctgcggcagcttttaatgggttccttcctataactaacaatctcctgcttactcgtcttaaaaagtttcatcttcatgtggtctctttttttcttctgctgtcccttcctcttcctctttctcctctttaaagcagcaggttgttttacttcttgattagagtattttcacaagtggtcactgtttttgagaagtctccaataacttggtcaagattagatcattgtatttgactaaaaagtcaagccctggcaggaaggtgattactgaggcaatgtcttgttagataaacctgcattgcatgtaccgtttccaaattttagcagactaaactgtgcagcattgtttgaatttccccctccaactcactctggctattaatctgccttaggagataggtagctggccgttctcattgttatatatctagcagtctctggaggaaagagaattcagacctggtaactgagagcaaaatatttatacagacacaagaatgggggtgggcaggaagggagggttgtaactgaaaaaaggcagaccaaaacagttttgacaacttaaatttattgtaactgcccaacaaaggaagtagagttggaggtttatctgcaagaggtttttttttgttttgttttttgtttagtagctccacctcttaatttattattattattcattttattttattttttgagacagtctcgctctgtcacccaggctggagtgcagtggcacaatcttggctcactccaacttctgcctcccgggttcaagcgattctcttgcctcagcctcctgagtagctgggattacaggcgccctgtcaccacgcccagctaacttttgtgtttttagtagagacggggtttctccatgttggccaggctgctctcaaactcctgacctcagatgatccactcacttctgcctcccaaagtgttgggattacaggcgtgagccaccatgcccggctttaattcattattgttaatatttttgagacagggtcttgctctgttgctcaagctggagggcaatggcaccatcatggctcactgcaacttcaaccttctaggctcaagcgatcctcctgtctcagtctcccaagtagctgggaccacaggtgcatgccaccatgcccagctaacttttttttttttctttttgtagagacagggtcttgcgatgttgcccaggctggtctcaaattcctggcctccagccatcctcccacctgggcctcctgatgtgctgggattacaggcgtgagccaccagacccgggttagctccaccttttaatggaggagaatgataagcaggttgaaaatggtggggtgggattggagaaatgcatcatcgtaaaatattttttaactgggggcccatgttgggagtcgcacggtttctcagaaaaggatccagtagtagcattaaccgagggagaaagataagctgtggggaaagggctagtgattcaggagttggaattccaaacattttccatagcttgtcaggaacatttgtgcagacctttggatatatagagagggagtccgtctgctgataaaatgagcgctgggtttaccaaccttcggccttggcccacccctgatcctcaccgccgggcagtgagatggacacgttatttgcctccatttggtggactgcgctctgcgcttccagaggtggagcaattgtccgcctccgcccggccagcacgtgcgggaggctggatttgaaccaaacaagttatctgtgtaccccacgcctttgcttttacccactaggcggtaacgtgatttcacgcctgagagtttcttggctgaacaagttggaaatcactggtttcagagattggaaatcactgggtgcacgcccctggattctttccctagccactcgaggccgtcgcgcttgcctcgacgtctctattcgcacagcgcgcagttaccaccgccccactcccaccgcgccagcctgcgggactctcgggcttccctcgggcggtgggaaaagagcctcccgggctgactctgctcggcgcgcatggctgccaggggaaagtattgtccttaaatccagagcggcgatacgcgcaggggagcgatctcagaccgcggcggagcatcggtgatcccagggcctgccgcgttccaaggcaagcgctagtactgcgagcagacagtggtcactaagaagtcattaccagattggcagggggagtcctagggatccgggtcccgccgtccctcacacctccctccgcgtccttccggaccccagggcgacgcggacccggccgggggagcccgggggagggggccgggccggggtggggcgggcgcgcgtgcgcgagctgtcagaccggccccgcccctcccctcccgcccctcccccgctctccgggtgtagggcgggcgggcgctgcggcggccgcggctgctgcttcctcgggccattttgctgtggagcggcggggaggaggagccgccgaggagaccccgggcgaggagctgcgagccggaggaggccgcgcggactccgggctttccgccgtcgcggggatctcggggggcaaagggatcgccggggagggggaccagagagccgcgcccgccgcgcggagcgccccttcgcgtcccctgcaccatgagctggggcaccgagctctgggtgagtgaggggctgggcccgcgggcagatgcggggcgcgcgctgcgtttccccgcggcctggggagggggcgcgggccgcgctgctgggcggaggcgagggcgcgctggtcggggtcctcgcggcctggggaggaggcggggttccaatgcccctcgtccgccttggcccgagcaggaggtgcgggccggcttgtccttcggaggcgaggggagttggtgcgggtccccggcggcctgaggaacggcgcgggcgggcctccctgtccccggcgccccggagcgggccgtgtgtgtcgggccgagccctaatcccccggggcgagccgcggatgcccggggagggccgggaccgggcgtgggggcgtggaggccccggctgcgcggcgctgcgttgggtctcggggcgccccggccgcgagttctgtcctggctccgcggaggcgctggcggatcgggcacttccccgggagcggggcggccggggcgagcgccgggggtcgggttttggggtgctggggcgagagtgcggtcttcgctctggaggcgaggacttctggcccgtggcggctccgggcgcacttgttctttcggggtagctcaatcctgagtgggatgtgggcactgcgacgtctggtctggaggggaaagtgggagttagggagagatcttacgtgatctacctcaggaagaggcgttcgcggggtcaatgatctttaacggttgctcggagaatagtttccagtggggaaagttggcggtgaggggcgccttgcggggatgcttggccgggggatgcgcacggtaaacgggcagccctcagggctgagggccgtccccggaaag

SEQ ID NO: 12354 - DNA, 6000 bp, Homo sapiens
cctcctgggaaggcattttgcaccaacaaaaccactttttccaatcccgggccctgcaaccacctgattggcagcttccggtgaaggttccttctctttgggatggaaagaaatgattcacccagtactagtgagccaggcactgtgacgcccatcatgaccatgccccttctacagcggaggcagcaaatggcaccaaaagccaaagctctttccggggtcacagctggataccacggggccaggattcccactcaggctggcagggctccaagagcctgcaccccagactctttcgagaaacagtgtgggtttctccccttgctgggggagccaggcctcctgcaggtgccctggctaactcctggacagacctcctgggccttctgagaaggatgggcaggaacgggaaggcagaggcacctgaggggtgtatgttgggtggggctcaagcccagggagggagcccggggccttctccgaagcggctgcaatgtcccccagactgctgtgtgagccctgacctgtgcctccacaagccgggctcggctgtggccctggcctccaactctgcggcccagaagcaggagcctgaggacgcgcttccgtcccatcttctcgttggacttgtggggtgtgcacaatggggtctctgtgggctgagctcggctgcctgtcaggccaaactgaagcaggcttcccgccaagaaggagggggcgccaggccccagcaaaggggacaaggccaggcaccaaagccatggtcggcggcctgccttgggctggaaacagctcaccgggatcccaggtttggggaatgggaaagtgggcccatgacaccagtgttttgcggccctgtggcagggttttaacccagacaccagggagctgcagcaatctgtaccccaaagcacagcgctctggcccagggagacctcagtcccagacccctgtgggccaggctgtgcctactccctggtgccactgagaagaagcaacaggcccccaattttcccagcacggtgttcctcccaccctcccaaagtcctctgcaggagcaagaagcttctcccagagccccgaatgggtgagaggcaaagtccgagccgggagcgcagtggcggggaagggggttatacattctgggaagccacgcataattaatcacacggcattaatccgcctcccccaacaatagctgctgcacttcccctggatcccagctgtcggtctctgaatgaaaggaaacaagatttagggcatcaagcgtccgtgcggcttctgcagagggagaagggggccccaaaaagcaaaaaaaaaaaaaaaaaaaaaagtagtgcgcattcattagtgtctgacaaagacacaatcggctttgtccattaaactgctcacagacctgcttaattggcttcagtttggggagggtgggggccggggagggagggggcctgctgcccacaggctgggcagtcggcacaggcaggagccgggctggggttgtcaagggaatgggaccttctgcagttggaatgagggcgcgcagactggctggggagccatttcttcatctgtagctcctggggggcggagggaactctttttccagacaccaaacacctcctcattattctcatcagggatggactcaagttgaagggcatcggccacagcagaacagttccccacggctgatgggcactcacaggcaggcaggagggagcggttccgcacgacttcccggccccctcagtgcccattttacatctgaggctggcagaccagaagggccacgggattttgaggtcagagtttgcagatgccaggacagaaaccagactcaataattaccccacaccccacgccaaaacatgagttccaccttctcttccccagccccagcctgaggccgggaagagggagctggggcaaacagagagcccaaaggcgggtccgattttgaagagtcaatttcctttgaagaggcatcacccacccggaggtggcatcacctgcccaggaagtatcacctgtgcctagaggaggcatcacccgcctagaggaggtatcaccacccagaggaggcatcacccacctagaggaggtatcaccacccagaggaggcatcacccacccaggaggtggcatcacccgtgcccagaggaggcatcacgcacccagaggaggcatcacccgcccaggaggtggcatcacctgtgcccagaggaggcattgccgccagcccaggaggcatcacgcacccagaggaggcatcacccgcccaggaggtggcatcacctgtgccagaggaggcatcactaccagcccaagaggcatcaccacccacctaggaggcatcacccccgagaggaggcatcacctgtgcccaggaggcatcacccgcccagaggaggcgccccaagttggcagggtggtgggggctgggcctctcagtaaatggtccagagcttcccctggcagatcaactgtttcttggggacttaaagaagaattggggtactgggactcccacttagtgaccccggagcctgaggtggcccacggaggagtgcccaagccctcagcagccagaccagctccacacgcagcataattgctggtgattaagtaattgccagactttgtccaataaaagtcagcacgtgaccgtgcccagactctgggccatctccagaagacaatggcctagtgttctgtcccctgcgcggctgcagaaggcaggggctctgccctcgacaaagcaacaggtcccgcaggggtggtactcacacgcaggcctccgtgccattggccgcttcacacttcccgccattcaggcaggtctcaccgggctgggagcatcgcgggcctaggcaggggcaggagaagagaggtcagtctcacccgcaccaccaccaccgaaggccctggttaccctgggggcggggacctgcacccagccaaggggcatcgtccgccccctaccccggacgcactctgctcagtatcatgggttgctggggcacgggtccgcaggaagcccctccatgaaaccaaaggggcgtcaacattctgcccagagttctgtagtcagaaatggggggaaggggagcagcagggaacacgtcctgcttgaagcagggtggggtggcctgatgtgccgcctggacgcagtgggggaaaagcagagacaaagtgggctactctccaaagcgttgccccccaccctggaggctcactgaggagtctggcagggcagggccccccatccagccgccgagattgcctctgttcaaacccgttctgcaagggggcagagctggacggggggagggggggtggccacactcagctcccgcccgtgggaaaatgcgacagctgctcgcccgctaccccgcccgccaacaaagcgccggcctccgcctcagaatcagagcggcccattgtggagtcggggccgcctccaggggcaccgggacagcaccctggggacgcggccccgcctccgccgacacccaatacctgcctccgcgggcgcgcatctccagggcagcccccatacacccacaggagggggatgaaggtcccccattcggaaggaattcgaccccatctcgagaagggatcaattactcaagcccctccctccccatcttaccggggctgagaaacgggggaggggggtgtgacacagagccgcactttctggaagaggacagataattctcgcctccaactctcggagaaagagtggattaatcactcgattccccagagaccccgctcgctgtgcggcggggagaaatgtaagagccccccacccgcgtcccgctctccgcccccaagctttccaaacttcaactccgcaaagcaaaaggaaagttcagtccccccgggcgcggcggcttcttacgcaacccctcccccaaactgagagccgggctggggggcaccggcgggcggggcgaccgggagcccggggacccagcccggccgcgcgggtcagtgaaggcgaacgcggcgccgcagagcccacactccgcgccccaacatccgccccggcgtgggccagaggcgaagaagaaagaagataaatggcccggagaagcaacaggaaaccaaaaccgactctattcaaatcgaaaaatagtaggcagcccgcccgcccggccgaccggcggcaagccccacgcgcggcgggtgaagggcgggcccggagtagggcctccggggccccagcaccccacaccggcctcctaactcggctccaggcacgggcggcgcgagtccgcctccacggggggatcgagggggaaggtcggtcctccctgatcccgggactccagaaccccacgccccgggccgcccgcttttccctctccatgctggcctccccgccgcccgctcccagccgtggggcgcgcgcgccgggcgccgccaaagtttccaaagggcgcggaaagtgggggctcgcgggtgggtgggcgcctacctcgtgcggcgagcgcgggcagcagcgccaggcagagcaggggcgccaggagcggcggcatgcctccccaccggctgccctctgcgcccgggcggcggcctcctgcgctggccggcggggctgggacgcacacgcgcggcgtacggtcccggggcggcggcggacggtcccgccctctcttccccggctggctggcggcgctgtgctctcgcaggcccccgggcccggctccgcgcccggctcgttccttcgctgcgctcgcgcccgcgcccgcgccccgcgccccgcgcccttgcgctccctcccgcggccgaggcactagtgaggctcagagtcgaggtgcgctccgcccccgccggccccgccccgcccggccccacccccgccggtccccccgccccctccgcggccacctcctcccgcacgccccgtccgcctttgcgcctccccgagctgagccgcgcgtcccgagcccagcctctccggggaggagggacccggcggcgcggcgtgggtcgggagcgggcgcctgggactacttctcgtttgaaagttttcagaggccaaaagtttgagccggggctgcggaaggatccggctctggcggttgccgcgctcggcgacaactggcgactgaaatttgcatgtgaataagcggaggagcccggggcggaatggggagggcgaggccgcggacagccgtgtgcaccgtgcgctgggccgggcggggagcagctgaggccacgttgggggaccccgggcccggggcagggctctgggagagtggcctagccgtgtgtgcgcccctagcccagcggcttcactccctcccgagggccccgtggccgcggctttaggcgtccagaggatcgatcgccgccagacatccctggccgtgattgcccgagcacttgaccgcgagggatgggggcgccgcggcctctgggcaggggactccgggcgccccgagggagcagccgggaccagtgcctcgcggacggattgtgccccgctcccccaagggggacccgcgtcgacacgctcctcggtcaccgtcctcctcctgcccgggcgccgcctgcctaaggtggccccagaaagcacaaacgggtcgggcggatctgccgctggcgccggcgcagcccttcccacgtgctccttccggctgatttatttctccaccacgatgccaggcacgggcaccctgtgccaagcctggttaagcgccaggagtccaaaatgcctgccatagtccctgcgcaaagttcacggcctcgtgccagggacagacagcgccccctccccaccccaacacagggtggtgagtgcgatggcagaaggcgcgtgtcccggcgcccctcctggagtaggagggctaagcctgccctgcggggagaccgaaaggctgggagggacctaggactgtgggggcctggggggagggctgcagaaaccccagagcatggtggcagaggcaggcacagaaagcaggacaaatctcacacctg

SEQ ID NO: 12355 - DNA, 6000 bp, Homo sapiens
gcagcccgccgcgccgctgggcatcgcccgcgcgggggcggggcgctcgggcgtccgggacccgatccgcgctggctccgccccggcggccgcggcgacagcgactctgcccgcgccccgcccgcccccgcttaaaggcgccgcgctccgtccgcgcccgccaggaggcgcccgccgcccgcgccgcgcccgggaccgacccgggcccgagaccctgcgcgcgccgccgccgggaagcctccgggccgcccctcgccgggcgtcacgcgacgcgcccacatcgaatccgagaccccggcttagccttcgtaggccgggggaccctcgggcgctgcgctcttctcccagaggcatccggctgcgcccaccgcgctggcgactctgcagaggcgccccaagccttcactgtccccggggcgcgccgagcggacgctggcgaggggccagctcacccccgtaagggtctcctgtgtgctttgtaaaccagcacttggagtccaggtggtgcccacctggaagggaggcagggcggccaggtgggtccgtcccgcgattccgagcagccagcggaaggggggaaactcgaggccccaggaacgctcgccgtgagcggagcaggcaggggaccgaggcggcccctgctgcacgcggctcgtttttctccccatattcgggcgagtctggtctctgcacagggagttcgggatcaggcggttctgcggctgtggcttggcacctgctggggcgccccgggaggtggggcagttcctccgcgtggcctgtagagagcgacagaggacaggctgaccccatgggtggctctgacggcgcttcccagactcagtttcccccctgtgaatggggtggagtagcgctgtgtggtgtccagtgtcagggcgcacatagaaggcgcatcctcaagtgaatgaagacctccgaggccacagctccccactcctcccagctcctttgcagcaggaaggtgaccctgggctagtgagtgagggatcagcttcccaccccagcccgcagcctcaaggcacttgcttttctctgctcagtccacagggctgggtcagggcaggaagctaccagcaggtctttcccacaagccacagccatgggtgaggggggcttcctgccctcaacctgcccacccctacctggggtagggacaagccctgtgccccagccccgggggcttagcctgttggggccctggtcagcaccacccgtgggttggcctctctcctcctcgccccactctccaccgtccactacaggggctccctggctgcagccgcatccccagtgcctccccagcactggccaccagagggagctacaaggcacaggtcagaccctgtcaccccagacaccctccagcctgcgggcctgggagatgggcgatttcagcctggccaggcctctgacgtccgttccctactcttccccaaccttggcctgttttggtttttgttttgagacagggtctcattctgttgcccaggctggagtgctgtggtgtgatcacggctcactgaagcttcaacctcctgggctcaagccatcctctcacctcagtatcccaagtagctgagaccacaagcgtgagccaccacgccctgctaattcttgtatttttggtagagatgagatttcactacactgcccaggctggtctcgaactcctgggctcatcgccttggccttttgggggacacagaaggctctctgataaggggccgtctggcggaggctgtaggaactggggtagccagtgggcagcccggcacagggagggctctcaggcggagggtgagcaaaggcccagaagtcaggcgacaggaccccccgtggggaacaagcagccccatggccgtgggggcgacatgtcaggggagggcagatgcaggctctgtggccctgcacggaggtgacccatgagacactggccagacccacgaggcactgctcagatgtttattgtccaccgccctccctccctgagcccagaacaagctggtttgctccccgtggtctcctgggccccgccccagcctacacacagggacctcagaactatggacgtggcagggacccgtgcctgtgtctcggggaccacagggcctctgctaccgaggaagctcggggtcccaggtttggcccccacaaacttcaggctggggtgccccccagccccaagggccctgcctttcaccctcttccagccaggccttcacccacccaagatttgttcagggtggggagggtcctcggcagcctttcccctcccgtctgccgcagcaggcacccgttacctccctcccactctcacctcctctgcatgctccagtgcccacctgcaccccccacccctgcttcctgacctctgtgcccagcctcccgttagcccgctgcttgccggtaagggccggatgcctggtggtttgatttcgacacccagcccttccacccacacccacctcccccggccagcggatctcaggcctgaaaccaaccctcaaggtcctcatagacttggctgcggggtaggtgtgggtagcggtcacagatggcacagaaacgttcccgccagtcggtgaacagtcgcacgcggagcctgtcacgccaggcaaagaagcgttggtatcggctctcattcatgccagtgaggaaagccgccagctctcgggctgagccaaagtcatccacatgcacgaaggcgtcagccggcacgaaggcctcataggtggcccgtgggggccccagcaccactggcacagtgccagccaccagtgcgttgcgccagaatttctccgtaatgtagtcgcggtgctgagagttctcaaaggacaggtagaagcggtactgggccacggtgggcaccaggcagctggcgcacagtggccgtccattggcacggccaaagacatccacccgcagatgaggcgccagctgccggtacagcctggcacgcagctgccgctcctggaagttgctgaccacccaggcggccaccctgctcttggctggcagcggtggcgagggcccccagtggggctccaggcggccatagggcacaaagatgtccgagtcgcgccggtagctcagcacccagttgaagatgcctcggaggtggctgaggccgtgggtgtggctaggagactccatggaggcccacacccagggctgccctcgcggccgctgggccaggggcaggtgggaccgccgggtctgcagctcgcggtggtggaagaccacggcgtcggcgctggccagcaggcttcggttggcactcaggtggcagcgggcgatgccgtagcgggtgcaggtgtcgctgggcagctctgggggctggtcagtgaagggccagtgccagacaaggatggtgatcgtgggctggggtgccggggtaccccgaggggctgaccccagcagccacaggagccagagggcagcgagcagagccaccccggccaggacccccaagcctcgcagcctccgggtggggccgtgccctgcagcagcacgagggaggggaggctctgtcacttgggctcagggacatccacacgccccactcagcgccaaccccgtcctcccctcccatgggctcagggacacccacatgccccactcagcgccacccccgtcctcccctcccatgggctcagggacaccgacatgccccactcagcgccacccccgtcctcccctcccaggttgcctagctgtccccagcttgggcctccccgagggccagacactcaccagcattattcatccacagtctcccaggatcagtcagccaagagacccgagattctcaaatcacggcagccgccagaggtgcccctgaaatcacagctacgccctagctcagccccgcctggaactgtgctccttttatctctgcccaaggtgagggaactcaggggaccttcctgctcctgccccgcccctgcccccacaacctttggcatcaaccactgtccccacccccatctcggggacttgctagtcctggggctgctgggaggggtacagccacaagagggatgccaagccagggcaatatgacgcccccacagcccaccccactggtctccagagaggcccagagatgtccagctgggcaggcagaggacagagaggctcgggcaggcttggcccagggcagagaaggcccaggtgcaggcaccctgagcacagatggccccccagcccccacccagctacccaggcctgggcgctgcagacagcgagtgcacttccccagagggccaggtggctcctcccacggcagtatcacccacttcccccagctcaccaccagctgggccctggtctcccaggagaatcttacacattgaagatgtactgtgctcagctctttgccggaagctaaagctcccaattgggccatcccaccccactctgccacctctgccatctaggaacccagatgcccggagaggaggtctgtcctggggcccttagtgtcttcccacaggagcccagcgcgtgcctgcaagggcctggtcccggaatgaactgtggatggaggctgctttgtccttttccccgtccagatccatgcccatagacaccgctgactataggctgggcccagggtcccttcctccagcctgcagcagaggggctttccaggctggaaagggaaggagtccttttgtccctgacgcaagcgggttgggggccagcacccgctccaggaagaggaagggatccagcctgaagtccagactccccgctccctctaagccagggcctggagcctggaggccaggttccttcttctacaccagcccacgttgggtgccagccaggctgggatggccctgcggggtcaccctgagccccagccaaccaacaccccactctcagccacagtgggaggccccatcagcctcttcacccaaccacgttgccactctgctgcacgggaccttgtgtggtcccaggcgtggccagacccagacgtcctggagatctcaatgcaggtcaggcttggtttgtttgtttgtttgtttgtttgttttttgagagggagtcttgcactatcgcccaggctgtaatcccagcattttgggaggccaaggcttgtggatcacctgaagtcaggatcaagtggtgcgatcttggctcactgcaacctccaccttccgggttcaagtgattctcctgtctcagcctcccaagtagctgggattatgggtgcctgccaccacgcccagctaatttttgtatttttagtagagatggggttttcccatgttggccaggctggtctcaaactcctgacttcaggtgatccacaagtttcagcctcccaaagtgttgggattacaggcatgagccaccgcgcccagccaagtttgcttttttgtgtgtgggtttttgttttttgttttttgagacagggtcttgctctgttgcccaggctggagtgcagtggcgcagtcacggtttgctgcagcctcaacctcctgggctcaagcaatgctcccacctcagcctcccaaggagctgggtctatgggtgtgcactaccatgcctggttaattttttaaaattttttgtagaggcagagtcttgttatgttgtccaggctagtttcaaactcctggctcaagcagtcctcccacctcggcctcccaaaatgctgggatgctgggaatgaggacgcgtctgtcctgtcaggtcttttgggggctcagatcgtgtgtcctgggaggaatggcaaccatgaactgttgtccagacctttgccccagcaccctcagagggggcctgcctcccaccacccctgtccctgtcctgttctacttttgggccccaggggctgctggcctctccccggccccacagtgaggacaaggctgccttgggaggggaaccaggcagctggagactgaagtgggaggatcccactgtggggacagaggcaagactgggacagggtggtagtcagag

SEQ ID NO: 12356 - DNA, 6000 bp, Homo sapiens
cccccgatgccacccaagggacaacctagagaaatcagggtggttagtggggtattgggagaggaaaataagcccatttctaactttctagactataaagcctggttcctctgaaaacctaggggatggaacagtgcaatttgcataagctggaagtctcttcctaactgtggtagacctggaggctaggccttctctgagcagagcagagatggggtggggctcaccataaatctgtcttaggggtacagaattgatcatgtcgatgaaaggtgtcttcttttccacatgggtcttccggtaccaccactgcaggtacctgaggagcaagaggcaatgtgagtggaagggggcaggtgggcagctgttcacaggctgagtcacctgcctctctctgtgacctcccattaaatgtcccaaggacatctgctttcaaacctttcttcctcttgatttctatacagttcaaggtcccttcatcttcccagtcaccccagctgaagtgaaggagtggctttgtttctctcctttgttctcctcagaaggggctttctgatctctccttacctctctagcaccaccaccactgctttatttccaacatcaggagcttctgtctgacgtgctgaaaggaccatttatggtttcctggcctacagcctccgcccccaatcccctacctccaaaacaggcataggctgctgggaataactttcttatctttatttttattatttattattttttttttgagacagagtttcgttccttgttgtccaggctggagtgcagtggctcggtcttggctcactgcaaactccgcctcccaagttcaagaaattcttctgcctcagcctcccaagtagctgggattacaggtgcccgccaccatgcctggcacatttttttgtgtttttagtagagatggggtttcaccatgttagccaggctggtcttgaactcctgacctcaggtgatccgcccgcctcggcctcccaaagtgctgggattagaggcgtgagctaccgcttctggcctttcttctttttaaaatgatcatttttctttctaattatgaaaggtgaaagggggaaaaaaataatctcacccatagacaatcagtgtttatatttatttctggacatttcctctcaagccttttttttttttttttttaaattcaacatttaaactgtgaagctttctgattttgctcttggtaaagccttcaaaaaatcccaacattttcctgggcttggtacagccctatatccaagaggcaaatgattgaggctgttttcaataggcaaacgattctgttttcaaggctctgacatctgtcccagcctatcttctaatcttatttcctacaaattctcattccagatgggtcctcactaagtagcccctgccctgccagactctttcccatttccactctcctgcctactgccacattatgcctactgttcagtcacaccacttctaaccaaataattgggtaagtaacccctaagtcccagtttcctcatctacaaaatggggataccacctgctctagctatctaatgaaatggttgaaagatcaaatgacataatagataagaaagccataaagtacaggtatgattattactcatatatacaaactgttatctcaattcctaatcagacattgccttgttatttcaatgttcctcatgtgaggctgacatacttttaagttccttggggaaagggacaatgacaaagactagctgaatattaccctcaggtccaagcacagggtaggacatatggtctgcagtcaatgcatatttgccaattttacagatgaatgaacatacaaatgatggggcacaagagagataacagactggagcagaggagaagaaatgtgattaatgaatagggacagcggccaggcacggtggctcacacctgtaatcccagcactttgagaggccgaggtgggcggatcacgtgaggtcaggagttcaagaccagcctggccaatgtggtgaaaccccgtctctactaaaaatacaaaaacattagccagctgtggtggcaggcacctgcaatcccagctactcaggaggctgaggcaggagaatcgcttgaacccaggagacggaggttgcactgagctgagattgcaccattgtactccagcctgggtgacaagagcaagactgtctcaaaaaaaaaataataataaaataaaaagggacagcacattctaggggtggaaagaagagggaagacaaaggatgggatgacaggaaggcagagaatcctctctgccagcttagagaaaaccggactttgaaactagagaccagaaaggactggtagagggagggtgtggccgaggattagggcaaccagggagagtaactgcaatctatgaggacagacagaacaaaggactatctggcatggaacaagcactcaataaatatttattgaatgagtggactctggctggaagggagaacaattgaaattgagttcttacgaaggtaagacccagagaattctgtcttgctagagctcctggtcagagtgcccacagttcagctccatcttaggagctctcttactcccttaatatggtagctggccattcctgacctatttggccttctccacaatttcaacctcaactcaagagttatcacttagaattcttgtctcacctgtgctttctcctcataggaactcatcctattccaaaagccttgtatcagtaccccccactctatcctggaatggggagccagggtccagggggttgagcacagcttcaggcctctatgactcagttcatatttaagggctaagaggctaggatgcccatcttttcttgatctcattgttcctaccacatgcaactcagtgtacttctctatgtacactagatcctattttgatgcaaaaacttttggggtcaaacttggactgaattgattccagaagcagcctggagggatgattcttctctgctacaggctacccacaggcaccaacaaagccagatgtgcaggcagcatcaggcccttcccactccccagggctagggttagataactgatctccccatcacagccccacagcactgactggggaaatgaagggtctcctactctagaaactgtaagggcagggtttcccaagctttatgcctccctccacagttctgtgtgtattgtgtagactgagtcaggatgacctcagggtgatgctttctgtcctcacatccacctgttcctgttaatgggtctggctcctcatcactagtctttgaactcagtggggatctagatgggttctacatctatggcagtgcctctctgataaatgacttaatatcaagagctctctatcccagaacagaatgacagcaccttctcatcacttcagaggtgagggcagggaggctcttcttacctactccctggagctaaagcttgaagaaagaagcagtagtgttgggactctaacagtgtgtctaatgaggtacagagaatgccccagctgcttgtgggaaataaggggttgagacccccccacccccaaataaaacaacattgtgttagtatcacagcagccagattatcctttcctaccttgccacaaagtatagctaatcccaaagggaagtcattggaaaccagtatgtgagaagagcctgaatgggaaaggctgattgcatgaccaaatgttcctaccctttccttctgaaaagacaaaacactgggagggaagggtgttgcaaagagatgtgacctggtctcacggtccaaaaccacaggcctaaaatatgccagggatagggaccgcttcactcagacaagaagcccaactgctttcttgccctttcccacctctgctagaagttttgagctggaacaaagtgaagccaaaggcattctaggcaatggggtctactcacctcaagcccatgcctatatgctttatcatgttgcttagggagacgttgttagcttgaaagggtttcctcttctctgtaaactcatgagccagacagatgcgccagccaaagggaggcacctggtagcccatagctttaccctcataggaaaccatcagctgcccagagtcctccggattgcagcagtccgtctcttttgggggtcggctgtcttcgggactcttacagtctgtaacctgcacatccttggtgccgccagtctcttcagggcaataaacttgtggatcctctttggcacagcttatctgctccgaggctgggacgccggttcccatgttccctggatcctgggtccccatgacctcgatggcgccaagtcccgagccctcggatactaagtatctcgccagcctattccagatgcgggcgccggtcgttgttaggtatcgtcccggagggccgggcgttggggaaagcttaaatgagctggtgtttcagtggagccggggagctcttgcttcagtgggggcggcgacagcaaagaagccgccttgggctctccttcggttgtctctgtaggtcctggacgggaagggtcgggcctcgtcgtcattgagccgacgattagctcgcccggccaaagggcgactgggcccgcagagaggggaggagccgcggggccagcccaccaggcaccgccccgggacgggcccgcaaggcaccgcccccgggacctcggcccggcccctgggccacggcaccgggtcccccaggattgggcgccaggtcccgccggccggctccggggcagcgcccgcgcccaggtgccagcccgtgggaaggtgaccctgggcgccgggatgacccgagccctttccggtctggcctgccgggcgcttccggccggaagggactccgcggagggtgggggaccgaagggaagtcccgcctctaccgcccagcggacgccgccgccgccgccgccgccgcgtacctagccaggtccctgaggggcgggcagatgaggcctaggggtgccgatccctagtgtcgactatgcgaggtgactagcggcggtgatcttgggctgggacgtggaactttgaggaaagggggagcggaggccagtttgggaactccgcgggggtgcccagggagaagaacccgtcgcacaggggctggggtctagggcccagagcgatgtcctccccctgggcagtactgagtcttcagtcgcctccctcccacccgcctacccctcctatatccaggagctccctcgggcaccacggtgctgaccacccctgtcctcagccctcagccctaggtgctcaccgcaacgcccctccctgtcaaggtgctgacctccgccccgccttgtttccttctagatctgattccggagctgccatgattgaagtggtagcagagctcagccggggtcctgtatttttggctggggaggcgctggagtgtgtagtgaccgtcaccaacccccttccgcccacggccacttctgcatccaggtggggatgctggcactgaaggtggtggcccttctgggaagaagccagattatctctggggctgaggcagagctcaggttgtcctgtagcgacaccacctcctcttgctcactgtgctgtcattgtaggagagggctctttaacagaagatgtggatgacatagctgtacgctttccttcccctcccccgttcccctttttacgcacagtctgctactctttatttaatggtttctctttgggattgtggatttcctgatcactaggacagccatctaaccttgttggttaagatggtgtgatagggagcttgggaaagcatttgtgaggtcaggaactacctctgatgcctccttttccttttcccacagtgaggccctggcctgggccagtgcccaaatccactgccagttccatgccagtgagagtcgagtagcactgcctcctcctgactctagtcagccagatgtccagcccgacagccagactgtctttctgccacaccgaggttagaga

SEQ ID NO: 12357 - DNA, 6000 bp, Homo sapiens
tcttcggcaatgaatcatgagcaagagtcacttgataatacagtgatgtccttcatcagtgtcaaaatacttcctcccctatcactctatcatatcaaaaatatcataccaacagacctttaaaaactgcagaatggcttgtggaagcagagaaaggaatgagaattgggccagacgttaaaacaaacagctagctctacaaatacactgtctgcaaccacatctaagagatctgagtggataagagcaggatgcacacgcttaagacagaaagtccatcaaattcaactttcctggctattctgggccattctgtgtttgactttcttgaaggcgtggtcaaggtataccaggctctctataagtaagcaccacactcatattttaagcagtattatgcacacctcagatgtcaagggctagctttaccatttttgccttagcctcatattactcattcccagagttgataatttttcttaaagcaaactcactgctttacttaatatttatttttgcctcattctaagcaatctagccatgaaataaatggatgtggtagctggttttctgtttttattcctaacatataatattcatgcatcataattgaaaaatagaatatgtatctctctgcaccacctgtaagtctgtctgtataccagactttggaaagcactgttttgggatagcataaaaggtagagaaaatgctttattaaatgattaggtattttgggggtatgatagtccttactctgtctcctctgagagctcacaggttatctaggatgatgaagctttggttgtttaatggccagctggatgatagagacaccaatccctttaaaaaacagaatggagccgtcactgttatgggtagccattgccccagcttgtgcaggtcttctggggctctagctgtcagtcacccagttctaagaagtgcttttcctaatcaaatggaaaaagtggaagcagacactctccaactcggaactctgcctctcacactacaatgtatgcagcatactagctcaactgctttcctaggtaccatccaaaattaaaactagtggccgggcacggtggctcacttctgtaatcccagctactttgaaggctgaagcaagagaaccgcttgaacccgggaggcagaggttgcagtgagccaagaccgcaccaccacacttcagcctgggcaacagagcaagactccatctccaaaaaaaaaaccaaaaaaacaaaaataaaattaaaactagctactgcaatactgcatattggatttccatgcctgaatttttttttccattgctatcacacagccttttcaaaaagtttaatagtaataccaccttagaccctcccaaattcactttctatatgggcatctactaaaaaggctgattgcaaaaattcctatgagggagaaacaggccctaaatagctttttaaaccttaacaaagttcacataaccattgatgtgtttaacccactaaatgggtgttaaatctaacctctgagtctgtgtttctgaccctaacccttggatttaggatcaagacaaaaactcagtaaaacaccagagaaaactgttctgcttccctccactcccatctggggcaatctcaccctcagacactaccatataccaaatcaccttctctggaaaatcaaggctggttggtccaacaactgttgggcccctgattactgcttagagtcaaatcaatgaggcatgttattgggaatcagctctcaacctagataaattcatctgtagccacaactgcttaatgggattcgttctagagatgaggcaaggaattccctggtggctcatattgttggtagaatatgttgaaagtttcagcagtgattgcgaacccttctaccgcttcaccccgcccccaccacacccaaacttcatgcctctccccaaccaagtctgcatgactttttaaattactatttatattactacacatattattgtacacaggactaaagtggccccgcctagtttcaataacttgtgtctcgtaaaaagataaccttcttaaggagagaaaaccttgctaaactcaaaatctcccttgccttcagcagtatgcagaaagttctcacacttgtcctgaagagaaatggttggctgtgaacttttgtcagtgtacaaagaactagatcaaaagttaaatgtaggcagaagtcattgcaaatgcaattcccccgggggtgatgtaaaaattcattggtcttaagcctatgaatgcctcaaaaatagttatggggtgggatgtttactgggaaactggttcgcttcttttgtagggaaagtcaagtcatttaatacatgagggatttctgacttccccccacccaaagcttcgttatggccttcaaggccttttaacagagtgtgaacaacaactctttcagttttttcctggacacctacctggcacctcctacttgtatctttagatctcacctcccttatcaacccaggacccaacacttaagagttttcagcacccgttttgttcctattactagctaccaccatttacgtagcatccaccacatgccttgtactctctgtcatttcattcagacctcactcagcccggtgaggtgggcgcattactggccccattttctatagtggcttgctcgggtgaggtaactgttcaaatgccctttattcccagcaagaatcccctgaagggaatgcatataggaccaatcccactctttgctaaatttctgtattgcagagtgtgcatcggcatcatacattccctccctcagtctcaggaatcccgacacagattgcagagtaaagtctaacagtttcaggtccactagacccctaaatgcagaaattgaatcttgttcatctttgtatcccccacagtgactggcaggagtaggggctcattcagtattataatatctggatggtactgaaaaagttacagcagcatttcagaggggaaagttccccttcatcaatctgcataagtagctctgaaaagaaataaagtggccccactgcagaagtagttctgaaaaaaacacaagaaacacctcaaaagccaccggtgctttagtaaagcacctccgcttctgccatctccccacaatgaggaagctccagtaccctgtccacatttctaaatggcactcatcggattcttaatgagttgcaggctttcccaacgggactgtgtgacagagccacgctcttgctcatctgcgtaatccccacactgaagtggagttgttcatgaaaacttactaaataatcaaatttcatcctctcaagcaggatatgcagtggtactttgctacaaatacatttaccactacgaatttctcacttcaagcgatctcctgcccaggtgtgtgctctcagaaaattacatctctttctgaattacgctggcaaaggtggacctgttttcccaaaaggaccgtcagcacacccagcacagaccacctggggagctgaagaaaacgacctccctccctcctccccgctgggattccccgggctgagagcgtgagtgagaagcgcaaggcagtttctatcatgggatgactctccgctgggaacttcagggaaaccacaaccatcattactcaggccagacagctgccagaaaagcagcctagcctaagaactgaagctgaaatagaggtgggaggctgtattccattactaagcgcgggagcactcactcccaagtttgtccacatttcaagaatgttaaaaccctgtggtagaaatccctgattatttataacttaaactaccgtgtaaaagcagaaacttgacaaatgaagacataaaaagaactggtgacaggtaggctagtactagaatacaaagcattcatcacactcctcttttgtgggtccttccaaacctccatccccattccctactggaaaaaaaaaaaaaaaaaaacaacttttacttctattacagacgcagctgattgaaagggaaaagggattctgctctgtgatgagttttcagtttctctcacgtacacaagcctgtaactttgcatcaataccgagtgtggtttgaaatagagaaggaaaacacaaagacatgcaagcgacacaacagacacgagatgcctccaagccagcagaaatccaggacaccgggttcaagacagtgtcccctactcgcgccttaatctccagcccaagtgacttcagagtaaaggttccaggagccccggaggccacgagtcatcagcccggacggtgaaacctacccctcccctgcgtcccacgtccggatgggagaatcccagcttcctacggcgcatcggggaacaacttcagagcagcacgcgagcagagcccccagcgctcccacgctcacgctcacgaccctcctcccaaccgcgcggcacaaggaggcacttacgcggagccaacctgacagctcccgccggggtggaaacccgcggtctcctcgcaccggcatttcggacacaggtcccgcgtaggcgcgcagctccggaccccgcttctgcttctgctcctgctcctactcctcctgggcaccaccggacagtgctctgacccgcagcccaaccgccggggtgccgacccgcggggacccacccctttgtccctcctcccgcggcggcggcggcgtcagcccgcccccgacccgagcgtggcgcctccgcgctggccgcccggcccgggaaactgtcaaattggccgctaccacccacgcgcctgccggggaagggctcgccggcgccgcgccttcgaggctcctgcggcgaaccgcgtcacgcgcgactcctggccgggggcgggaggcggcggcggcggcaggagaagcccaaggcccgagcggcccgcagcccccacgcctgcacccctccacccccgccagcccgatggttcgctccgcggcgtgcactggagcaagcaggtcccgctccgagcgcgcgcgctctgggaagtgctgcaagtttggagacctggagtgagctccgggcgctgctggcccgactgtccgcggtgtttccccggtgaggtcgcgggggcatcctgtaggaagactttttggcgaggttcgcagggcctcacacaggcagcttcagttctcctacgaagagtcgaactgggaaaacctcaaagttttaggtcctgtctagaggcctgcccggctaaccaacacatacacggccttgtaccccacatttctcagcccaacaactgcctacccgaattccgagggttataagatgttcgtattaaatattaaaacaggacttttcaggacaatatattccaggttatctctttggcacatttccaacaactccaataaagagattgaaactcctctcccatcatcagcttataaaaggttgccagtaggtcacaagtgcttatctgacaggattcatctaatgcaattcagtgtgcttattcctttcgaagtcctccatgtgcaaagaattgtgcagtgacgttaagtgtctttattttaagagcatataaattaatttggagaatccaaacaggtaccgattaaaaatataaccttgggtttgaaatcttaaaaaaccatcttgtaagagaatagttttgcctgccctgctcttcccttaattggaaagcaaaactcgtcctaggctcacaagtagaaggtaaaaggtgtggtctgtcccagaggagatgcagatgctgggctctctccctgaaaagttgcttcacttcctgcctgatcaaaacaagtctagaagtttcgtggaaaaacaagtccagtagatgcctctccagaagtgttatgcttctggactcctttggagtaactaagtccacgcctctggataaaaagcactgtgagtaacgtttcccactttgcctcgagtctccggacttagacattttggttgtattcctgatgtaaggcattgctctcctgatctaagcacctatttataaaat

SEQ ID NO: 12358 - DNA, 6000 bp, Homo sapiens
ggacaaggggcctgctcaaggcacaggggggtcagaggcatatcacgcagctcctccagggcccagagcccaagcacacctccctcctgtccttccctcgggcccgccgcgtatgcacaggcgttcccaaacaccggcttcttcccgtctttcctcaggatcacctcctgggactggcaccccttcaacctggggccaaggcgggggctcaggctgcagaccagggaacccctcctcccgcctgccagccaccgagccccacccacacgtctcggtcccgcccctgctcccgtgggacccgggaaggttggggccccaggtccccagttttttgcttcactatccaactcgtgtcaatctgaggctctgtggtttgaggattttccaattcggactggggcctgtcccacggcacgagagaaactcccaacacccacccgtgtggggcccaggagctgcaagcggcttcctcccaacacctacccatgtggggtcccaaggtctgcaggcagcttcctcccaacacccacccatgtggggtcccaggggctgcaggtggcttcctctgagtttagggggaggaagtggggggacggttcttgtggaacttccagacagacaggctcctcccagactcctttccagccccgaggcagctccctcctcctggaaggggagacccttgcctggggggcgctgcccactcaccgtctgaaggcgaggagcacgcggagctggcccactttgttcacctttaccacggacgcccccagcttcctcttgtccctggccggcaagaatccctgggcatcagtggcagtggccagaatgtaccagaaccctgaaaactgcgcagcggatgtgtgggcggggacaggagctgccaccgggggctgtccccacccccgaggttcccagctagagaacccaggagacaaatgacccttctgtgagccggagtcccagctccgcccaggtgccgcctcggtcccggccactcaagccctggccactggagcagggctgcagagaagcaggtgcccggctggtcagggaccccaggcagcaaagggctgggctgtgggcgccagcaggtgggaggccccctacctcagaggccccggctccttcccacatggcctcctgggggctgggtactgctcggccacttcccttcctgccggcccccggcccccaactctgcctgctgccaaccctagcgccctgggcaccgccgtgccaatgagtgctgctcccacggctcactcagcaggtgcccgggccctcccgctacagaatatgccccgcttgctccacacccactctgcactctgggcgtctcccgacctcctcggccacagctctctgggcccctccaccctggccctccctgacccccctgggcccccgaaccccctcgaggctccctgcctttgccctgcaacttgcggggcccctgtgctggaggctgcagtgggagaggccaggtgggcagcgcccgtgcctggaactgctggtagccctgctcctgggcggctgccgggagactgtgcaggagcctgctccagctccagagccggcgcccggctcagggaccagtggcacatggctcaccttgttccagttgagggcgtgggactccctggggtaccactcctgcacctgggaccctgcagccagcactagcaccagcaccagcaccagcgccagcaccagcagcccctgcctcatcttcaccctcctccctcagccgccaaggccagtgtttaaacctctctggagccgccagcctgtgtcgggagaggagggaggggagggagcggagggaggcaacaggtgtggccttgggctctgctaccctctccccgcccagggaccacccccagacactccagggaagccggcactgccccacctggtggtcactgctggcctgggctgccctggcagacagaggcccctctgaggccccaggaccctcctgccctcagtgcccggcctggggtcactgtgtgtgcccctgagactcattaagccctggccctcatcctagacctcccaggtgacaggcaaagggctggtcgtggcccttctggggcagatgtggacatggtgagctctgcgcggcagccacacacacagcccccaccaccttcttgagggcctggcaccaagcacctgagcaggtgccgaagggcgggccggggctgtgtgcccgtgcccatgaatgtgtgtgtgtgcatgtgtgggtgtgtgctcacatgtgcatgcgtgtgcatgcccagccttgcaggtcaaggcatctgtgtgcacctcgcctcactccagcatgagcctcacacagtccccagccccccatccagccccgagacccccatggcctgtgcttctcccaggacggcaggcagcgcagccccccacacccatcagaacacaggaggacctgcaggctcaggtgtctggggtccctgcccctgcccaggcaagagacacaaccccagcccagagaagcctgagcctggggagtcaggggctgctctgagccccaccagccacctctctcttgtcctgggcagtccttggagcctctggcaccccagctgcggtcctggtggagctcactgctggcttcctcccaggctgtgtcctctgaccagcccccgcctctgagcccgggcctgagtttgggtgtctgaagacccagaggggctctggcaagggactgggttgggcacgcgtcttctttgcagctggctctatggttctgtggcttggcccttggtgacgacccccgccatcctccccgcaattccccggctggcccccagtcaaaagcatccttggtttgctgtggaatcgctttattctgagctggtgctgggccccgggagccgctgagcgaggtgggtggacactggccgaggtcacaggaccctgtgggcgccatccctactggggacgcagcactcactgaaaaccaagaggagtgtgagggggcccagcccaccatggaggctcctccacaccctcagctgccttagagacagtggagccatgaaccccgtgggcttgggcagagggtcctcccacccactgtgcgtagggtggcctcccccacccccttcccccaagagagcccagggtgaggctcaggatggcggcttaccagaaggatcttgtgagcacaggtgactagaaggggaggcaagactggctgtgaaaaaggactgagccccccagcaccccagggccccacccacaagactcgcctgccgtggggacaagacccccaggcctgactttgggcaggggcaggtgaagaccccctcagcctgcctgactccttcagggcgactgagtcaggcagaagccagaatcaaccccagggtctctgtcaccccatcacgccctgtgggctccagaacttgccccaagcctcccccgaggctgctccggtggacactcacggtccttctgcagctgggcctgctactgtgacaggaagcccaggctcctgctccacttggtgaagagccccatggcctcctggctggctgtctccgtcagacctgggggcaccagggcagtgcagggggaagcaacctctgagagctggggaggggccggggaggggctgggaagggtcaggaaggaggccacctgccctgggatgctggccccggtccttccaaagccacctccagtgcagcgagcctcaaggtgggggaacttggcctgcatgtggtcctgtgcggcccacccaccacacagctccccacatggcccccgagcggcccactcaccacacagctccccatgtggccccaagcggcccactcaccacacagctccccacatggcccccgagcggcccactcaccacacagctccccacgcggcccccaagcggcccacgcaccacacagctcccaacgtgggccccgagtggcccacgcaccacacagctccctacgtgggccccgcacagcacacttactgtacagctccacggtgttgaagggctcgtccccgaactccagctgagtgaagatgatggcatagtctctgaagttggtggccagcacccagagctccagcacgcctattgctaggaaacaaaaccccccgcctcaggggagggcagctgctgtatccatccaggggccgctgagctgatgctggccacagggacagaggggccaattcaagtgagagcccccctccccaggagacccctccaagcacacccagagcccccaagctttgtcccccacccccgaccccacctggtgccagcatcaaggggctttcagacactgacggacagacagacaagcactgccccagcctgtcccaggtgtgaacgaggagcggctgggtcacaccagcccagccctgtacctgtagacagccactaaacaggcccctcgccctctgcacctatggggaccttggctggacctcactggtgtctgagcctgctgggaacaaggttccaatcctctgtccaggggcttctcttcaccctcaggatgggcagcaatcccaagaccagaacctgtagcctcctggctctcgggagcggagtcagccctccgtccctgcccgcagggggcctggggatgctgcagggaagaacggcctgggtgaggccgtggccgtcagactcacagggattctcaaacacccatccggagtttcgctttatcaggtccatgacactctggtcacaccctcccagcctggaaaagaaggggcctgtcacccactcagggtcaagaccccggggcccggtgagaggagacggagctcaggagtccaggccaggccagccagcagtgaggccagagcttccatcttctgccagatgccccgatgcccggaaacctgttctcggagagtggacggcgtgggagtcctgagaggggcggacactcccattcacttcctgagagatcctcagtgccagatctccaccaggaacgctgaatgctgctgaggacacaacaggagactcgacagacgggaggttcgcccgcgactcgggggaaagatggggtggggtgggggttcgcccgtgactcaggggaaggatggggcggggtgggggttcgcccgcaactcaggggaaggatggggcggggtgggggttcgcccgtgactcaggggaaggatggggtggggtgggggttcgcctgcgactcaggggaaggatggggcggggtgggggtttgcctgcgactcgggggaaggggccggcgctccctaagtggtcagtccccagagtgagcaaaacccagcaaaggtgcaatggtgtttgccaaggaaggaaactgaggctgagtccatgcgggaggaacagcaagaagaactaggaaagccacgtgggagctgccacctcagcctggagccccttggtcccagctcgccctgaggccaggcctggcccggggggtgcagtggggcccctgcccataccctgcaggcgcaggtgcagggggaaggcacgctggtgaggagggcaggttcttctctctgggccccgtacctggctcagtggttcaggcctgggctctgtcgccagcctgccagggggtagacacccaccacgccacccagcaggccactcttctgtgaagggaggcgggcaccgactcctgccccagcacggctacccccacagcccggctgccctgtaggtgtcccctgtgtagcacggccgccccacagcctggcccacccgacccctgcacgccgccaccagccatgcatgtggtcgggtgcgcctgcctgaggccacaaggccagtctggccaacagcgtccatgaccatattgtttggggatttatgttatgaaagaaccagtggttcttaggtccgaatgcattatcctcctttaaacagaattcccgaaaaaggcctgctgagaggacaggcttccccagctctgaccacagcctgcagcccagatgacccaggacagggatgcatgaaggagc

SEQ ID NO: 12359 - DNA, 6000 bp, Homo sapiens
aaaggaagaaagggacataaaattgaaaaagtttttaaaaaagtattccaggccgggcgtggtggctcatgcctgtaatcccagcactttgggaggccaaggcgggcagatcacctcaggtcaggagtttgagaccagcctggccaacatggtgaaaccccatctctactaaaaatataaaaattagccaggcacagtggcaagcgcctgtaatcccagctaatggggaggctgaggcaggagaatcacttgaacccaggagacagaggttgcaatgagtcaagatggtgccactgcactgcagcctgggcaacacagtgagactccaactcaaaaaaaaaattaaaaaaaaattttcctaggtctgccacagtggctcattcctataatcctaacactttggaaggcaggcagatcagttgagccaggagttcaagaccagcctgggtaatatagtgagacccttgtctctacaaaaattaaaaaaaattagccaggtgtggtagcacacacctgtagtcccagagtcccagctattcaggaggctgaggtgaaaggattgcttcagcctcagaggttgaggctgcagtgagctgtgatcactcctctgcactctagcctgggtgacagagctagactctgcctcaagaaaaaaaaaaaaaaaaagtgctattttattaagagggagataagacagtaaaagagacaaacaaattagacttatccaaatatagttagctttacagatttagttttggaagagattttatataattataaaataaaaggtaaatttttaaaaactaaaaattgaaagataaatgaaacaaatgaacctaacaatatatatgcagctggtggttaggaccacataaattgaattacaaatgtacaggaaacacaaggaacagagaaacataaaaccccacaaggatgcaatcagcaatatccagaatgtggcaaatgctacaggacagaggatcagtttcctaaacaaattataaggaaaatgatgagatggagagagaacctagggatttaaaaagttttataagtgacatatgaaccaattggaatagatggactttatatagcccttgctttgaacaatgctgtttatttttttttaaaaaaagggaaacaatcaggaaaacccaaacactgaccagatatttgatgatatgaaggaatttctgtcaatttttccagatgtgataatggtattgtggttttgtttaattcttaccttttagagggacatactttagtatgtcacctgggaaatttttttttaaaactaatttctggggctcacagatataactgacctggtattgggccccgatatcattttattaaaactgccacagatgattctaatgagcagccaggctttgtaaactattgatctagggtaagttaaatcaacaaaataaataaaacctcacctaggtattaatcaaactgcatgcctccaaaagtactcttcctgaagactggaatctacatatattattaacattaaaggataaaactgacatctctgaattctactgtgcttatttttaaggtacttgtaacgattaaataaatgtttacttagctctcaaatttacatagctacctaaactaagcaaacttttcttgactacctatacatattgaacaaaccgagaacaacaatggcaaaacccttaagtgttcacatgcgggacaattacgactagtaacaattatgatctataaacatacttatcaagagattaatgagaacacatcttcaataaaacaaatggactgcagtgctacaaatctgaactacagaagaggttacctagggtgcatgagacaacttctttccaatttagtcttatttctcttatctcgccttttcaaaacttgtacacaaccagtgcaggaaaaacaggcaagatttctatcccccttactgatcattttcccagcggaaaaccctgaataaacccaccttagataggaagataagcagaaaagggctaattaaatctatctatctaaatatatgtaaataaaaatctatatagacgcaaataaatatatatataaaagatatatatacatataaaagctcaggaaaaaaagttatcacattgagcttttgtgtttagttacccatccagaaaggctttgtggcagagtgatatattccaaaatgctttgagatcagggaaaagatagctacttgcctccagaagtttgggattatgtttcaactgttatcttatatgaacaccactaaatttgaacaggtctagttctttagggttgaggtacaaagtgcctgaagaaaattatcatagtaagagaatatacagctttttagaggaggccatttaaggaaaaaatgatgacctcagctaaatgggaacttggcttttctttatctgtatgtaagaaggaataaacttgaggtctgagagagaaagttggaagagtaggaaaaaagtacacgggggaacaaagaggacaaattattagacagcgagaatactgagtaagtaggttccatcagtaggagagaattaccagttaagtaagcaactcaaagttgcgattagacaggatagatgttttataaatatttgctaactagcatatgagtattaaaactaggtaaacactgtattccaattaaatctagtttgacttgtaattctagtttaaaccttttctggggctttttcagccttttcatatctacaggtattctctaacatattttccagatttttatgcctttacatttgcttagaaagataattatacaaaatgcttagattttagttaaatctagattctatttgggaaaaaactcatatttaacaagattaggtttttctataaaaagcatgagttattccaaaataaattatttcttcttcataacttagctttacaaccaaaccataccatttgaggaaagtgcatctgatatagtttgcctgttcagtgtctcaacttttctttacaatatcttaagatttttgccctttttttttgatttcctaaaagtgcacacaattcataactcaagccattttgtggataagattagtatccagtcttcttaaggagagagtggtctctaataatggtattattctaacacttctagaaggaaaaatgtatcacagtgtataatgaaatcaccaagaaacaacactatacagaatattttcctcgatacagaagtcattcactgttgtatacttataagaagtggcaataagacactctatcatttaatattacaatgtttatacacaactttttgttctcaaaagtactttgacatgccatttagttttttacagtgctttttccgaaaaggtccaagtgacaaaagaaaagaaagaactatttcaaacacaaatattaaacatttaatgggatatggcggaataagcactggaagtcaagagacttgtttctaatcccagctctgcctgtaactagctgtgtgacttcatatgcgtcactaaatcgtttcttaaattgtaaagaaagtagttcttaatgtttaaatctgaatttctaaaaatctactacaattaaggtactttcaaatattacattataattaacagcccaattaaatataagccattttgccatacgtgtttagtccttcgcttttgtctcaatttgacctgaagcctggatcaattagtctgcacactcaagacgtactctggggcaagagggactagggaaagattcttttaagatgggatgatgctgagcaggttaggcagttaggaatgaatgcatattcaaataaggcgcaatgaagaagaaatctgcttccatggggaaatacgttgcaataagatttgagggaggccttgagctgagattgtcaggtaaccacaccttccacccttcaaactctattctcccagtggaatccaaaccagtctccagttccgggttcccaaccaatcgcatcaagccacaacagagggatctgccaacccgggcaccgcttcagggatctagacccagtgagagtcacacaaccccagcacctgtcgacctcacactcttcccaaatggagagggtgggaaggaacgctaggtctatgcttggtcttttccgattcaagctaccaccaggtccactagccctcgaaaccgaaacccccggacttcggggagaaggggaagctcctacgccgtgactacgtatcagtccctcagggctaattctcccattctcccccgacactggtttctcaggcctcggggactccgcgcctggaagccgacaggcgagagtgagggcagcgggggagggtgcactccaaaacactgcaggaaaagacggaaaagcaggggcaggagtagcagtgttccccctgggcgagggccggaggccgttcgtgcgtttgtcgatgggtctgtcattccctcactcaccaggagcagaagggagcatctgaggtcgggtaaggataggaagacggcaggatgcatggtaacgctggggtccgtgacagggacaggcgctggcggctgggactgggctaggttgggttgggttaggaaagggctgggctccgggagccgacggcagcggaggattctccaggcagcggcacctcgtcctctcgacccgggctccagcggcgaacacccgggacaacttccagagaggcctctcacaccctcacttccgggtcctgcccacctcggtgcacttcgggaaatgtagtcctgcactagcctcaccccgcacgtcgtccgtcatctagaacttcctttcccattgggctctcggccccggtccactgagtcctctgcgcgcggggtcctgtgggatagaagggcggagggcgggtgtacgcggtgcttcagaggatgggaactacaattcccagaaggatgtgcggccgaaagcctcgggcggccttttgaggggctcggctagcttcagcgccgtggggtctgacctggctggatatagtgtaccggcccggcaggaggggcggcccggtccgggttgcgcctcctggagccgcccccgggacgtcagtcctggaggaggcgagggtgagtaggagggggcctggctggggaggctcagatcattcggtccgcaccgccttggcccctgctgcagactcacggccttcctggcctaggctgtggcctgagcctccatcattggcctcctcgcccgctgcctcttctttctgctctaattcctgcattataaagtcagagccaccactcggggcctcagttgaatgagtcaatgacttatccctgattgtctctgagggctcctgtaaggagtagatgtggtacgggatgggatagcacgtcgtaaactggaaaactgtgtgagtgattgctgctaaggcgtggatcgctcctccagtataattacgaaattccctagcaaagcagtcgaggatcctaacttggccccaggtagctctgcggcttcttctgcaaacactcagtgaggtccaggagcccacgcgatctctgcttagtacccaggaggcacactgtgcttttgtggttctccctgctcccgcctttgcttcagctttcctgctgcctggaatggccttacccgttctctctctggaatgctatcttaaatgtcaccatctctgagaacttcccgaacaaccaaccctttagtcctaatcagaattactcttcctatgagtgtgactgcagtacctctagttttgtacggttataattattagagcatttattacacgggcttgttgtataattaggcaaggatgatgacacctttgcattttatagcactttatcaaagtggttttgacttttttctataaaaaatgatttattttcttaaaggggcaaaaaatacattttttcttaagaaaaaaaaagagccctgcataatggctttctcagggtgacaaaattagacagtgatagagccaatactcttaccaaggcggcctaact

SEQ ID NO: 12360 - DNA, 6000 bp, Homo sapiens
aaccccgtctctactaaaaatacaaaaattagctgggtgtggtggcaggcgtctgtaatcccagctactagggaccctgaggcagggagaattgcttcatctgggaggccgaggttgcagtgaactgagatcaccccattgcaccattccagcctcggtgacaagagcaagactcatctcaataaaaaaagaaagaaaaaaaaaaaaaagaaagttgactttcccaaaatttcaaaaagtaatttggcatagacccatggaccatcatattagcaaaataatttcattatagcattattttaagagtaaaaaagtatgggtcagacaaagtggctcacgcctgtaatcacagcactttgggaggctgagatgggtggatcgcttgaacttagagttcaagaccagcctgggcaatatggcaaaacgctgtctctacaaaaaatacaaaaagttagtgaagtggggtgatgcacgcacatgcacgcgcacctatagtcccagctattagggggctaaggcaggaggattacatgaacccgggaggtagaggctgcagtgagctgagatgcactgcactctagcctaggtgacaaagtgagaccgtgttaaaaaaaaaaaaaaaaaaaaaacagccaggtgctgtggctcacacctataatcccagcattttgggaggccaaggtgggtggataacgagttcaggagatcaagaccatcctggctaacacggtgaaaccccatttctactaaaaataaaaaaatttagccaggcgtggtggcacgcacctgtagtcccagctactcgggagggtgagacaggagaatcgcttgaacctgggaggcacaggttgcagtgagctgagatcgcgccactgcactccagcttgggcaacagagcgagactcggtctcaaaaaaaaaaattaataaaaataacaatcagagtaagaaagtggaattactaaaatgttaagctatggaaatggttaaataaactgaggcagtaaataaaactttggactattaaaagccataaaataacagtaatatacagcaacagggaaagcatgttaaattaaaagacaattatattaacattaatcacggaattatacacaagcacagacaggattagaatattatactactacattatagaagtataacagcattagagtacagaaaaatataagtgttagataggggagagtaatttaaattttttcttttgaatttcttttaatcatgttacattttttccaataaaaagttttcaaaggctgggtgtggtggctcacacctgtaatcccagcactttcagaggcgtaggcaggtggatcacctgacatcaggccacctggccaacatagtgaaaccccttctctactaaaaattcaaaaattagccaggcgtggtggcaggcacctgtaatcccagctatttgggaagctgaggcaggagaatcgcttgcatctgggaggcagaggcaggagaatcgcttcaatctgggaggcagaggctgcagtgagccgagatcacaccactgcactccagcttgggtgacgaagcgagactacatctcaaaaaaaaaaaaaaaaaggtttcaaataccatgttaagctctattacatccacatacttaacaaatgtagaaaatgttttaaagctttaaacttcttcctgcaaaatattaagtttcaaatttcaaataataaaactgcctaattttggaatatcctacaatctgatgctaaagacctattgttttacaccagctgtactatgcaaaatcctttccccaaattttagctgataaaaaggaatttcccattccaacaaggcatccctttgctacgtctgtcaaactgacaatctatggcaccagtataaagaaaattaacattttaattcagttattatgaaagcttatctgcccttgctattcagcaaacatattacactggaaattcaaattatgacagaaattccgttttgcaaatcaaaaaaacaaatgaaacaacctgccactgactcagcaactttcttttttactttacaacctgtacttaaggtgcaagcatatgactgaaacctagctttcaatttttcttttttttttttttaatcaggcagcctccagaaccagagtaggctctaagagattcccctagctttcaaactgagcagcaaagccaatgcaaaaccagtatttgttttggcaggaagctccagtgaaaatatgagatgttttggtcttaactggcagatacacaaagagcaaagaaaggtgccttattgagttattatttataatgtaaaatcccttgtgtatagctacaaatccacttttattgcagatacttaatatgtttctttatagaaagtagctcaaccaaataatctcccaaatttggcaccaggaattgttacagcctacacaccactacagttccttgtaatttaaaacatttgcgttttaagaatagtctccacactccaactatgctgccaatttcttcagctaaaagcttaagtttatactacaaaatactgtatttactctcgacaatagaatgcactcatttacaaagcatacaggactaaattactccaatatgcaacttcaaaatttctccaatatacaacgacaacatttctaacatcatagcttttctattacccaaatcagtaagtctaaatagtagtactgtacactgcacgaggtactattggccaaagtcaagtcgcatatgatcagttcactacaacaggttatacaaaagatcagacccctaatctcaataaactattttgcaaaatggtcaacggagataccaatgcggaggaaagtgtggattgagtggcagaaaaccctttgccactactgaaaaaaaaaacaagtcaaagcaagcctatatgacaggcagatcatgttcatgaatacaaatctaacttcattgccgacttcccagtctcacagcaagacggcagtttaccaactctttaacagtaatacaaagaacaggacagaaaatatagtttcttttttgcatgctatagtgatcaagaataaaggatacctttaatgttcaaagatgaaaacttccttttgcaactaatattgctcttatcgcgtgtacacagaaaaatcatacaacgctctgcatttctgatagagtaatacacactatcacatcaaatcaagtatttatccagaacttagcgccttagcactaacgttctcccctctcattatacacagaccggaagggaaaacctattcctacgtaaattagggcctaggaagaacgcctcaacacgggtttgcacacaattaagcaggctcagtgggtcaatttctcaggctacaacgcttgacagtatctcggaggcacaaagagacagctgagggttcactactggaaatgacactttccctcaaatttgcacaagtacccgcggtaactaccctaaattttcccgtgtgacaaacatacataaggggagaaggaggcggtactatttaaaaactgggtaattccttattagtgcagataaaagacggtcttcgagagggaaaaggtctatcaagcagaaaaggggaggaaaaaaaaaaagacgtgacagcattcttaaaacagaaaaagttacagctctttacaggagtcagccttaggacttcattccttggttttgtgtttagtcactccagagttaaaaggatactgccctcctagaaagtcatccccgacaaagaagccctgaggatcggccaccgtaagacagagaaggaaatgtcttcaattcaccagagacacctgcccaggtccccctcctccccgttgtccccgacacttctcagtcccccgactcctctcgagactgcccgccacccctggctctagctctccgctctctcagcctcgaccccctctgggaagccccgatcctgctccctccgcaccccggcccccaccaaagcggccgtcgccccggcggtcccccgggcccagacccctcgcgcttgtacgcaaacgattctcatgggcccggcgggcgacgcggggaggctcttcaggggcagcctttccccgactgcatcccgcaggatccggggactccccgcccccggaaaccgcggagaaactaggccacgaacgccagccgcggccactctccgcctcctcggcgaccccccgcgggccagccactcggaactcagccctccgggctctacctgtcccgcgccctcccagccttgcagcgcaggccccgcgagggcacggcgcaggcttcctccgccaaaggccccgcgccgcagcctcacctgctgcctgctcctctgtcagcgcagccccgacacggcttcttcctggggcaagaaagcaccggattcgcggactgggcgcgctcggcagggcagggcgggggactagctccagcggccgccgccgcctcagtccggtctgcgcctgcgccgcctcgcgggcagggtctccgaggggcgccgcctacagccaggggcgatggccggagcgctggcccgcgcgggtgcctccgcgctgtgagccgtcggacagtgcgggcggcgcgtcgcctaggagctgcccgcggcgcagccgtcccaagacctgaccgccatgtttctgttccctttttctcccccgccttccgcccctttccacaaaacagcactttcttttccccctccctctccctttcctcctgcgggggcgggtggaaaagggcggggggtgggagggagaagacgcagggaggaggggggcggtgcggtgctcaggcccctcccccggggagggccgaggccctgcagccaccgctcccctcccccgcccgacccctgtgcgacccccgcggggcgcggggtctgagccttgcgggcctccgatcccctcctcagcgttcgcgcggccgagcctgcagaaacagagctggggagaaagcgctctggaggccgctgtgcaccccttcctgcagggctcagactggcggtgtgatgtgggtttattgccttggcctgaggcaggtggcggctgcttctctcggagttttcaaagacagggaaagtgatgccgagtggctgaaggtcactgaggacagtgccgggagatacgtgaagattccttcccagggaaggaatctggaattcccacgcatgagtagagggctctagagagacccgcgcgctggcccttcccgaaaccccttggctccagtgcaccatgtgagtccctggccgcgctcggtgtctctccttcggcccagatttggggatgggaattcctaatggagaaatcgctcatttgcatagtcagtaccctcacgcctcctaagtgtagcctcattatcgacacagacgcctgcagagtcgtttctctataatgcaaattttgcaggatatttttgaacaacgtttttgagttatcatagtaaatgaaaaagcaattactagttatttaggaagaaggaaatggtttgaagtagagataacttttttacctctggggggaaaaaaaggcgaatgacttcagattccatggcaggtcaaaatcagaactggtaagatttctgcatatctggtgagtatccacataaataatcattttcctgaaaattacactctccttatttaatctgtatttttgcataaaaatgtgagattatacctgggtcataaatgcactgctgtccatttatttctgaagtttattgcatagccatggataatttgagttttatattcaatagcagaaactatttttctaaccacgtaagcagtcagaattgatttcagaagaaatgcgcagcaataaaagttaaggcttatttaataacagtttggggccaatttggtccccctggaaactatctttgacattgacaatccgaagagcaaaagtttaagaaaggatctaatacttcaaaatttagcttgtgggccggacgcggtggttcacgtctgtaatcccagcactttggg

SEQ ID NO: 12361 - DNA, 6000 bp, Homo sapiens
aattcattaattctccagtctagcaccattgtgatggcattattatttaggttacattaagtcagactgctgtaacatataagcatttgctctttgaccttcctaagacttatgacgcaaagaaaatgctgaacttttacatctgaggctataatttcatataatgaacaatcaggaagcacaagtcacatattcttttagctatctttcttaagggcttaattgtggagagttgaaatccatttttatttttttaaaaaagggagagaatttggacactttgtggaaacagatgtaagccaagcatgacattttaataagtgtcaccagctaccaattagaagcaaatgagattacccatatagaaaatgtatcccaaacaaacctatcctttggtagaaatgtcactgtgccatgaaattacagaagcttaaacaagtgatgcttgttcaaatgaaatttactgacaaattccttctaagcaatcttcttccacattatcagatttcttcagttgatgtgttacataggaattctcaatcttgtagttcacagagagaataactcttctctttgctctttcttggcaaatcactgataatataaaaaagaatgttttaaaacactggttttgcttgaggcagtaagctgcctctttgccatcacaagtaagcagctttcctaaaagatattttcaaagaaactgaacagtagaaagatgaaataacaacaaaaaaaggtaaataactccataaaaccaaaagagattcagactaaatttggtttaaatcacatgtaactattatcactttaagaaaataggaaaaagtaaagcattttttgaatactctgggaaaactggataattatatctatatttagcacttcatatatctgggcatgtaatacaaatcctgtatatttcgtgaccactaagttgagtacactacataaaacgtaaagtttattttcgagattcctagaaacttttgggaattaaaaaggtaccatgattaaaggctttctgcatagatattttaagtgtaaacctaagtctgatgctcctaggatcacaagttagagcacaagagcacacacacacttgactcttatactgcctgcaaatacacaatgaaactaaagaagggttgttttaaaataaaaggtaaactaaggaaggatagttttaaaatgaagtcatctttgaaatattcacctttcttgaaatgacacttttcatatgtgattgtgttaatgaattcttaattatgcatagaatccttttaaaaatagaattgtccaatggtttgataaatcaagtttggtctgaaggaaatctaatatgcaaatacttacagtgtactcttttacaaacagtcacccttgtcagtttgaaaaattgaaaatcaacgaaagaacagtttaagtatacttgacctcactgcctaatgtctctcaagattgccatggctggtcgatttcaaatctgtgaaactgacacttaaaaatgtatagtgcgtcttcagtccaggtccctcaagtgctaactaaactgtggtcacagcctcagattttctttccatacaaacttgtacagcgcttacaaagctactttaatcacatcatcaatctatgcctatacttcccttaaagtaattctgcttcatttatcttttaaccctacattatgcaaataacatccttatcagtccaataaagaaaagttattaatgttccttcttgtttatctttgtcatacactgagaactggaatcacatatgaatttgcaccaataccttttctcttttctatttttcacactctatatggaaaatcatagtgccagagaagccctaaataaaattcttgaaatagtcttcaatcattgtctataactagtatcagaatatgagttaatgtattaaaaaggaaaaaacaaaaacttgggggaatgcctacttgaatttttttttttttttaatgtctctctaggaagggtttgcatatgccataccaggatacctcctggatataagaacagttatacaggcccctagtggcttagcaaatagcagcagatgaggggattccaattcttagttccagactttgagatattctggatttaaataagtgtcaatcttaaaaggcaaatcaaatcactgtatttaatactttaagcagttttacatctatggttatctactctaacgcacatatattaaaataaattgctgcatttcattacttgagtaactgcacaactgctctggcccaagaagaatctgtgttacataacctacacaataaaatgtttaattcatccacctttttacatgtcatgcaaaaataatacattactcaactatattaaaatatatttgagagagacagtgttcctatttgaatcttattcctattatatattactgagggctataagaacagatgatttctatgcaaagtactatttaaaataagatacagataaaaattgaatgccacttttacaggagtaaaaatctaaacgtatttcccagtaacagccagtgatacaactcacattggagtccatctatttttaaagatctacaattaataacacccattaatcccccatccccttgctgtccttccttcacaaaagaaaattccaggcaggcacatttacagcttttagcaatttttaactggacacaatctgacagctgaattcatgaaactgaccagcttgtcaatttcacactttgaaagtacaataatagctgatagcatgagggtgaatttaagaaatctgccacagaattgctagctccattgaaaagcaaagtacagtacataattatggaatgtgggaggtagggaaaattttattgtccatttaggatgtctgtttccataagtcagacacggaacattgaaaatgtgttctctttttgctatagtgtctgtagcataaagcagaatatatgttcaaagtaagtaagatactaagccttttactgggtattattatattacatatacaacttaatcttaagttattatctctacagatccctttacatcagaatgtttcaagttttggtatatcatccttgttttactcaagttgagtggttggtgtgtgcactttgaaacagagaaaaaaatactgaaaatggtcagaagtatctatggttgaactaagtccccagagatgcgctacaggatggttagaaaagaatacaccaaaggataaagtccacatttgtagctcagtaaatttaacagcaaacctatttcaagtcataagcagttactagcctctgagaggttcaaactgtgtgagctacactctgttaagtcactggcactgtgtctttgcacatgtaaatatatatatataactttaagaggaaatacaaggagaacgagccctcaggaatcttcctagatacttaaggtgcaaactgtagatgaggctgggggattactctgagaattttagaaaacggaggagacatttggcaagtagcgtactgggaggcgaactggaaacaataaaagtggattgtgatagtcctggttttggagaatggaactactatctggaatcctggaacaccaaattaatgaaagccaagctcacacttggtgttcaagatttttttaagcataagacttaaaaactgacttcacttgctagtgcttttaaatgaaaatcaacgtccagagaagcaatgcaagttttctacacacccacataaaagctacaataaatctatgggaaagcaaataatctttggtttgttcgtggctttctttttaaattgtttcttacaactttgactcttcattataaaagatgcgttcccttccctacggaatgaatgtgtgtgttaagtacaccagattcccgcagctgaactacgagctttgattctgccacgggaaggtctcccaaacaatccccctcctctatggcagctgcgtagactttgattcctgctatttctccttctccccactagttcagaggaaagaaagaaaaagaaatcgccccctcaccgtagtcagccctccttaaaacagtaatccctgcctttaaaaaaggcggtggcaggatccctgggtaagggtggattgccccaccgctccaccatttgcccccaatactacgcccaccctaggaggagagagcgggggtcgcacaaatacacatacccggacacccccattctctagagtcgcctctctcccgggtctgaggtttcaggcgagaagtgaacccagcaggagaggacctctgcccgaggaggtccagaggagcaaactgtgcgctccggtgcccgggcgccgggctcgcggaaacgcgagcgtgtcgctctggctcgggaggcgccggcagccggagccgggcgcagggcgattccggagcagcaagaggggaagacaccgcggggcggacggggtcagttccagggactcacctggtcatgttggccccgggcagccgccgccaccgcctcccgcgccgccgccaacactttcctccagcgccttcgcgccccgccacggccgcgccgccgcctccgggcggccaatttaatcccgcggagcagcggccgccgccgccgaagcccccctggtcgccgccgccgcccagccctcgtgcggccagcccagtccagagcgaggaagtggaagagagtcagcgagtgagtccaaaaacccgaaatccagcatccaaggcagcgcgtccccccgccctccctccacccctacccccttttcctcctcctccgcctcctcctcctcttcccgggccgtcctcttggcccttctgagcccgcggcttccgcggcggtttctcctcctcccgctcctcctgctcgccctgcgcccgcttctctcgctgccgccgccgccgctgtttgtctcctccccctcctcctcctcctcctcttcctcctcctcccgctcctcgatgctccgccgctcgcggctggggggtccggggccgcgtctcctctcctccctccgcctctcctctttcctccttcctgctgcctcttcttttaaagcggattctttggccacaaatagcaactcggctgcccccctcggtgcctccctccccttctcttcttccccccaaaagtgaagcgcacgcgaggtaaccagaaactgaggctcgtggggggagaggggtgcgaggcgacgcctgggaaagggcccgagcagagtcgagggccgggaggtggggtggccggtgcagcccagtctttggacctggcttgaacctggtagttacggctgcagaagaggtggtttggggaggggggaaaattaaacgaaaaagcccaggaaagtcattggaaaggcttctctctttgtttccttgtgtgggtgatttctaaaatcctcgtaacgtgctggggatcccacggaattgctgtgctccagcgctgggggattgtgtgtgcgcgttgcctgcgcgtgagtgtgagtgtgggtgcgcccggacgcggggagagctgggcccgctgcgcccgctggcgaatccctgaatctggaccactgacccactgaaagggccagagagccggataaaggaggggcaggcaggagaggtgggtgaaggaggcaacacacacacacacacacacacacacacacacatacacacacacagacacacagacacacacacaccagaggagggggcggggtgacgtcactccccagcatccatccaccaggccagaaaagaccctctccaacagattcactcatctcctaagagatgcacacccgggcgcttcctgctctgcgtcccagcgcaaaggaggaaaaaatgctggtcgcgccctattgacagcagtgataatactatagggagcgtgctttgatgagacacagtttgtgtccgccccagttcaccttggcagcctccttcggggatgcttgtaggatccgctttgaaggcaacgaggaagactgggaagtactgaacc

SEQ ID NO: 12362 - DNA, 6000 bp, Homo sapiens
taaaatgcagttatttgggtgatgccctgttactaacttaactgacaactgctagttgaaatcaacttgtcactgtaaacactttgctttctttatttctttttttttttttttgagatggagtctcactctgtcgcccaggttggcgcacagtggcgtgacctcagctcactgcaacctccgcctctccggagctcaagcaattctcgtgcctccgtctcctgagtagctgggactacaggtgcccgccaccatgcctgactaatttttgtattttcagcagacacggggtttcaccatgttggccaggctggtctcgaactcctgacctcaggtgatctgcctgagctgggattacaggcgggagccaccacacctggccgaacactttgcttttctagtgattattatatcatctttctctcttgtagcacttctggtgggaaaggtgcaaaaaggaattaacagtagagatgagtctctgattcctaagtccttctctaccaagacttccaagttggacaaaagaggtagagaaagacttaggaatcaaagactcttatgagtatggtatctactttcaaaacagtcatttcattttattcacatttagtatggaaactttatttttctcaattcaaaattgagattataatccaaaggaaagctgaattgaaaattttaacagattaataccagtgccccaagtggtgtttaccatgccttcacaacaacctcatgttctaggggccattagaaaatgaagtggctactgacatggaatggagctagggaaatgtaactttttacttcatacactcctaagccatttgaacttttttacatcaatcatgccatttagaataaaaaattccacttcctaccaatctaagtacaaacttgtcaccttgaccttcaaggtatttgacaaatatggtcctggattccttttcaattttaatccattactttcttctgtgaactgttgccttatactcttagcaaactatcccacagaactctcttatccaatttaactgacatcacaccattaggctattctccaatgtgatgggaacaacacttctggttccccctctgtgaagtgtgcttatcaatggtgacagtgtgtttattcacaaacctatttatgccagttgtgcttattactgaaagtacgtaaatactatgtaaagcaatgaagtataaatgagaagagaaaaatgacagcagcaattaacactgagtacttactacctgccaggcactgttctaaatgctttacatgaattaactcctataatattcacaagaaacctagaaatggatactaccattatgcctgttttacaaaggcaaaaactgagtaacttgtctatggcctatacaactaataagtggcaaagcaatttggctccagagctcaagtacttaactactgtactacatagactctctagtagttatttctaaaacaccacactgaatgctttcgaaagaccagataaaagtgagcacacaaggccgggtgcgttggcccacgcctctaatcctagcactttgggaggccaaggcgggtggatcacctgaggtcgggagttccagaccagcctgaccaacatggagaaaccccgtctctactaaaaatacaaaattagccgggcatggtggcacatgcctgtaatcccagctactcgggagggtgaggctggagaatcgcttgaacccgggaggtggaggttgtggtgagccgagattgtgccattgcattcaagcctgggcaacaagagcgaaactctgtctcaaaaaaaaaaaaaaaagtgagcatacagataacacataaacttgctgttaggtgtgggagacaacagaaaagtctggaaggacatttcataaacacctagaaagattctgcagtgagactgctttgcaagtgactttaagtattcattccatgttaaaaataccatagataacgtaggccaggggctagcaagctctttctataaagggccaaaagtaaacattttagatgttgcaggccatgtggtttctgttgcaatcacaaatattcaattctgccttggagggtaagaggagtcatagacaatacataaacaaatgagaaaggctgtgttctaataaagctttacttataaaaacaggcaacagggtcctacactccaagaaaaggctgaggccttatgttaaaagaatggcaaaagaatgtttatgtgttcgttaaaatgttatgcatataactattatctgtatgattccctgctttaacttacttcttcagttaaccaactaatggccctaagtctgctttcagtgactgagtgaacggaatgttatagatcccctagaacctgcatttaattcatattcctatcattatgcctgatataacttggttataactttaaactactaattttaaaatgcatgcatcattacagattagtatgggtatactcgtatataaagactgtcatctctgttgcaaaattgctgataatttgaaaataattattaaaattgctgcttccctgagggagtaaggggagtggagggtggagaaaaaaaattgctgcttcctggccaatcttctgggggttgacaatatattttatgagtattctaaaagttgtatacttaagcaaaacaaataaacaaaaatgcttactttaaacttgagatcaaggttgtgccttacttacctttgtatccccagcagttactcagtagaagtccaggtctaatccactcattttacagtgcttagggagcctggcccaaactcagagtgagttataagggctgggacaggaattcagatttcctgattcctagtccagtattaccaatctgaagatacacgaatttaggaagacagtggctttctttttttttttttttaggtgcacccagtcctgcagttcaaagcctggcaagactcaccatcatcttcctcctcctcatactgctaatgagaatcagcagctgtgtttctacagtgataatctgcgtatgcatgttcgtgatgttccaatcaccaaaaaggctattgattttaggattcctgagtacctacaaaagctacttaaacatccaggataaaatcagctccacccaagaatacaagataagagttcaaatattcccttggccattttttttttttaaagaaaaggctggaaggacatgtcataaacacctagaaagattctgcagtgagactgctttgcaagtgactttaagtattcattccatgttaaaaataccatagataatgtaagccaggggctagcaagctctttctgttaaacatttagatgtttcagtgctgcaatcacagtgaccggtgttggggagagggattagaaagtgccatggtacttaatccagttactcccccaacacctccaagaggtagccaagttcacacactaaacagagctactgcaacagttctagtgctagtccttagattctagttccagttccggttctagtgcttagattccagttgcatcattccaactgtgagccttcgctgctttaacatctttgccaggaggtgcaaagttctctgggagggagctaccaatcatttcatttcaatttcatactgacagattgaaacattcacgtaagggacacctgtagtaccaacctgactgtgaggggaagcccaagaactccagtgagtctgtggacgctacgctgggacactatctccttagccacaccttgtctaagccaggactaccccaggattgtttcgagaatgataccaggttaaccaaagaaatacttatgtaagatacagatagggtggaaactggaggcagaggagtccgccacaattgatgttgatttagggctgtcgcaggaagacccagggaaacccacgccaaagttggggtggggatgtgtctgcctccaaagtatcctcctttccatcacccaccgccagaatatcttagctcttctgcacctcatccgcgtagaatacaggtggactctagaaaggggactttcctcgaggtgtatgctacagtctttcaatagtcactctgtaagggcacacagtgcttaagggctgataaggttcttgttcacccactagctcactatgtcctgaatcaaaggacgaggaatccagtctcagtctgccctttactctttgtgacctcggactagtcacccgggtgcttagttccttcgtctccctatctgtaaattctgagattacgaggaggccgggattgaaatccatggcctctgagctctaaaatcttctggaccagcaggcacatggaagaactggacaaatggccggttgcatacacggggaaactgaggcaccgagcaccccggcccaaggtcactctggctatgccactgcaggggccgggccgaagccccagtctttaaccctccagtcccgagctctttctccttccgcggagctgaggaaagcggcgaggaaggtccttgtcccgctgggaaaaggacggtacccatgcacaggggtgcgaaagaggggccgagagaagccttacctttccaggtcaagtccagccactagcacctctctctccgaatcttaacccgtcaccccctcacgactcttcgaacggcccctccacttctacccggctcgacgtgtccaccaccgccaccgaggccgaggatttcccgccccctcccgccccctagcattaccgaccaatccctgcaaggggctgtgaagctccgccccgctgcgggctggagaggcctgacgtcactcggcgctcgtgcccgcgcgagcctctcatttgcctttgccccaccttctccagagcccagtctactttcggtccagagaccgtgctggagttcgccctgccggaaagcagcacgccgccgcggcattttacgacgtcggcggtgacaggccctgggactctgggaatacccagcttcctccccgcaacccggtgaaagccaacgcaatgttcggtgcgggggacgaggacgacaccgatttcctctcgccgagcggcgggtgagtgactgagaagtatgcgctggagggcgtggctgagagataccggcggattgttggaggggggtcgatctcttctcaggccttttcccaacttccggggggagacccttgccacattccggtgctctacacctctcagaatctgggcagaacttgcaactgtgctgaccctgccgatctgaggttcgggacccggcatctctcttggcgggaagatagccctgggtttgccttttgcattctgggtcacaatttctccggtgaaatgggaatgattgctgatgagacttcctgcctcagaatttttataggagtcagctggggctgatgtgagacttcttttctccatggagaaggcgaagacactttagaaccaggccttggtgggtcagctctagcattcttcaaggcccagctcggatgtcacgttttggatgcttttccttctgcaacctcaggcagaatgaattgctttctcttccttattcctgcagctaggtgtgtttgcctctattcttataccccgcacctattagattatgagtcctcaccggacagggactgcttatggtgttcatttctgtctagcatgcagcatggtacctagcacatagtgagtgctcaggaagtggctgttgaatgaataatagctgcgaaattgcactttgtaaagcttaaagcttaaaaccaacgtaacagacttctgtcattctccagtttccccaagcattatattaatatataccagcctggaatagaaatctttaaagagaggaagggttttgtctcttttagtagtcagtttagccttttccattgtgttgtgccagtggacagcttgacttcctccaaacttgtgagctaccaagctctgatcattgcagagcttttctttgaacatatgcttaacaaattttgtgcgtgctgaagaatgtact

SEQ ID NO: 12363 - DNA, 6000 bp, Homo sapiens
ctcccaaagtgctgggattacaggtgtgagccaccgcacccagccgagttctgccttctgtgaccttagcctgtgagcttggctctgcatgcagtcaaatggcgtcataaccattcccacttccttgggtacagggcagggcttggcacaggctcagctccctggcatcataaggcttggctattgaagttattgtgaataggccacaccaagcagctattggtgtgcctgttggtttgcagggatcggcttcggggaccggactagcaccttctgtggcaccccggagttcctggctcccgaggtgctgacccaggaggcatacacacgggctgtggactggtgggggctgggtgtgctgctctacgagatgctggtgggtgaggtgagtgctggagcctgtttcctgggcctctgggtgggggtggggtggcccgtgcatcctgctgagcccccatctccacagtgcccgttcccaggggacacagaggaagaggtgtttgactgcatcgtcaacatggacgccccctaccccggctttctgtcggtgcaagggcttgagttcattcagaaggtaagcactgcggggtctggggctgggctggatggccgctcaaggcccatgtgccctctgccgtgggacagcagaccccctgccacccatccttagagcgctctgggccagcgtgcttggggcctgtggatgatggcagtgcctggggctgaatgccctaagtgagcgcctgtcctattgcccagctcctccagaagtgcccggagaagcgcctcggggcaggtgagcaggatgccgaggagatcaaggtccagccattcttcagggtgagcggctggggtggcggtggtcccctgtgcctggcagggtaggtggcatggagtgactcctggagctgctgttcctgccgtctcaggcgcctctcctttgccctcagaccaccaactggcaagccctgctcgcccgcaccatccagccccccttcgtgcctaccctgtgtggccctgcggacctgcgctactttgagggcgagttcacagggctgccgcctgccctgaccccacctgcaccccacagcctcctcactgcccgccaacaggccgccttccgggacttcgactttgtgtcagagcgattcctggaaccctgagggcatctcctggcacctctgtccccttcccccacagactgttagagcctctgctcgttcacccgtgcgccctgcctggaggtccaggccttgctgggtacttctgagcccttgggattcaaagtggcagccatggggccactgttgtgggctttgctcagtgtcactgggcaaagtgtgtcccttccccctccagctcgccctcttctacctcccagcgagacctggcccagaaagggtgccgcagcaaggagtgatatggtttgtctttttaagactggacttgctttatattaaatttgtaaaagtgtgcactggcagcagcctgggcggggctggggtggagcccggggtctgcttgggcctgagccacccacaggtccttttcttccccttcttccttggaaggcagaactgcccaccaaggcagggatctgtctgacttgaagctccgttctggggtctgggaggcgtgggcaggagtgagggccccaggccctctgagcgctcaccccagctggggacaggccccgtggttttcaggcacaagacggtagcccggcctccagcaaccctaaacagctgggctgctgccctcttcctcctcctcagcccagagggtctcccaggaccctgagggccatccacagaagaagtgggccaggttgcgggtcaggcctcggtcgaaggggttgctggggcgctggcggagataggcgatgcggtgtgaggagatgaattcccaggtggtggtgttgctggccaccaggtagaggtgcgagacgaggagcaggctggccaccaacgagaagagggacagcagcaggaaggtggcgaacaggagcccgctggaccgcaaccactgaccccagggctggaagaaccggaggcctgacctgcggtgcaggggacaggggcctggtgctgggggagggcaggggagcccttccctccccatgccgggtccctgggagtcctggctctgtccacccctgtgggagcattcatcccaccctccctctacacccgggcagcagcacccaccatgccaggtacaggccccacagaagcaccaccagctgcagcgccaggtagaccacaaagagtgggtggttgcgctctcccacacagttctccatccaggggcagtggtggtcgtagcggcggacgcaacggcggcactcacggcagtgccgagccctcaggggctgctgtgggcatggaggagagtggaggctcagtgccagccctgctgtgggcccaccactgagggaaggaatcagggcctgattctggaaggccttcttggaggaggggcgaggcccaggcagtggggcaggaggaggtcgaggagtctcagctttggcccaacctctcccacgggtgtccgtgcatcactcaccagcaccaggcagtatctgcagcgccgaagagggatggctggaggaaccatggctgtctgctcctctttgagctcctcctggaatgaggggtggggtgtaagacagggtccccttgggagacagatggcattggcgggcagctcccctaggggccggcttagctctgggtatggagtttgggacccatcccatgcagaatggaggtgtggggtatggcggagcaccctggactgagggcggctgtgtatgtttgcaagtctcttccttctctggggcccagcagtttcctcactactgtagatggggctctaggggtggcaagaggagtcactgaactgctcccacaagagcctgcagcacagagcctggcatggagactggtgctggttgttaggtccctgttggtgagagtaggggcccctggttacctgaggctggggctgcacattcacgtagccagggtccatgagtgacacagcgaggtagagcagcagggagcccagcaccaggagcaggaaggtgaggggcaggagcagctccccctgctcctcccattgccgcagctctggagaggccggagagcacagtgaggctgggccgggtagaacaggagtgggtggggttggggtgcagttggaggtggggaagtgtgttcctggctgagcaaaggcctggagatgttggttccatgagtggctgtgtgtggccagcagttcatctgcacttttatctggagggtcagagggaaccatggaaggttatagagccagatctgttttggaaaacctcattgctaaagaaatggatcaggggaagcctgggggcagagaatctggccaggaggaagaagagagtcgctacaaaggcctggcaggaagtgagggaggaaggaatggacagggggctgctgggtcaagggagccagacctgactggatgtgggagagagggaagaggggtccagcgtctctggctctgcaatggtgagagactggttaggtctgaaatgcctgagagagatacagtgggaagggtgcagctggcaggctcagatgctgcagaggggcatacggaagggtccagcaggcttcagcccagggaggtgacaggattttggggaggtagggtgcagggcaaggagtgagggggcatgagaccaccagacagcagagtgtagacaaatcctgtgtcccttggttgtaagggggagcagagaagaaagggtgggttttgaggggggttttctgatacggagacctgagcaagtttttaggctaaagggtgaaggtggtggaggaggtctgtcttgggaggaaagccagaaggggccccagtccagaaactgaggctggaccgccatggaaggagggctggggtctgctgtgggggacagtgggggaggctgcctgtggcaggtgaggcgctgggtagggggctactaagaggaatgagggaaatggaggtgggtgggtgggtgaatctgtgggaagatgggagacaggccgcaccccatggagtgttctctggcctgagggtttgcctggacttgggcagctagtggccatgggggtgtggggggtgtgggtgtgggcagaatgccaatctttgcatctagttgagcctcctaatcgtatggataggaagatttggggtcagttcctgggaaggatcatgtgggtcccaggatcaggggacatggggctcaagtcggtccttggatctggtgggcaccggctgggtcctgggatggacagggcatttggcaatgatcaggaagatgctgggattaattagggatcaacggggtatcagacagagagcaggtggctcttggaatgatagatggggagagggcttcaggagctggtggagatcgggccaatcccaggatctccagggattaggcgggagacccagtgtgaccagaacgtctggggaagtacgcgggatcgggtgggtccggggtcgctcggggtccggctcaccggtatcgtgcaggaagagcaccagcgtgattccccaggtcagcacggtgtgcccggtccgcaccaggaccccagggctgaggagcgcccagggcgccatcgcctcggcccggggccccacccggaagaagcgcccagaggggcgggccctccgagggaggggaacgccgccgcccggggactggtggatctaggcgttgggcggggccggactgggtcagggaggctgcctattggatggcatctgcggccgaatggaccctcaagccaacaggtgcctgaagaggctgagggtggggccggcgcgcgcgcagctggtaactccctcaactccagccccacccgccaggtaacttttgaaagcgccggagcgcgcgcgcacctcccccgcgctccgctgtgccctcccccgcgttcccctgtgcccgccctcgcagcctcgcgcatgcgcgtagctccctgggcgcttcgaagatccagcggcttgctgtgagtccgggaggcaaaattgtacccatttcaaagatgtgatgactaaagtctcgagagggccaaggctcgcccaaggttgctctgtggtgacagctttacctccttgctatgtattctcagatattgcaaacggacgagagaaaagtggaggtacgtggtgcacattctgactatgggtgatccaacttaggcgggagtcagaaatcccagcactgccccttcctacctgtgtgaccctgggcgagttactgagcccctctgagctgttttctgtctctataagggggattacaatagtgtcttcctcctaaggtgtttgggaggattaaataatggaagcgccttgtctagcacgggactgtcttgcctctcctgctgtgagccaccacctacaggcggactttcctcaccggaggctgcaggctgtcctccttccctgtgtccccagggccttctccactcagccccgcctttccacagcacctcccactgataccagcatcctcctccgcctccctctgattggccccatcccagctcctccaggatactcctctgacatctgttgtttttctcagctcaacatcctttttttggttggggaatcgacttcccatcccatgtgattggagggactgcccctcaccccataggatggcgagcggcaggctgtgggctttcgactctgcagaaccaatcacaggccttccatgagattactgtctagatgctgagaggaaggagcattcttttggatctcaagcctaaggaatgggatataaggcaactgggagccgtctttacgctgggcggagagggcttaccctgtctgtggctggagaaaatgagaccaacttataaagacacatagagatggataagcagcactaaaggagggagcaagagatggtctgaacaacattgtctgagccctctagatccggctgtccctgaagct

SEQ ID NO: 12364 - DNA, 6000 bp, Homo sapiens
ctactgcactgcagcctgggaaacagaggaagactctgtctcaaaaaaaaaaaaaaaaaaaaaaatataaaacaaaaaaatttgaactcaaccaaagtaaaacgttaacagaaagggatctggcctaaacacagcctcatccctaaccaggtctagacaagtgccagggtctgaacaggagaggcagtgcaagtgatccctggagggcaggatgtctccaagtcaatgcttgagaaagacagaaatattcaccatccaccaccccagctgctcctggacactaggtgctggcttatgggtcacttgtgagtggtggaaacacatctttcaatggaaaaaataccacagtctgctctcaggcagttacgatactccatatgcaaaggagacgaaggaccaaagaaggaaaggaagcacctgtcggctttccagtcaggaaaattcaatttgtagacaaagaccttggtcaaaggcagaaatcctcacaccgaagagtgtggagcagtggccccatggccaatcaagagcaggactctcccatcaggcacggcaccttctaggggccaattcccaccctacaccctctgcccggctagaccacccttggagaagctgctcagcgacaggaatgctgcctttgaaaggagaatgtgggtttgcttccttctgctttttggtactgtccatcccctctctattgagcttatagaaattttaaaaggacacattttcttgttaaagaaatcaaagggccgggcatggtggctcatgtctgtaatcccagcactttggggggctgaggtgggcagatcaagaggtcaggagttcgagaccagcctgaccaacatagtgaaacacgtctctattaaaaatacaaacgttagctgtgcgtggtgtcgggcgcctgtaatcccagctactcgggaagctgaggcaggagaatcacttgaacccgggaggcggaggttgcagtgagctgagatcacaccactgcactccagcctgggcgacagagtgagattccgcctcgaaaaaaaaaaaaatcaaaacacccccacggcagtctgagggtggcccaagctcatgggggccaatgccccaatgcccctcttgctgagatccttagccagtgggcagcagcctgcctccagctccccagcccaggagctgttcctcggcaggttaccactcccaaggccactgttagaaagcgctgtctgtccctgtcacagccctgcagggaagtccacctggcgctgaggactctggccacaggtgaagctcccaaggcactcccacacctgctagacacaatcacagatgtaccaacaacagtaactaacaccctaagggccttctaagggttccgagcagccacaccagagtcagcaccaccctggtgttctcaacggtgtcggggatttggctgttcttcctgaaccaaaccttcactgacaggacgttttcctggttctccagctgcctcctgacccatccccagtctccactccccctgccctcctccctgaccccaatcttctcagcctggtggtgcccaggactaggcctggccccttcttccaacgtttccagaggacacaaaccacctatacctagggactcctaaaacctgtctcccctggcagactctgatcctggcaccacctgcccaccaaggtctccatggcgcctcccagacatctcacagtgggcagatccaaaacggagctcctcagtgtccccaagccagagcctgcacagcctttgctggcccctccacccggggactcaccctccttctcccaaggcccactcctgcggagcactcctccccccactcagcttttcccacggccaggcagctctcctggcctcctgccctccactgtgtctccacccagccagagcagtttcacagtaaacatctcagacctccagtccacgccaaaatcttcccgcatacatcaactggaccctccatgctgcctccaggacctgcaggaccacagctggactgagccaacccctgctccctctcccagccctgggaatttcaccttcccgcatatgccaaggtcctccttgcctcaggcagtttcactcaggctcaagtctgcctctccccaccttgcccggtgccagcagcttctcagccctcagatcttgccctcagtgccacggcctcccctgaaccctcaggaccagccactgttcttcaccagcgccctgctcttttccacataggatgtacaccatgtgccatctgcctctgcccatctgtgcctggcttctcaccagcctctcctaccagctgtggcctcttgagaggaaacaggtctgtcttattcaacactgcacagtcagaagtaaaaccggaactggccatggctggtcttcaaaaagaatgaagcaaagactacgcctctctttccccaagtattatccgaccagtccaaaacgagagagaggtaaacacgtggtaataaatggtaaaggaaaataattcttctcaatcttcagtggtttgaaatgcctctggattgaaccccagttataaccccacaccatttgctcaaagtacctgtgacgaaatctcaggtaagttctcagggtcggtgtccgccttctgaggagctggtaagacgggtggatttgctggttttaacccagcaatttctggcctcatcttctgctcttcctctagcctgaaagccagagctgaataacagaagctattttatttcaaatatgccacaaggcctacaagagatttaaactgctttataaaaacacttggcaggcactatccattacaaatcaacattatgatacctgatagtcactgaaatgaattcaacaatgtcccaagggaatgaaatctttttcaaaacacttggcagtttgtgtccttgtccataacacagaaccccacatcttttgccttcctattttccattcagggacgttcagcatgtggcaggtgggcaggagccctttagctttgctccaaagagaagcatcttagaccaagtgagaagagattctccacatcctcaccagaactctgcctggtcttttccaaacacacgctaatgagtgctacgaaatttgtgtggttatttaggctgagtgttcaagcccaccagctgacttactctataagggaggctggacatatcagtacttacaccagagacctagaaagtagtcagacagcatcaaattaacatctgtgttctagccaggtggttacatacagctctacctttctctttatcttgatttcttgccaattcgttgccatatatgcctcctggagctgtttaaggtagaatgcaagattgcttctgcccaatcaaccctcaacacagatatcgttttcaagtacacgtgtttctgatacctttccaatggtcagccaagttgatgtagaagaggagtccacagaaaagcagaaaggcaaggaggaagagaatcatattccgctgcaatctcgacagttgcttccatttctaagggaggtacagagaatgacatttcttactgaatatatcacacggaacgtctcaactgtcacaaactgtgaggacaataaggaattcttctggaagatccagtgttcagctctatttctttttttttttggaaacagggtctcattctgttacacctaggctggagtgtagtgggtggaacgcgggatgagccaccgtgcccggccagctctatttattttgaatggggagaagttccctctcagcagggagtaggaacattgctgggacaatactacagatgtcgttaatacagtggtgcagatgagacgaggataagaaaaaagcagaaacatttctgtcacatttcatcaacagtggagaaagactcctgcgactcccacagatgtagcccaggcaccgcccaggcgatgcacagtccgcatgtggttatcaatgcccttcggcctgagaccaccacgaacagaccaggagccaatcaagaggggctcatttctcactgtaccgaggggagcatacaccacggggaacctccggtttccgctccaagaggggcaggcgcctgggccaggaccttgcagaaaagcgaacgaagcccagaaaacctgctggggctctgagccctcttcccaccaccgccccgcagaatttgggccgctgagaccgctgcaggcgagccgcccacggctgccccaaccaggaacgcacatttgcccctttttgcggggaaggggtggagagggcggcgcctggggagtcgagtccgcccgcccaggtcccgctcggagccgcagtctgggagggcggcgggcacggcagccccgggccccagtcagcccggcgcgaccctcaccctccagcacgagcgccgccgccaactcttgctgttgtcatagttctcgccaaagctcagcgtcaccgagatgaagtcccgatgaggcggcggcggcggcggtgggtacatgactacagtggtggcgacggcccaaggggccccgcccactggcggcgtcaggaagtccgactgagaggaaccgagagctccgcttctcctgccctcgcaggcagccatcgcagcgccgtcaacagcccgcccatcacacggatacgcgactgcgcgtgcgctgcgtctctatgcggccagtgcgcccgcgcctgtctccgctgcgctccagcgtacggggctgcgtcctacggcgactgcgtcagacaactgctgcgactccgccctgccctcaggttcattgcgcatgcgtccggcagcgcctgcccaggtgtgctacgagcgtagctgtagcaacggggcgggccttggttcgcctggggcgtggtcgctgtctggggctcccacgtggttcgcctcatgggcctggagctgggcttctctcgcctcctgtcgtctggctgcaccgactttgcccacgccctcacgggagacgcagacactagggacccggggaggcgcccgggcggggccgccatgttggcagagagtcccagcgtcccgcgcctcggttccggaacccgcggcgcggggatggagctgggctgcccttgggcgccgtcctgggctggtgcccaccctggccgcgtggtcaccggcaagaagcccagggcctcacccaggcgtgggggccgggggaaggaccggaccctcccgaagtcgcggaccaggccgggcggcacccgggctggggtggctgctaccccgagctaagctggctgcgccgcatctcacggtccccggggcccgagcgctgcgcctggaccggcgccgagcgaggcggccaatcggccggctggacccacagtccccgcgccataggcgggtcggggctttcagacccggctcccagccctcgaactcggtaaccttggaggtcagcttgagatgactgcgcttcctgcacgcgttgtcctccccagaaacgcccaaaatggcaaagcggcgtccgtggccgcccgaggccctccctgcctgggttctccccagccgaacctcacgcccggcccctccttcattctctcctggccaggctgctcctgcccttgggcgaatccgctgcgtcccacggtcctgactgtggcatttctgcgtgtctggagagctcccccggcagcgacgtcctgcttagcacgtggctcgtctaactctgttcccctggcctcctgctcttctaggggtcatctttaggtttctgctggtctctgccccctgtgacacttgctggtacccaaatgaagtcgtttatgtcacactctaacaagaggccctgaagaagccctcacaaaaacattagcaacggagcgcctgcggcaaacccttctaacctttggtctttatggtttcaaagcagtttatgggaacttctcttttttaaaagattccccttggggccaggcgcggtggcttctgtaatcccaggactttgggaggccgaggcaggtggatcacttgaggtcaggagttcaagactagcctggc

SEQ ID NO: 12365 - DNA, 6000 bp, Homo sapiens
gacatgatgccgtaagtgtggaaattccacacctgacatcacgtgacaagttgcagtcaaaactttgtttcttgtataaaatcattaaaaatagtctataaaattaccttcaggctatgtgtataaggtgtatgtgaaatataaacgaatttcatgtttagacttgggtcccatccccaagataccttattatgtatgtgtgaatgtcccaaaatctgaaaaaatctaaactctgtggaacccttctggtttcaagtatttcagataaaggacacttaacctgtgttatcacctgccatctcatttggttcctgcagtgcagttagtgtacttaactaagtggtattaacagtgtttagagtttttgttgcaagccaatagacgaacttagcaaagagacactgatttagtttgaaaaatgcagacagtaaaattgagatgatttttacttaaaagccagattcgcctatagctaggttagactctgccccaactcttcagaaaaactatcagtcctcagattttctagcccaaaactctttaggtggcagaaaaaattgtccctggactacttacttccgcttaacaagtatatctcgcccataacctcagcagacagtatttttggactgtttgccttgaaagtagtctatcactctgttgtccaagtattcttttgagattaaattagtagggaccaaactaagcaattttgaatttatcaactaaccatgtagagggcagttgtattagccaccacaaggagctccctaaggcaggtacatttacaacgaacatcattatagacctcatcaagccctttaatacatttaatttcttataggctagtatgtgaaggtggttttccaaatgaaagtcagtatccaaagtgaatgcaatcattactttaagtcacgtaggcaactgccttgtcttaaacacttttccctgcactgaaaagaacaaatttacattctgtgagaaacagaaaatgggctagatatttaaaatgaattagctgtatttctatgctgtgtgccaagtcttcaaggtttgggatcaaaacccgaagccacacggctgggtactatgtgttcccttgatcttatggtcatgttctactctaggagttcttgttaagtcttatcaatttgatacctctcctggagcagaaggggcttgtaacaacttttttcctcttccaaaactgtaatgaaactactcaagtcaagtttacggttattcaattttatgacaggtagagacacttggatcaggtcttcacttcttttgagcatggagactgtcacctttgctagcaatgtttagtgttaaatagcagtctattgtactaaagtcttaatatttggcagctctacttgacctttatacatgctttaagtatctggggactcaggccataaaagcaaacaatcaaaatgacacaggacaggcactataggtaaatgccacataaagtgggcaagagggtgatccagggaacaaagctacactggatttcatgaagctgttactgccaaggagggcttggctggtgaccttcctttacgcagtccctgctcacatgagtgatcagtctttgataaggggtactatcatcgtcataccttcattggtgctatctggatgagccaagtttactttccatgccaaccagtttcctacctccaggtctattactaccaccagtaccaccaacccacttctcacaatgagggaattttctttctattcttaggctagttgctagccatatatgaatagctctcaaaaaaccttggttcttttagactctggccttaaagaatatatcataccacagatcttaatcttgactacttaggctgaaggaaaatgtcccagaacccccaggaattgtgcaatcaggtataccaacttcttgttagccttaagttccttgccagagtctcagtgttcacctgtcttgtccaggagtattgtggaacagcaccatgtgccagtggacagaaggggtatgtgtagaagctccagggtagaaagtcagcccacatgccctgagactttgaacttaagacagatgccggttgggattggtttagggtcaataactgcctcagcccaaatttcctccagttctggaagaatctgcttcctctcctttgaagaatttgtttttccattgttcatggcatgtcaaatatttcacatgtgacaaagtgaaaaggatcctcacctgcccaatacaaggtgaacatctggctttgactaactcatgtcagtagtttaggtgcattcctagcattctataaggtaaagttaacctctagtggaagggacatgcagcaaaaacgaaacttttctctcaccttcctggataattgtccctccttctggtataccttagcgttttgaaatgttacaaaaggcataatgcaagtcatggcactatactgagaaatcgtttaataagttagtattactcatctattaatgattaatgctagcgtttggaaactcttgtaagcagagcttttctaggctctcaggcttgttacacatcagattccatgttcactacacattcgtcctcttcaaagagtccaggcaggggaaggcatttgagagaacagcccgtaagagcctgtggagtctcctactttccattgaaaataacactgcccatgctgcccacttaagagtccgcggaaccatgtgaccaacctaaacgtgatcgcaccgctaaccaatcgcagagggcggaaaggccagtcccagttcacacgctccggacagtggcaaccaaagggcaggggcattcggagacgtaaaaaccccaggcgctgcccgacaggctccttgaccacatgctttaaagttcgctctcacttcaggagcacgtgactgcaggccggcagggcccctgaagccacccggcgacgggagccagggactctggaacgggtgttaagggcctgggcggctttcagtcccaattccctgcagctggcaagcaagcccctcggcgtcacatctgaagatcacttcggggacgcgctaggattccgactgagtcctctcagaaaggcttcctgtcgcctgtccaggaaagttacgaggccccaagtgggaacgtggctgacgaccaggcggggcccccaggcccccgcggcagagtctggggacccgacagtagtcaccgccgcccttcccaacaagacagggccacacgctcgctctcgcgctgctcctttgagctattgtgtagaatgaaggctaattacagtcactagcctaggactcaattcctctcgaggaaacgtcaccgggaaggagggtcagcaaactaacctgattaagtctcccctccactccccctccgcgttcagctacacgggagacccgagcggtttccaaacgccgcccgaggcggggaaaagggagaggagaagcgcccagagcagagtcctgcgtaaagccccgccgctcccctaccccgcacgccggagaggcggccccgcgccgggggagtcgcagtccgggtgccctcggctccgcggagcctcccggccgccgcccaccgaacgtgcgccagctcgcggccgccggaagactctgaagcccggccggcccctggcgctccgcgtccccggaggcgctcaccttctccccccgtccgctcccgcactccccggggttcgagggtgcgcccgaggctgccgcacacgtcttggccctctgcctccttcccaacactgcgcctggcagaggaggcagaaccattgttcaatgctcagaagcccacgcacctcggcgcccgtcaagagggcgagaaacgaggcgaagcagcggctctgggggaggcggagtgaggggcagaagactagttcaggcgaggcgtcggggcaccccgaaccccgctgttccccaagcccggctccctttagcctcggcgctgacagctcagaggcgccaccacggaggggagggagggaaggcgaggagaaccgagaggcgcctcctaggaggcgggtgggcaaacggagacctacgcctcggggtctcccggtgccccggctgggtcccgcccgccggcggaggggcgcgtcctcactcaccggttccggtggcgccgctctcccggggcgcccagcacagcgcgagcagcagccagagcgcccagagcgcggacgtgcccatggtgcccgcctggatggtgccgccgccgccgccgccgccgccgttcgctccgcacgacaagttaccagtccttccgaaaggaggaagaaggtgggggcggggaggggaaagggggagaaggaggggaaggagttggcgggggaagggagcggggaagaagagggcaccccctcccctacaacttgcacagtctcctccccacccacccagccacctccccgggctgcagcagcagtgcaagccgagcctgcgggcagaaaataatgcaggcgctgcagaggaggggaggcaaggggagaggagggaagggagagggggtggggagccgagagcagaagagagcacagaacggagaggagccggtagcggagcacccgcaccggcggcggccggagagcggggtgagcagcggggagggggccggagggggcgtggtcaacgggaggcgcggcgggcgggcgggagcgcggcggcttcggccctcctttccctcgacgcgctcctcttgcacgcgccgggcagccgggtgcccgcgcggggagcgtgcgagtgtgagcgtgcgtgagtgaccgcggtcgtggtcgtggctgccgccgccgccacccggaccgctctaggggcccggctgctccgcgcgttcgcctggggctcacgggggcccggggcgaccgctggttggctcgcgcgccgccctcgcctccaatcccgggtgcctgtcctaatttcctgatccagggaacctgccgccgcagcggctgtgcgctccctacagtcattactgtaccctcccggcagcctccggcagaacacgcagcagcagcagcagttagcgctgatgcaactatcgttgctgttgccaccgcctccccactgacggggcgtgcacctggggggtacttgcagtttccaggggcaacaagcatctctctaccaccctctcctgcgcccctgagagaggctggtaggtagcatcttcttcgggcctcctctatccactcagaaagtgatgaagcggaggggctccaaacgtttgggctgctcaaaagtggggtttgggatgccggtctcaatcgcacgctgagatgccgttttgccgaaaactaaatgtgtctttaagtgagagagtgtgtatgtttgaaagagagtgcgcgcggttgtggctggtcctctgtaatagaacaagactgaaataacccagcctgggatgaggagaagggaaattgctagcgcagctttgcatttgctcatcaacgattatagttaattgctaattgcacaaaatgatagtttgagggcctgtaattaaaagcttaaccttttcttgtttggaagagaggggccccatacgtttattcctcttgatatactttgtaacattcaattacaagaatcgaggaaagaataaaggaagcaaagacaagactcctagaaagggttggttcttcttttgtgcctgacagtacctgagtctataatttgctttttgtgtacttcagttttcttgcacacttagccctggttgaggtgcattgtctgctgtggtctgttgagcatctaaccagagtgggagggcacatcgagcgatttcactttcttaaataaaaggtttttggtattttgaaaaagttgtttttatcttaattcaaacttggaaggtttcaataatatcatattctgactctattctgttggtgatctgaagagcagcgggcactgcctcactgtcttctccttgccctggttctcctggaaatttgtcaaggctagcaatcagaggagatgtttattaggaacttacta

SEQ ID NO: 12366 - DNA, 6000 bp, Homo sapiens
gagatgatggcctggctttactaaaaaactgtgtgatcaaaatcccaactataggaaagacgtaactgagaacgactgggccccatgttctgggaggagccccgctaaccacaacctcctctgctcctcgcccgcactcccctgaagagtgagttttaacctcccgttaagatcatcgcacaaagaaaagtgagtcagctcctctttgccttctctccccactccttcatgatatagggcagggtatgacagagcctgccactgtcaccaggactttgccacaccagtcaccagcatggtgttcatcgggaccctcacagtgcctgtgccacctgcaagttcaggggtcctcaggcctatccttgcttccccagcacttcaactagggccgaggccagctcctagggcccaggactagctctgccactcttgaggacaggttaaaaacaccaaaggtcacactggagaggaaggccccatgcagcttttctgtcaccttggtgatgagccaccaggcagaacccattaagtgctaatattgctgtttatgggtataaactgcttagaagctacattttacagagtgtctaataggcaatgaggagcagctgcaggcatggacattagtttggattgctgagttcattagtttctggacccttcccatggcttccaaatgccaagctcctgcatagagcacgtctcagcagtttctacagagcatggctcctgggagcaagaggacactgtccctggctgccagagcaagcagcttgatgccagaggcagagagacaagagatgcaactgtggggagcctgccagcagaaactaaccagactgctcgtccccgtggaccagcctctgcaggccagaaggaaagatcagtcaaccaagcagtgaggaacccagcctttggggtaacaggatgcggactcagtctccaggccaccacaagccagtgcggccagccaacctccctctgcccatctgaagatggtgacgctctggccaacctcctacagtcaagaagttcacaaaaggaatgtctatcatggacccggcccagtgaaagacttaatgtcattgtcataatactggaagacactgggcctgggaaactaagcttacttaggtcttgctttcagcagcccacactttctggtcaaatcttgtcacttcagttttgctcttgttttctgaagatgtgaaaaaatggatgtgtcactttatctgatcagtgacttccatggtaatcctctatcggcttcaaattaggtcattttcatgtaaaagcctggtctggcagctttaagtactatgtgaataaagagaaacaaagccccacctgggcttggtcagattctgtccacaagaagccatattttgacttcgaaccctgtttacttgcctgcatctgtctgattggggtttgggcgagtacaagtagctgccctcccaagctgcccacaaaagggcatggaagctcccacagccatgctctgccaccacctagacggactcttaaggagatcatctgacggcggcagcctgcgctgccttacagatatggtgccttacagatatggtcctaacccacttgggttttgtatgtgagcagccccttcacccgctagtgctcttcccttgacttgtgccagaagagcaacaccaggggctgggggcgctggggaccaagacccggcttttcttggtcttggtcacaggcaagtctaggagcctgagcaggtttggcctcccctcagtaacctgggagaggtcgactctgtgccccctcaagagcctttccagttccaagctactgcttctttcatttaaaacataacagaatacatgatgaaggctgggcgcggtggctcaggcatgtaatcccagaactttaggaggccaaggcggatcacctaaggtcaggtgtttgagaccagcctggacaacatgacaacatggcaaaacgctgtctctactaaaaacacaaaaattagcggggcgtggtggcgtgggcctgtcatctcagctactgaggaggctgaggcaggagaatagcttgaacccgggaggcggaggttgcagtgagatgagattgcgccactgcactccagcctgggtgacaaagtaagactctgtctccaaaaaaaacataataacaaaacatgaagaaaaggcagggcagggtggctcacgcctgtaatcccagcactttgggaggctaaggcaggcggaccacctgaggtcgggagttcgagaccagcctggccaacatggggaaaccccgtctcaactaaaaatacaaaaaaattagctgggcgtggtggcaggcgcctgtaatcccagctacttcgggctgaggcaggagaattgcttgaatccgggaggcgggggttgcagtgagccgagatcgcaccattacactccagcctgagcgaaattctgtctcaaaaaaaaaaaaaaaaaaaaagaagaagaaaacagtatgtgaagacactgggaacttttttttgtcaataggggagtctgtcatttgctagtgggcagcagcttgactggagacatttgatctagatttggttatgaaattcacttgcaaatccaggttttccaggacaaagagcgagtgtatgtagctctcatccttccctcagctatgaggagccatcttcttagggagctgcgacttggagaaatataaatgggtcactataaattatgtcaatgaaaactgacaaacctaaaaggtctacctggttcttgagagcttttgatatgaattgtttttaaaattgtgtctttaaaggctgggtgccgtggctcacgcctgtaatcccagcactttgggaggccgaggtgggcagaccacctgaggtcgggagttcgagaccagcctgaccaacatggagaaaccctgtttctactaaaaaaaaaaaaaatacaaaattggctgggtgtgacggtgcatgcctgtaatcccagctactcgggaggctgaggcaggagaatcgcttgaacccaggagttggaggttgtggtgtgctgagatcacaccattgcactccagcctgggcaacaaggtcaaaacaccatctcaaagaaaaaataaataaataaaaataaataaacaaataaaattgtgtctttaagcacaaaatcagaatcttagggaaaaaatgcttcgtcaagttgattactttttccctccaaatttaaaatattggctcacagaaagtgttgcaatgagaaccgatggtgaggtcacactagaaagagatcaccccccaggaggaacggaagagctcaatagctgatcagaaaacggtcacttactcttttcttttttttttaaaccacacatatacaagccttccgataagtctaggcctcagagtttgatgactcactaccacctccagaaaaatttaaaaatttaaccatcactacttaaaactctagcaaagccacacgaacacattaagtaaaccgaggaaaaaacggcaagtgggccacacaaggctctccctgcggggataaggctgttaatttgtcgacataacgggattcttttagaagtaaaaggcataaatctgcgtaaccaccaccaccttttgtttttgtttttttgttctgtcaagcttaatcaagaaagagggaagggagttgtgtcccttcactttgtaggatcggatcctgtccacccagttcccgaatgctctcaacagttacccaaccgcctgtttcaaaggcttccctgttgctcagaatgccacctggacacttctggaaggagactatcagggagataggcttcccctcctcccaggctgtgtacaggtccccactcaatccagcccagggcagagtccaaacggggagggagacgcagacagggtcaaagggaccccaagagtccagcacatctgggaaagagaaaaggaaaaggtgctgtggcttcctgtagctggggcgcacgccagcgcgccccctttcctctgggaggacccccggcccccgttcgtccccgagctcccagcccgcctccgggagccccagtgagaggaaaaacgtgcggggaccccccagcagctccaaacgccgaggcgctccccgcgagcctcagacccgacccaacgccaggactcgcgccgccggcccgggaagaaacccccacagcccgcgccccgggctggctggagggtgggggcggctagccaggcagggcgccgaggcccgggctccgggagcggcccagcgggcaggggagactgggcccggaggccgggtttggggctgtccagccgggacagagggcccgggcgggggggtccctctgtgggaacaaggagtcagggggcggcccgggcctggcgccctgcgctgggaggccgactccggagcggcccgggcggcctgggtcgggaccggggccgggggaggagcccgcaggccgcacctggtcggcgaagtcctcggccgtgcccatcaggtcgttctggcccatggcgacggcgggaggctcggctcggctcgctcgctcgctcgctggctctcgcccgtcggcgcccgcacccgctgcggcctccacaggaagtgcccggcggccggcctcgctccgcgtcggctgcggctccagcggctgccacgtaggccaagccttaaaggggccgcgcgccgcccgggcccgccccggtgcgtcttaaaggggccacgcgccatccccagcctcccgacccatccgctcgaagccacgcccgccgcgctcgacgccacgcctctcacgctggaggccccgcccgccgcgcgcaggccctgcggtccctcccggcccggcggaacgcgtcccttttaagggggcggggacctgggggtctggggccagcgcgcgggagggacgcctgagtgcctcgagggcgccgttcgggcggggaggatcccgcgggtcccactgacccacgcggggtggggccaggggtggacgctcgcccgtacgcggtcgctactgatcatgcttgggccagggtccaatcgcaggcgccccacgcagggggagcgaggcccagggtcccccggagagcccatggagaagtaccaggtgccgagtgttccctgcggggaggcgggagctccgtggggtaacggtcgcaaccctggagctacggccggcggttccgaccgagggcggcgaggggcccgcgccctggccagtgtcggcctgcagctcctaggttgaacccggggggcctccaacggtgacctcctgggtgccctttgccactcagtttccccctttgtgaattgactaaggattctccagccctggctgagtatttgagggcgtggggcagctcctctatccttcgtgcctggggtctgtgcgcttgggtccaccgaggcaggacccccgggaacatcccgagtacataattgggagcccccagtcccctaaaaacacccctgcagcgtgggtctgtgaaaatgtttgagacctaaaaaattcacaaaacacaaaaggaaagctgcaaaataaaagtaaatgtttaattaaatgcttctatacatgatatatacactttattaaatgttagattcagcatttgtgaaaaatgcattcgcttggaaacagtttgcgggttagatttttgtcactttggaagaattgtctttgtgtgagaggactatagggcgttgccagaggtgaagcagatgagcttctggtggccagataatttttaaagtaaagttgtttttcagattaaaaaaaaatagacgtttcaggaatatacctgcttttggaaaaaaaaatagacttgattcgagatacggctccattttactgtttaatttgctgcctaagcttgaacgctctcacaccagctctgccctcagcccgctgtggcttagaacagcagtccctggccgggctcggtggctcacgcctgtaatccccaacactttgggaggccaaggcgggcggatcacctgagatcgggag

SEQ ID NO: 12367 - DNA, 6000 bp, Homo sapiens
gttcgtaacaataccaaaatagattatggagaccaaaatctaatactgtttcttttttatgataaacaccttttattatatctcagtgtgcaaaaatacaaattatcttaaaaaaaatacagagcactctcgctatggatccaggcaaagacaggacaaacaaaaattccctaacagatgacagtgaacacttcggtggattgaatctgggaactacaatagccctgctctcattatactatgaagccaaattaatcaactttgataatgatacacacttaaactatgaaaaccaattaaggcacagtatcattcaaaatttatagacagaagagcaataatcccgagaaaatataattaaaatactctgctgaacatggaatgacaccacatttgtaacttaacactggcaaaatttggaatgattatagcataaaagacatggtttttctgaaaagtggacagggaggtgtggtatataggaaagtggctcacattcaagactcaagtttattttttaaaagatctcttctgcattagattctaggtttcttttttggtttcaaaactgggtctacaatccataaaaatgacattaatggagatcttaaaaacaatctgattataccagcagtttggtaacatatcggtagagctgttctgtaaatgcttcaggggaaaatttttccttcactctggctcttccagccaggcccatggtggcttttaaggaaggttcacggatgaacttttctattgcttctgagaagtgcaccgggtcaggctcacacagaaaccctgtgacactgtggtcaatggactccaagggtccacccgaattaacagcaatgactgggcactgcatgtacatggcttccagagggacaatgccaaagtgctcattgcttggtgtgtaaagcacacacgtgcagctgtggaggagggagattttctgtttgtctgagaaagacctcaagaaggtcacatactggccaaggtcggactgttggaccattttcttcaattcctgataatgttccacattctccaggactctctcgtcataaccacctgccacgatcagatgaaccctctcccaatcttgggatgtcaatcttccacgcagctgtactagggcttccagtgccaaagtcagatttttcttcctttcgtatctgttgatggagagcagcaggaattttttccccttggggactaggtcatccagcttttcaggaacaactgagtcaaagctggtgacatttagagatggatagaggacatcagggtctatgtgagacagggacttgaatgtttccttaaaaacagcagctgtgaactggctgttgactaagatgcagtctgccatgcctgtggtgtattcctctatccagtcaattggggccctgtatagtcgtttaagaaaagaatctctcttggtgagaagcagatctgggaagtgacagtaaaataggatcttcttccgccgtctagccagcctgaacactgggatacaggcagacacctagccaaagcaaaaatcaacagcggataaagtggtcaactcaacttcaaccaaaccaaaaacacagacacccaccccgtctggctagtctgtgggctcctcatgggcaatgtctgattctgttttattccccaagactctcacccagtaccatatgcctggtgtacagaaggctacagacgtttgctagatgtgtgctaaacatttaaagcttcaagtccagtgatttcctcttgtatagtgctgtctaatagaaatctagtaatattaaaaatgtttttaagggtgaaattaattttaacatattatttaccgaaaacattatcatttcaaaatgtaaccaatactaaacagtattaatgagatactttatatatacatatatttcacattacatcttcaaaatcggtttgtattttaactttagcacatctcagtttagactagccacatttcaagtgctcaacagccacatgtggctagtggctaccatactgaacagtgccgctctaggatctttctccttctaaggaactgaatgaatgaactatagtagtttagagcacaagctctagattcaagactgccagggtttgaatctcagctctactaactggccacgatcaagtaatttatcccactctgggccttagtttcctcttctgtaacatggtgacaaattatagttcaaaaaacccatatactttttgtgattattaaatgcactgatatatgcaaaacacatggagtttagcacacagtatgtgctcaataaatattaaagctagtcatcattgagcatgaactacatgctggcattactacagactttcttgttgggtaatctttacaagtcattttagtctcagctaacttaaaacctgaagaaggtaactttagggataatgtgcaatttattcaaagccacttaattaaagcagtagatacggaacttgaatccaagatgcctatttccaagccaataatttttcctctacccactatagtctcagctgcctcatgtctactgacacatgcaggatgtttggtaaatgtccacgttacttaaaaagaaagcttccatgcaagcaaggatgatcaaaagtaactcaggagtcataattaaagaaacacaaatacaaatgtgatgccatctgcacctatcagtttggcaaagtttaaaatggttaatatccaaggcggacaaaagcatggagtaagaggctctatcatacattgtgggggagtaaagtgacacagcctccttggtaggcaaacttggcagtagctattgatatttaaaatgaacaactcttagacccaccaactttaggaatttcctcaaacgacatatttgcagaagtacaaaaatattttaaaaaaaagaagtaaaaggatgttcattacaacactgatctattcacaaaaaactagtcacaacattagtgtcctttaaggagaatgtttaattatgacacacttaaacaaaagtggattttctggccactatgaagaatgaagtgaatctctaatattgatacataagaatgtcccggctgggcgcagtggctcatgcctgtaatcccagcactttgggaggccgaggtgggcggatcgcgaggtcaggagttcgagaccagcctggccaacatggtgaaaccccatctctactaaaaatagaaaaaattagccgggcgtggggcgcgcacctgtactcccagctactctggaggcggaggttgcagtgagccgagatcgcgccactgcactccagcctgggagacagagcaagactccgtttcaaaataaataaataaataaataaatttttgctgaaaaagatgcctaatagtaggtatgtcataataccaattatgtaccaataagaagatatagatatacctatgaaaagacacaggctggtgtcaccacaacttctgaaaaaatacaagagaaacttaacggtggctatcttcagggagtagaataggacggggcttttaggttacatccttctatactactaaatttttaatcgagtaaatgttactttttaaagtcatcttttttaggatggggaaaaatgcacgaaggaaagagtcaagaatagctacagggcagatccaggtggacattatttaccaaggtaaaaagcttgaacttttctccaaaaaccaatggggagccatgtacaagttttaataggggcatgatatattcagcttggcgtttttaacacatgacactgctgaggacggtgtggcctggctccgaacacaaggacagtgggatgcaaatggcctgaaaggagagtcaacaaaaataacaggtaagcgggaagacaacacgcgagttactcattagtaaaaggtgactgaagctgacttctaataccagcgtttctcagagccccaaagactatctacctcggaatcaccctatgacccagttaaaatgcagatgtctgggccccacctcagggcacctggatgaaaacttcctggaggatggaaccccagcaatctgcaactttaaatgggcccacactaaagttagagaaccacaggctcgctcacaaccctgacttctccatgtcagttccgatctttgcgaaccgcagacagggaaggtcttctctcaggggtcatgcccgcggccgccctccacggcgaggtccgcactcgcgcagccggccccgcggccgcctcacctggtcgcacactaccacgtcgaactcctcgtcggcgaggaacagcacgtagagcgccaggaaaaccatgcgcacgtaggcgcagacggcggcgccgcggccgccccagcccaggcctcgcggcagccagtccccggcacagcgcaccggtagctcgcggctctcggcgaaacagtggcccgggtcgtagtgcgctgtccagatcttcacgctacacccgcgcgcctgcagcgccagcgccgcgtccaacaccagccgctcagcgccgcccacgcccaggtctgggtggaggaacagcaccgacggcttgggaaccgagtcccgttcccggccctgctcctccgccatggccctggagccgcaactgcaccccgcaccctgatgggggtcttctgcgcaagctccgcgctcgtagctcccagctggccactgcgggccgaccccgccctgccgtacgtgcgtcagttaggccacatcagcgcaaatctgtgagggtctagtaactgcctgagaaaatatcttgtctgaccccggttatatttttccttcggtagggattggactttctgaaggacgttgtgatccaaaggaaggaggccggaggtctctacttcccatacagcaggtaactaagttgtctgtagcagactgtctacaggcatatcgtgagacgacccaggcgtccctggggtcagagaggaccttgcctgcaagtccgggggcggggcctgagtcagtctcgccagctgccggtctttcgggggctccgtaactttctatccgtccgcgtcagcgccttgccaccctcatctccaatatggtatggcggcccttccatgatccccgcctctcccagaagccctgactcctcctgctttgcgccgtgcttttcctctgtagctcccttgcttcccccagcctcgggtgtgggtgtctaggccggggttctggggcaggcctgccgcgctcacccgtctgtctgcttgtctccctctacagcctggtccgacccccagtggcactaacgtgggatcctcagggcgctctcccagcaaagcagtggccgcccgggcggcgggatccactgtccggcagaggtaaggaaccctgcagttcgttcgcttccagactcggagataggacccagaacctcgctgattctggggtggagaccctagcatgtgaagattgacaaaggcaaaatgagcttctagtgacgtggccgtgggagtagttaaaggccttttgggaggaaggcgacattttttttctcgttgctcagtttagggcactactcttaaaaaaggaaagttaacaaactggaatagagtcagagataactttgagaaaaccgatgtcattaaactggtgtctctggacctgaggtttgcactcacatttccatctggcggccccataagcaatctgtcctacagataactcgtcctacacaaaacttagtctcttttcagctcagctctctcactctcaattatatctccttacttccatatggcactgttgtacactcatttactcagagccagaaacgtcagcgtcatcttggatttttcttatgctctttctctctctagtcatatgccagactttaaactctgcttgaaagctttctcataagctctttccttttccctttctactgctttgcatttgctacttaacccttttcttcaggctgtttgctttccagtccatcgttcgctctgctgttactcttctgcgtagtttctgttacttgttgctg

SEQ ID NO: 12368 - DNA, 6000 bp, Homo sapiens
acacccaaccaaaacaccccttgtgtctctcacaaggggatcaaggcttgtaagatacactatgtaatacacgcagccctggcagacagaagcagcctagcagcacttaggactctgctgccaaggaataggcccaaggaatcctttctctcctctttgggagaagccctcagtcaccggggaaccccacccagcaactacccttccctgcagtacttccccaaccccagctgctcatcgtgccccatgttggagtggtacaatatgggggtaaggggcaagtggtgagaagtcacaagcaattttcttcagaccatgtatcaccaactcagaagtcctagtggggaggagaggggaagcctatctcattgctgcctgcaccattcagcatcaaatcccagtataccctccctcaaaatctcattccagtatctgtgggctgatgattctggatttttgaaaaagggaagggcatatacggaaaagaagagaagtgaaaaccctatccctaccatctcttcttgctttcctccccattctggtcctcatgcctcctttacccaaccacggtctttactccacattctgaatgcaggaagcactgtctacagcacggggagcctgccctgctacatgacggagtgggagagtgcagtcctggttctaacaggaagagctgtgttcatgccagaactttgaaagcaatcagtgccaaaccatgatttgggtctattgtactacaaggattatatttcagacacattaattatggactacgtggtagcctgggaacttaaaacttcattgtgtgaccattcctatgggaaaactgattgtaaatggcaaaacataactgtacagggatttacagaaagattcatgcccttagaaaaggtttcacacacacagatatatgtcattccatctgtggggtatgcagctgaaatcttcctccttgttcattgaaaaggattttaagctagaagataaacccagtgtgaacatattatagtcatggactgagccaggacttggacgcatgcacttcctactatttccacaatatcacacctccagttcctgacttcaaagtttcctggaattacaggagccccagaggagtcaggctggcttctcttaagatttcttatttctgctggcgcatggaacatagaagagtatttgaaaaccagagcccctagaaatactaaagtgtactcaaaatacttcccattccctaggggtagctaggtaaaggttaataaaacacattgaatctctcaaatttgtatttgggggctattttaccctttctttctggccactgtgtaactgtctctcccttctatacctcaacacaatggttttcaaaactaaccagttacacacttggttctaacatggtgcttctgttgctcctcaaagccaacctcatcgacctcagaatcttcatacttacccactccttttgcctaggaggcctattcgtccccaaaccattgtgtgatttgctctcttgcttctttcaggtatctactcaggtattacctactgtgaacaccctatctaaaacaactacctacctttgccctatccccaccactctctatcccccacccagctttatttatcttcatagcccttattgcctgaaattacattgtcttattttccttgcgtttgatctcccacactggaatataaggttcatgagtacaaaccttgcctaccttgttcacagacccatcttcggagatgaaacagcatttggcatgtagtagacctcaataccttgatgtctatacattggtggctattccgccatcttaatatccctgattcccattaatcctgctagaacactatgtggcacttcacacctttacagtttataaagcattattgctcctcacagcaagttccttttatattgtatttaggagagcaagaacaccaactctggcctgagcttaaatttaataacatttctcctccaaggtagtatctatcacctcatcaagcatggagaaggcagctctacagacaacataatccaaagcactattatgaatcattaacttccaatgttttctcagacttataaagcaaagatattcttaaacaaccaatacttattacattatactcatgaaatgatacttaatcactaccattctagaaggaaacactgtcaggtctctcaatacatacaaccatggtctttcttgttacactagctctatcacactgaatcctaaaagatgacaccaacacccacgactttaaaaactgcatctgtctgtcttcaaatgtttcagttctccatttcacttgtgcatcagttatttcatttttactattaaataaataatttcattatcatatgtacatttgataaatatgtgctttttcttttatttctttacaaattctcggatggccaaacttccctgccacagtattaccaattctcattaagcagaaccattcccaaggaaccgcacccacaggacatgttttccattcctgcacgaaaaatctctaaaacccagggtgggaaggggacagcactcaaagcccatataagttaaaccacagcctgatacactcctcatgaacatcccaatgacagggaactcaaaatcattcaggataattttacatttctgccagttctattagaatgtctttgttctgatgtgaaatatttcatgtaagttcaaatcatcagttttagatttacctgttgcagccagaaaatgtcacatccctcttcacatccttcagaagtttccatgcatgtgttcaagattttttcctccctagataaaaccccactagttccttcaaaaatcccaaaacaacttggttgcttgattccttccttcagtcattatttattgtgtcatgccttatggtgggtacctgggatagaaatgacttgagcaggttctctgttaaagtctaatgaaggagataaatatggaaacatcactggtcttataatgatatgaacaaaatgctatgggggcaaaagggaaaactagtagctactgctgcttacagacagagaaggcctcaagaggaaataacccctgagcttagtcttggaaaataagtagaaatttgccttgagatgagggagaaagtttgtgaattcagaaaacagtaatgggttcacgagtgctggatcataggacagcaaagaaagattaggctgaaggccgggcgcagtggctcacgcctgtaattccagcacttttggaggcagagacggaggatcacaaggtcaggagatcgagaccatcctggctaacatggtgaaaccccgtctctactaaaaatacaaaaaattagctgggtgtggtggcacgtgcctgcagtctcagctactcaggaggctgaggcaggagaattgcttgaactctggaggcaaaggctgtagtgagccgagatcgtgccactgcactccagcctgggcgacagagtgagattccatcccaaaaaaaaaaaaaggaaaaagaaaggttaggctgaaatgaccactaagagctttggtatccccccggttttttttttttgtttgtttgttttttttagttcagcaacaagtaacagaaactacgcagaagagtaacagcagagcgaacgatggactggaaagcaaacagcctgaagaaaagggttaagtagcaaatgcaaagcagtagaaagggaaaaggaaagagcttatgagaaagctttcaagcagagtttaaagtctggcatatgactagagagagaaagagcataagaaaaatccaagatgacgctgacgtttctggctctgagtaaatgagtgtacaacagtgccatatggaagtaaggagatataattgagagtgagagagctgagctgaaaagagactaagttttgtgtaggacgagttatctgtaggacagattgcttatggggccgccagatggaaatgtgagtgcaaacctcaggtccagagacaccagtttaatgacatcggttttctcaaagttatctctgactctattccagtttgttaactttccttttttaagagtagtgccctaaactgagcaacgagaaaaaaaatgtcgccttcctcccaaaaggcctttaactactcccacggccacgtcactagaagctcattttgcctttgtcaatcttcacatgctagggtctccaccccagaatcagcgaggttctgggtcctatctccgagtctggaagcgaacgaactgcagggttccttacctctgccggacagtggatcccgccgcccgggcggccactgctttgctgggagagcgccctgaggatcccacgttagtgccactgggggtcggaccaggctgtagagggagacaagcagacagacgggtgagcgcggcaggcctgccccagaaccccggcctagacacccacacccgaggctgggggaagcaagggagctacagaggaaaagcacggcgcaaagcaggaggagtcagggcttctgggagaggcggggatcatggaagggccgccataccatattggagatgagggtggcaaggcgctgacgcggacggatagaaagttacggagcccccgaaagaccggcagctggcgagactgactcaggccccgcccccggacttgcaggcaaggtcctctctgaccccagggacgcctgggtcgtctcacgatatgcctgtagacagtctgctacagacaacttagttacctgctgtatgggaagtagagacctccggcctccttcctttggatcacaacgtccttcagaaagtccaatccctaccgaaggaaaaatataaccggggtcagacaagatattttctcaggcagttactagaccctcacagatttgcgctgatgtggcctaactgacgcacgtacggcagggcggggtcggcccgcagtggccagctgggagctacgagcgcggagcttgcgcagaagacccccatcagggtgcggggtgcagttgcggctccagggccatggcggaggagcagggccgggaacgggactcggttcccaagccgtcggtgctgttcctccacccagacctgggcgtgggcggcgctgagcggctggtgttggacgcggcgctggcgctgcaggcgcgcgggtgtagcgtgaagatctggacagcgcactacgacccgggccactgtttcgccgagagccgcgagctaccggtgcgctgtgccggggactggctgccgcgaggcctgggctggggcggccgcggcgccgccgtctgcgcctacgtgcgcatggttttcctggcgctctacgtgctgttcctcgccgacgaggagttcgacgtggtagtgtgcgaccaggtgaggcggccgcggggccggctgcgcgagtgcggacctcgccgtggagggcggccgcgggcatgacccctgagagaagaccttccctgtctgcggttcgcaaagatcggaactgacatggagaagtcagggttgtgagcgagcctgtggttctctaactttagtgtgggcccatttaaagttgcagattgctggggttccatcctccaggaagttttcatccaggtgccctgaggtggggcccagacatctgcattttaactgggtcatagggtgattccgaggtagatagtctttggggctctgagaaacgctggtattagaagtcagcttcagtcaccttttactaatgagtaactcgcgtgttgtcttcccgcttacctgttatttttgttgactctcctttcaggccatttgcatcccactgtccttgtgttcggagccaggccacaccgtcctcagcagtgtcatgtgttaaaaacgccaagctgaatatatcatgcccctattaaaacttgtacatggctccccattggtttttggagaaaagttcaagctttttaccttggtaaataatgtccacctggatctgccctgtagctattcttgactctttccttcgtgcatttttcc

SEQ ID NO: 12369 - DNA, 6000 bp, Homo sapiens; identical to SEQ ID NO: 2593

SEQ ID NO: 12370 - DNA, 6000 bp, Homo sapiens
gggttgagggtgacctaggcagcattagaatcacttatttatttctttcctcacctgttccctgactgcgtgaaatgttcagggaggtcagttgatttccccaggtacattcatggtgtgacagacacatgggtacaaataaaagacccagaaagccattaagtgtggtgtgtttgagccctcagtcgtcctgacagggcacaggagctgcggccagcccttgcccaccgctttttatttggacacagatggggagccccccaggctcctgctgagaccccccacatatcctcatatctagcctgagtatctgtcctgcaaaatgacagaggggctaccagtaggaagccatcctcccttccttgtgagatttgcctgcagggggaggatgggacctcggcagagaggctctgagaagaggtcagggaatggccactccaggggaggctctgcactgggagcctgaggcatgtaatgcagcaggcaggaagtgttgccaggggcctggagtacacagtctgagccgtccaaccactggtgtgtgctgtctttcggcacttctgactgcagggcaggcagctccagctggtaagggtcctcactggggagggcacgaagctggcgggacaacactgaggagacaaagaatcttcagaggccaacccagacctctccccttgccctgtctgagagctatccttaagcctcttacctccatgctcagctggcaggctcccccttgtgtcagaggagtacatagcaggtacaaggaggaggcagaaggagactagtaggacctagagcacaggaaaaaggagatgaagaagggctctggattgccctgtccccaccaactgagaaaaggatttctcccctcatcaccatcctcaccaagatgcaggtgctgctgctgctggttttgtttgatatctcaatcaccatggcctggagtttcctcagttgatctagaagggacctagaggaagagaggggccaatagtgagcatcccctggcctagcatcctgagacacagtgaaactcctgttcaggccacctcctccatctctgcactggatcctctctcttacttttcattctatttttgcaaacgacttcttcctctctggacaaaatgcctgaagttcctcattaaaacaacaacaacaacaaaaagcaaaaacaaaacaaaacaaaaaaactctgccaggacttaacctcctttgcgaatatcatcagtcgttccccactgtctgatcagctatgcacataatcctcaccaggcattttctatgttctctaccttctgtcccagctcatgtgtgttaagagttccagcccaagatgactatgctggactagtcctcttgcctaggatgctttctctctgcctagaatgctttcccaacccaaccccagaatcctaactactatgaaagcccatgacgtctttcttaccccctttctttttcttggtacttaacttattcttagttacttgtaaatgtattcctcactactgggagcttcttggaatcagagacctagtgaaggcagctgcccagttagaaatcaagtgtagggcaggggaaagagtgagaaagcattaaatgaggggcataggaagggaatggtttggagggatacttacaaattctgttcctccagaagctgtactttgttctgaagctccatattctgggctgtgtatttcaagaccctgggggaaataacaaagatacggggatatggcctgtatcctcccttcaaaaacctaatacttacaacagagtccctctccctttcatacctgctctctaaacccccaacatacaccttctttttcctgcggctctcttgagcagatcttttatttcgaatcttcctccgcacacgtttcagaatttgttcctctgtctgaaaggaaacagggaaagggatatcattagaggaactctagaaaaaggagttgaaacgcaactgagatcaatctctttccaatacagaaatcccttctacagcttccctgaccaacaggcattcagattctttctgaatgcctccacggaccaggtgttaaccctaacaagccagaccattttaaactattaaaaaaaaaactggtcgggcagtattcaggcgacgtggctcatgcctgtaatcccaacactttggggagctaagacaggaggaccggttgagcccaggagtttgagaccagcctgagcaacatagtgagaccttgtctctactaaaaataaaaaattagccgggtgtggtggcacatgcctgtggtccctgctactcaggagactgaggaaggaggatcacttgagcctgagaggttgaagctgtagtgagccatgatctcgccactattctccaacctgggcaataaagcaagaacctgtcttcaaacaagcaaataaaaacttccttatcctgaaccaacagctgcctccttataatttctatccgttggacttacctagtatctctggggccaaatagaataaaccctgtttagctattttaaggcacttaacatttcctcagagcttaaagaaaaaaaaaaagacaaaatttttaactcatcttctcaggatagactgcatcctcttagtatctgtcaaagatgtgctctagccagtatcaaggaaagcaagagagtgacttgtagagacaataactctattgctacagtttccaaatcccatgaactttcttagtagccacatcacactgctgactcatcttgtactttgaagaaattaaaattcttcactttgggaggccaaggtgggtagatcacttgagcccaggagttcgagaccagcctggcaacaaggcaaaaccccatttctactaaaaataccaaaaaaaaaattgccgggcagggtagtgtgcacctgtagtctcagctactcgggaggctgaggtgggagaatcacctaagcccagaaagtcaaggctgcagtgagccatgatcacatcagtgcactccagcctgggcaacagagcaagaccttgtcaaaaaatatatatatattcctgtaacctttctattaatgagcactgatttcatcatagtaccccagtactctgcttgtgaagttgccactcattgcttaaaactgaaaactaaggattttacatttattcatgtactgcttagtccaaccctgttgaactctctaaacagttctaccattcagcaagaggtggattactatgaagccaacgaagtgtcaaggcccttcacttacacagtcctttccaaggcccaatactaatgttgcactgataattttgagttatttttttaacagaacaccaaaatttgtataagcccaacaaaaacgaggatctgcccttgcatctggcatattgtgtacctgcctcaacttcctattagcaataaatctactaagtttctcacctcaatccttttttaaagttattgatataaagttaacagaatttgcctacttgggacttttaatcccttttcagcctttgttcaaccaatgagagtcttaccttagtgagaggaagtgtctcaggcagaataagcccctccttctccaatagactcttctcctcatctgtcagtactagcctagcaatctcctagggtaacaagaaagtggacggcagttgcatggggatgtcagagaggaatggggaatcctgcccccacctggggaatgtgagagtaatctcctgaaaatcaagtcaagtacctgctctgccagctcctccatatgctgtggagtcatctgggtcccctcttttctacagctctcactctctgcaaaagggaaagtatgaatagccaggcccatgaaccctgtcctccccgcaaacttatttcagactcacctagatccatagagacagtttcccgtgggagggagtaggtgtggtcatggtggacaaggcaggggttggaggagctgagaatgttcaacgacgctgggggactcagcagggagcacagcaaatcatctacttcccagtcgctcggtacctgcgcagggttccaatgaacaggccttgaccttatcaccatcacctgacttcatggacatcccacgctttccccagtcagaaccccaacctacctcagaaagcggcagcgcccagtccagtggggccctcacggcctcatcgggtgccgtccccaaatctccactttcctctagcaggaaggccagcaggtcttggtcaccagcatccaattccagctccatttgggacaactacggaaagggtgggccaccgggccccaacgtccgaagcccagacacgagccccaggccagctgtaggcctcgggcacctatccactgtccctctacggccgggattccccgccggcggctttccatagccctctccggacccgcctcccaggctcaattctcctcagcctccaacgcagcgaaagtgacgcaccccaccccgtggcactgtgggacttggagttccctccaactgagaagaggcttgggtgcagcgccacgtcccaggggctatgcaaatgtaggggacggccctgctgccgcctcgcaccccgagggcgggggttccggggctccggctccgccttctaccccaagctagaaaaaggaagagttctagcctgaaagggaactcgggcgtcgtcctggcgtcctctccggattgcgccgcaccctcgcttcctgccagggaggggctgccgggctttggcggctcccgagcatcgagaacggggccagagcagcttcctgcctgccccccgcgaccatagagcgcgggcccagggcgccgcccgcgggtgggggacgttcccaggacggaagtggccgagagagtgtcgaagggagggcgaggccggagcccgagggcgacccgagaagcggcggggcggcgggccggcgggcggggcgcagagccaggcagcgcaggtaggccagaccgggccgggcgggggccttagggtggggccgcggggcctggccccggggcgggcgggccctgcctctcttgcgtgtccggttcgggtcctattagttggagaggtcagcgtccagcgcatctcggcttgagctcggcgtgaagtaggccgtcttggggaagacaggcctttcctgggagcagtcctatgtctgggataggctttggggagcgtgaggagtcgggtggcagcggggcgcagggcggggacgggctttggtgttagctgatagcgggcatgtgggtaggaaagctttgggtgagttggggattaggtggggtccgtttaggaatcaagggtcgctataggagttaaaagctggggttaaaacttaagagttagtgtgagtcaggtccgttttagataggtaaggtttagattacggtcattatcttgtttgctgggatggccatcatacgtcataatttgagttcagggtcaggttaagggtcaacaaacaacaggaatcaggttagagcttgtttgagggattaaagaatgttggcatggtcggtgttaaggataaacagtgaaagcgtgagttaggaatcaaattataaatgaactttaggcttaggggtcaacatttagggttaacatcaggggatttggtgctaaaggcaaaacttagatcagtttcagggatcagggattggatatgagtctgtgctaggaaagggatgaatgtccaagccggtactgggaatcaggaaacaaattagaggtggggttaatgttaggaatttggggcagctttaggggttgtggtttgaggctagcatagttgaccttgagcagataaaatttaagaggttggcagtaggtaaatgcccttcttttgtagggaaatcctttattcctatgtagttacaggggcttctttttacccagagagataaactaatttcaggctagcgttctggctttagctagaattgcaggcatctgggattccagcttctttattccattctctaagcccaaggcccttgctgtggcca

SEQ ID NO: 12371 - DNA, 6000 bp, Homo sapiens
gggaaaaaggaagaccaaagacactaagcatccccttttacttattttcttctcatatccttctgatattgggtacagtaataaaatccaaaaataattatacatgtaatatgctctcagtggcagcagcatagggtcatttagagaaacttgagtccacctcttcccttccataatctccatcctgctccttcaaaaacactccaaataaacattcaatctcaatctacgtaacaagagtgtccaggcactgctgacctgacttcaggacaatttccttagccctctttcaaacaagatggctgcccctaactcctacaggattctcaaactgccacagtataatctgagaatttgcaaaatgcaacttcagttatattcagtatattagtcacatagcttgaaagactttcaaattgctaagccaatttatttacctgacagaggtacagagagtccagattacctccttagggtcacacttccaattgtagtgatgaaagataaactcaaaacctttgttactacaatcacatcagtgttctcctaacgggtaatgttcattttttgattcttcattaattcttcttcattcagtgaattttaagagttttgaaaagcttgttacaagtacagttaatgtctacattgtttgactgtatcaggagacatttatttattctttacggatgccaaatgcttttgacaatcctaaaaaaataaaacagtgaaccgacagtagtggtaaagaaattgcactttaatacataagaagataagttcaaatggcattgaactgggtacaaaattctacttatttaattttcattataacttttaaattagcattcttgaatatttgtcatatcatttgcattgttaaagtttattaaattcaggataggtgtaagcccaaaaatatgtaactgaaattaaagtgtttcctccaaacaacagagagaacttgaaataatgttatttgctgcattaaatgtgagacatacatagatagtagctagatcaatagagacacatggatagatatatttaattctgtaattttgaaaatcacatttttttcagaattttctaaaaagacattaagtaggtaagtttcaaacatgtaacatgcatttcaggtcacctattatcaaattattatataaattctgttcactcaccaccctctaccataatccagttttagaattgtaaagttacattaatcacacttctctaactgcagaacagtttacaccagtggtaaccacaataattgtcatgtgcactattagtcattcctaaaattttaacataatattctgctaattcttggatataactagcaatattttagcttttcacttactctccagcattattaaagaaaaatgtgcatttgcagaactctgcacctgcatacatttggattcctgcatcctactagtaatacacaggaaagatatcatggcattccataaagaataaagcaaaaaaagttatgaatagctcaaccttccaatatcacatctaattagcattgttttctttctaaattaagtgtatttagtaaatagtaatcatgccttgagttccataaaatataagaccatgtggtcaacaaaatcatctttatgttgctatagttacaagagtaggcttgtaaattttatgttaatattaaaagaaaagaaaaacatgtttgccttcaccaacagcaactgaaagcaaatgcaggtatacagcactttattagaaagaacccctttagtaagcacatgtaagaggaattaatcattcattccctgcagactgcttatgtatttcatcgggccattatctgatctgaataacaagaacaattgcataataaaacacattactgctgacactagcaactttcttctcaactttaaagttgcaactacctctgtacaggacagagagctggtggccaaaaaggtgacaatttaatcacccatcctgctttgccatttttatctgttattatatagagacagggatcaaatgcatgtgcaagctttactagaaacagctttcattcaggctattttccttagcactatgacataattacaacagaggcagaatgtatgtcaggttagttttaatgttacttacaaatatttgctttcagaaattcaaaaagaatgcacaaatctgtcatgtcttctctactgtgtaaaatatgtcctatactaatatatgtaataacatgtttgaaccactgttaaatttgccctacttaggtacaatcttcccctttatttttcaataattaagtttttttttttccaaatatcagatagcctctcggacatgtgaggtcagaaatgagtagaggttatgtgctataatccaaatctgatcagccaagggcttcattttaaatcacttaaattcatttttaaaccaataatagaaatgttagctaagagcagtaatatgtctaagaaaactcatttggataagaaattaaataataatcaagaaacaatgacacatctttctcaaatgattccatatatgataacttcatgtcaaccaattcattaactgttctattgtcctgtctcattaccctaaaaacttatggcccaagatatttagagctttcaacactgagtaatcaaaacaactctaaaacatctctacttttttgtaataattgtaacttagcttactcttataatttctaaaaccaatcccccatgaatacagatgcttttatatactcacttaagtaaataaggaggtaaaaatatactcattctaccattatcaacaattaaatacaaggaagcccttaggtataattaataataagctgctttattgaaagaaattctctgagataagtacttttacttttcaatctggtttttaacttataaggggtttttattaaaaagtatgtattatactgagaaagaaattaacagttaaagataaaagggataaactttttctaatcactattagactctagtcagtataagtactaccatgtcaaaaaacttaggatttgttaaaaatcaggtctgttttgtctaagttgcaactcctactgtatctactgtatatgtaacaatgcaagaagaattagattcagaatccatttggcagtgataaagaaaaaaatgctgaaatgttattgattctctccctcttgtgcaaaacaaactgagtcaactatatttttcctgacataacacaaaggttttatttagatattacaaaatattggcaaatgttagactacatgttttttatatatatgtataatgaacttattaacccttttgtagaaagaagagtgtcctacttctgtaaaaagaaatgctacagctactgacatggtgatgttagccccaagaggaatactgcctgcaaaagtttttgatgcagagatattcagccttaggagacaccttaaacctgtcactggctgctgagccctgtcagagtttataacccgctgtgtcaaagtcacagtctcagccctgccctctccaaagtatttttcacattctctctccaaattaagttcattctaattctccaactattctagttccaggattttcctccaattattatctccttacaggcatgaagaaatcgcaacagaattttcatctggtctttcaaaccatccttattaactttcccttttccgccccccccccctttttttttctagagcttttcagaactaaagataaaacaaccaaccaactgaagtcagagtagggtgggagttagcatggattagggctgaggttgaaggtggcaggagaagtgagccagtagggttagatttttcaagctttttctagataaccacccttaaatcttagaaccaaccaatgtttaacaaagcaggcttccaatagcccttgaacaataaacgtttaaaaatcagttttccagtaaggctgcccatactgatcccatatcgaagtcttctaagggctcttccaaaaaaaaaaaaaaaagaaaaaaatgcttagcgaaccacttctcaaataggagctactgaagttatataagtcaagttattcccaggtaaaatgaataaactgtccacagcattggacattgggcattgaaaagcatcagcatatgcttcactttagagaaaagaaagacagaagcacagtttacttactaaagcagccgctccagtcctccttggaaaccctgaggagtcttctcttttctttcctaccagtcaaataaagaattgtctttctattccacacaggcccagaataaactgcaaaaagggatggcacatgcacagcagcccgtcagggtttggctttggtggggtgcttcgatttctgattgtttcaaaagtgggatcttcttttccggagggagggggcaaaggaagaaaaagaaagcgcgctcggaaagccggcttgggtcctgctaattattctgaaggcaaagtacctgcactctccccgccgaggctggctggcggcgccgcgccggaggggaggaggctcgggaggaggaggagaaagagcagcgggaggactcgggctgggaggggagcgcagggttggggaggccgatgagcggctcccggctcctcggagaagcagccgagacggcaaggaggaggcgaggctctgtcggggcgaggcgctgcccccacgcgctccggccgccggctgcgggcgcggctgggcggggagccgaggcggccgctcccgcactcgctcgctcgctcgctggcgctccctcctcgtctcgctcgcactcacaggcacacaccccacgtctccagcagctgccgctcggcctcacgcactcacctgcatttccttaacgagccacttgatggctgccagcggcgtgggccccgctccggcgggcgggggccggggcggggagaacgcggcgcgggatgctccgagcgcccgctggggagagaagcggcggcggcggcggcgctgcgggcgcgccagatggggcgggaggaggggagacccggcacccaccggcccagagctgcctgacgcggcctgggcggaccccgccgcccgggtgcctaggcacgattccagggatccagggtaaagcggttcgcgcgggaacaggaggatatgtcaggcacaggctattccccatcactatagccacagaggactggtccagatgcggatcccgatctgtgcttcttcaggtgttcgcgtgctttcggttattattattattattattttccgagggaggctgtcggtaacacctaaggggtagtgggtgttaatagctgggggacgtacatttgatttgcaatggaatcgatgcttatgaagagcagacttagggaggtgaagggcaggggcacaggggttgcttggcggagggggtgtacttcggctgagctggatggagttttcagtcggggcgcttggcagtctggctgggcttgagggagggatagagctctgccaaggtggtagctgagaagggaaaacctgtacaagagttgctgagaatatgcctcgctgcagaggagaggacatggatgcagggagcggattcttccccacctcctccttaccccaaggtagagtggggtatcggagtgcatcagatgtggtgtaccacagactcgggagacaggggaggaggaacttagacccccagcgaaactagaaataaggtttggagctggggggagaagaaggggcaggatgagagaaaaacagcaggaagctttttgtcattttactatctttcatgtctcatcagagcatacagctataggcaacaaatgctctgtctcttgataaacagagagcaatgtcaccatgtcggtgcgttttctaaaaagccaaaataattatcctgtttgtaatatgcaacacagagcattccaggtaccatctggtcaaaggttctgtaagcactgtagaagaaaacaaataaaaaaagaacaacgaaaaaccagttatccat

SEQ ID NO: 12372 - DNA, 6000 bp, Homo sapiens; identical to SEQ ID NO: 2590

SEQ ID NO: 12373 - DNA, 6000 bp, Homo sapiens; identical to SEQ ID NO: 2597

SEQ ID NO: 12374 - DNA, 6000 bp, Homo sapiens
ttagctcctacttataagtgagtacgtgcggttgtctgttcctgtgttagtttgctaaggataatggccttcagctgcatccatgtccctgcaaatgacatgatgtcattctttttttatagctgcatggtgtctctcggcttttttttttttttttcttgaaatggagtttcactctttttgcccaggctggagtgcaatggtgtgatctcggctcactgcaacctttgcctcctgggttcaagtgattctcctgcctcagcctcccgagtagctggaattacaggcgaccaccaccatgcccagctaattttgtatttttagtagggacagggtttcaccatgttggccaggctggtcttgaactcctgacatcaggtgatccgcccgccttggcctcccaaagtgctgggattacaggcataagccaccgcgcccggccttctctcagctttttaagagagcattaaactaaatggggctcctctgacaatttgtgactaccaattagctctcacgtttccatagactgttaggacaccttgtcctcactctttaaaaaaggcagacctggctctagctcccctgagtaagccacctccctggtccccagaaattacaaagtaagagggctgagtatgatgtagtatagtgggccaggtgatctggggagaaggaggcaggggtatggaaatgaaggagaaaggtgtggcgagggtgaatggtaggagaagggaaaggtgaggacaagaggagggggctcgtttttgtaggacactcccaggtggacctggacatcattacctagagcagtgttccttaaatgtgcccagataggaagcataattacaaaagtaagaacttgcattttcagagagctttcccccggaaattctgattcagcaagtctagagcaagggctatggtatctaaatgtttctgtttaacgagtgataccatgctaagtaaaatacaacttgtttaaaataagggagttcctgaattatgtctggcatacaatccaatccagatttcatggaatattggaatgcctggagatataacaatcttagaacaaaacatttgtaaagcagtgtagaaaaaaacaataaacaaaaatccaaaatatcttaattttgtccattttgagagcattaagcctaccctcagtagttgtccaagtttctaagagttagggtgaagacaggacatgactgatgcgcagtactgtgcaaccaaagctttagaaagggaactgggtaaagaggcgtgtcgccttatgccaccttgtggcagaattgggtagttaatgaagaccggctggaggtcgaatgacttgggtccttcaacaaatactcattaagtcatcatttgaaaaaaaaaatcacttaaaatctgagtctgttttctccttttaaaaaagattactatttgcttaaattatgtttttgatacaagcaatgagactttaaaagtgaaataaaatattaagtattctttttatcattgctaatgctgttttcccatttataagtgagggaaaaacttatttttccagggatattcctttttctcttgattaagatggtgaacagaaggtggctggtcagaaatgaatggggaatgcattcaatgagagagatctctgccatcctcctcttcatctattctattttcccaattcgctagagtgagacaggctactttgaagatgtcagatggctgactgaggtgctcagaaaagacagatctcaccagtagctgcagaatatggttacctactatgatggttaattttatgtgtcaatttcgctgggccactgtgcccaaatagttggtgaaacattattctggatgattctgtgaaggtgtttttgtttgtttgtttgtttgtttgtttttttggatgagattaatatttaaattggtagactaaagcagattaccctccaaaatgtaggtaggcctcatccaatcagttgagagccttaatagaacaaagactaacctcccctgagcaagaatgaattctgccagcagactgcctttagacttaaactgcaaatctttcctggggctccaggttgcaaacctgccttgtagattttggtttatccagccaccacaatcctgtgaaccaattccttataatgtccctctctctctttctcaaatctctttctacacacacacacacacacacacacacacacacacacacacacacagagttgattttattttctggagagctgtgacacctgtgaaggtgttagataactggaacttttgagaaagacatatatcccagttgctagagaatatggttacctacatggtgagaattgaaaggtactagaaaagtctgctctctttgtagaatcttctctaacactcaagtgtgggttgaagttaggggtgacctaactcagttgattggctccatttccctgagattctcttggttctgctcacccctatgtggtcgctccattctcaagaatgatctcaggaagcctccaacagtttcagcctcacacagaaaatctggaagataaaaatctgcttcaattctagtattcaaagaaattcaccctgattaaagtgtcaattgctgactaggactttggcttgggaaatggaacttagtatttaagacaatccttggagattggggtgaaatcagttttccctaagacttaatggaatcaaagtgctatatggatacatgaaaaaaatcctggttctgctaaggtgagggaaggggaatagctgttgggtagatcaccaataatgtccaccagacacttacgtagtaccagcaattgatttatcacaatgtaacacacaagtgatgatactcaaattaaactatactagtgctaaggaaccagtaaagattagtggggattatggtaaacaagaataacatgatctattaataaaagagagccacgccaagcgtggtggctcattgccagtagctgtggctcaggcctgtaatctcagcactttgggaggctgaggtggatggatcgtccgaggtcaggagtttgagaccggcctagccaacatggcgaaaccccatctctactaaaaatacaaaaattagccaggtgtggtggcgtgtgcctgtgatcccacccacttgggaggctgaggcatgggaattgcttgaacctgtgaggtggagtttgcagtgagccgagattgtgccactgcactccagcctgggtgacagagtaagactctgtctcgaaaaaaagaaaaaaaaaaaaaaagaagaagccactactttgctctaagcaatgtgaccatgcaaaaatataacccttctgttgcaagatcatcaacattttttagagaaactgataatttggatttttatgtaaaatagccatattttaaatgttggcaactaagttcatttttgttcttgtttttaaccacgcaggacagccaatactgtctaaaataaacaaagcataactgttggctaaatgcagtctgtgaacctctagttttctgggctagaaaaaccattacttgccattcagtagttctatgaatgaaaggcttgctaagagtagaggaaccaaagaagatgagagaatgagtgtcattgtctcatacaatgcttttcggcaggtgtgtccccactcacatgttctcaggctcccacttcacggaatgaaatgtgaagtccacttggggccagttaattctttccaagatagtcaaggtgttccactgccaggcaccaggaacacttgtttccctggtgttgaccatcttacttcatttacaggtaagccctagcaggtacagggacaaaagtcttcacactaacagaaatccagtgtagattagcttctttttttcccaagatgcctaaattctattttttaaaaaagatatagcgatcattcttccatttctagacccttagctgacgtcattaggtagtttatcatagttctgcgagacatacagcttttcattaataggttagattaattaccgtcctatcattaaaacgcatttagtttaactgaatggaaaatagcagtttgtcataaacttaaaaaaaaaaatcaatgcttaattagcttaaaatagactagtactgagatcagagactgattggcgtttatcttttccctggacaatttcttgttcccaaaaaagcacaagggcagtagttgtcactcctgcttacgcattagaatctagtggatggaaatgcggggtttggggggaggagatgaggggaacgcttttttaaaaaagcttttgtccaggccaagtgattctaatgtgtagacagggcagaataccgctccctgtgcgggggaaaaaatccccaacatctgaaattcctcaaatccctcagattctctccagaactcttcatttcagcacgtaggggtaccaacgaacaattttctgaggtgtctgaggctagtcatgtccccggagattgacgggaccgtcagccaatcggccgtctgaacgagtgatggcaaccccaatgacaagcaacagaatgaggaactttatccccgcagaaagaccagatcgcagtagcaaaggtcaacaagtcaacaaaagccaagggctctccgtcaggcatcagcgaggcccgagtactcttagaggtcgtagccaggagagggtcccgcgcttgcccagcgttgctagggaggcggcgcttgctcaagcttctcgtgccctctccgtacgtcacttccgcccggcggggtctcatagtcctatgggctgggttgaagccacttccttttttctttccctttttcctctccgtggccccgcctcccggaagttctgccttgtctccgccgcgggtcaggggtgagagctggaatctctgcacgggccttggtgagtaactgctgcgagttctgttcccgcgcggcgccagttcaaagaacttaggttagatcacgcttagggcccaacaggactgtgccaggcctcaggagtctccaccctctccagttttggggccgtcagtctcctgggcctgcaattatccacgctgaggctgaggtctttggcttttagcgagttggattgcagccttgttctgcttctgtgtcttctctctccaggcgaggtcctactgaggttgttgccagcgatagtcctctcctggagcttgaattggaagcagagtagtcttgttagtctcggtgatggctgcgttgtttcctgaagtagccaaagtgctttagcatccattccgcctcctttgagcaccctgggaggtaggcagggcagacgaaaaatatattcgttaatattgtgcagttgaggaaactgaagctcttggcgaattcactgtttcaaagcaacacggcctctaacaggcagaactgaaattcgcacccaggtctaactaacgtagggttgcataaaacagtggagagagcgtttggaaatagggaaaacactgcaaacgttaaagaagagctggggtttctgagtgcttactttgtgttcggctttgtgccaaattctttctataattatatcatccattttattttataataagcataggaagtatatactgtggttatttattcctgggttaggaaactgaggcttagagatgataactgacttgtctagtactaatgactttagtaggcatttcacagatctctttcagctctgtgattctttcaacactgtagtattaacttctggcataatcaaactgcccttttctgattttggcattacaggaagagagattccagaactttatttttggtctcttcaccctttgcccattgtctcatttcttatcaccattcttatcaccatcctatttagaaatttatagtcatgtaaatttagccttgactttcttttttttttttttttgagacggagtcccgctctgttgcccaggctggagtgctgtggtgcgatctcggctcactgcaagctccgcctcccgggttcaagtga

SEQ ID NO: 12375 - DNA, 6000 bp, Homo sapiens; identical to SEQ ID NO: 2584

SEQ ID NO: 12376 - DNA, 6000 bp, Homo sapiens
gcccactagatactataaagtctatacttttcacaaccatccttctagatctttatgtttcactttgaatacatgaaggaaaatttcaggaaatttttaacaattggaacactgagtagctcaagagtattgttttttgggttctggcagaaaagaattatgaaggtaacattgaagtgcgctgttgttggaaaccatttgcaccatgtttgttgtgactaatcctaacagacagctgacaatctcaccccagccaagaccactcgcttggaaacgctaatacacgtaatagccaaccttagcatggctgaattttcaatgatttgaaagtgagccaatgaatacttctgacatcatcatacacacttactgaagacctgaaatgagcactgtaaaactagttctccgcttactatatatatagactaggaagggtgcttcctttgaatctgaaaattgaaattttcttcctctaaaggaatcatataccagtcatatattttccataagtatattatttcataaaagactattctactatacattctaatccttagaatattgataaaagagttactaaatctttatattatatgtatatatttataaaaacattccttaatctgtgatggcacacaattttatctttgaatcagctaacgaaggtaaaaaaaaagaaaaaaaagtgcattcctcttccaaaaccaatagccatttagtgaaatctattagtttaaaaacacacataaaatccactgttgcaatcacaaccgttcatcctgtcctttgcacagctggctgatccaatcatcctaattgttcttcgttagttattcatactttccttgtttttctgttgcaaaaattattcaaactaaatgaaaggaacttgaaataataaaaaagagtatcagaatagaagaaaaaaatacctgaggaccagaagtagaagaggtgagttttgtcattttaaacgaaaaacaaaatataaaagaattcagtcataccaggagaacaagggctaaaatatgaaactaaaataaaatggaaataaatgtcagagaaaatatgaaaagacgcatgagacagaatgatgcatcttcagagagataagaaatgaagcctgttaggacaacacagaaagatggcacaattctctggtgggtgggatgactggaagcagaaggcggggaaaggccggcagagcactttacatcactttatctgcatggtacatctcagtccccaatttactttatttcactattcgttattttaacccacagctgagcacagggtgagtttgttttgcttccccttgtgagttcactgaaaaactcaactagtatttcaggttacatcagactgtgcctactactcagcaccttcgagattttctttaaggggaaaacaaacatccctggaagatgccgttctaccgtgtagctccttgctcagcgcccgtggtcagagtccgtcctctcactagagcactgttttcctttcccgggcaggtcagaggttctgctttccacacggcaggaaaaaagctgccccctcctatcggaggaaaaaggttgtgacccccagcagagttagtacagatgacttcaccgaatttactcatctaggctgaatcctgagagaagcctgcaggtgtagacagacccttcggggctggaggcaagggcaatgtggaggggatgaacggaggcaaggaaaacaaagtagacaatcaaaagcaatggctacatttcaaagcggcatctaccagaaatgactaagattcattttattttacactaatacaaaatgaataaaatcagaaaataccatagctttattttaacacagaagaaaaatatagtggatgcaggaaaaaagagaaattgaataatctgcttctacttgtgacatggcaaacgtttttaaaaataacttattagactcaacagcaagtgaactgcgtcggctcctactaataacaggttcaaatcctagcaaaaggttaacacatagaccttggaatgaatacacatgatcacaaagctcaatttctatttcagaatagggggaaggcccttggaaatatcgcatgttttgcctcagcaagctctgaatcttctcctaggtgtggcagaagcaaaacagtgagcaaaagggcttggaagtgctgtgcagagccaagagaaacattggaaacactgacagttcatattctctgatatgactctgaaatttgctatcttctagcccttcctcacctccaccctcaaacctcctcagctttaagtttcaatccatgaaaggaagttctgaatgttggtttcaacctactccattttcatgttctctttaaaattgctgcccacattttccaagaaaaaaagtgagaggcaaatcttccccctaagttttaacgcaagagcttgtatcaagaggaaacggttgggcaaagaacttcattctcctgcaaggtaaaataatcagtcccccccccactttctccccaccccgattctcaggagacccagtagtcaggtcatgggtgtcacaaatacggttacttctaggttagattttggtagtgacaacatctagtaatccacaaagataatggcttccccttcctttctacagcacattgtgcattttggtaatcttatttttggcttaaaaattaacagctggcagggtgcagtggctcacgcctgtaatcccagcactttgggacaccgaggcgggcagatcacgaagtcaggagatcgagaccatcctggctaacacagtgaaaccccgtctctactaaaaatacaaaaattagcagggtgtggtgccatgtgcctgtagttccagctattcgggaggctgaggcagaagaatagcttgaacctgggaggccgaggcttcaatgagccgagatcacgccactgcactccagcctgggtgacagagcaagactccgtctcaaaaaaaaaaaaaaaaaattaacagcaacgacacattttttaaaaaataccaagcaagccataattcttttccttctttgggtattttatgatctcattcatcacctcacaaacatttaaaaaaacacctaaaccattaaacacaacttaccataccatgctgaggtatggtcagaaaactcaagtctgttccaaatcacaactttttctattattcttcaactgaagtgacatatatgaccctctgtggaaaaagaaaaggggtggggtcccccttttcatgcacactgaaagtccagctacaaacaactatattcgcaggctggttccttttccagctctctcagaagctgccctctggtatcctgacgtgcactctgcagctctgggatcacctttattctgatgtgctttgtgcacattctcggacgctgcaatgcccatactaaggcaacatagcacagaaattggcagcaatgctatcagcaagaatttggcttcagaatcaagagtgattcatcatacattctagcagcagaaaaacacaccgctattttaatcccttgctggtatcaagaatcaaaaaacagtgaaatgtaattaagcaaaagcaacaaaaaaacctatctgctgtaatatttgtcaaaaaattattcacttttacgagttttccgcaagtcacttagaaaacaacgggctacttaccttatttcatgatattacaatgacaaatcaagttttaatacaaaatcaaaagacaggcagtccaaacttctgcaaagtaacatactgaaattctaaacttgggcaaacaaatttctcatctgctttacagtaaataaaattcctcctagtgttttaaaagtaatccacttctttcttcttctctctctatttcttagatgactccaatttaaagtctaggtgagagaaagtacagcatggaaacctaatactgtgggcgatttattcggaacacttttcatttttcagaggtaccttaacactgagataataaacactgctgatctaaaataataatggaacccacttaagtccgattgctgtatttaatgagcatgaaacaaatttcatgggctactctctcctaatgagactatataaatgatcattagccttatcgaccaatatttctgtagaatttccccatatattaaatctatggtttattataacaaaaactttttaaattaaacactactctattgtcatgaccaggtcctcacggggcagaagcggatttaccaagacctgcaccgagtaccgtctcgggaacccctaccttttcaaacacctcttccttctccctgcgcttccgttttcggggtctccggttcactccaatccatttcgtgacctgaggttcaaaaaccacagcatttcaaagaaggcgacagggtcctgacggccatcccccagcgcgagaaagcagagacccccggcctcgcgacctggtcttccccgcacctcgggaggccacccgcgcccgcccgcggaactcgccgggcgcctcaccgcaggggccgcgaccttcgtcacggccgctccccgcgcccgagccggagcctggcgggtagtccccgcacccgcgcgccgcagcgcagagccagggcctctcgccagccgcggtctcgcgccggcgccaccggggcgcagggaccgcgccgcccgcactcacctcggcgcgcacttgccgcgcaagcccgcactccgccccggcgcgacgctccctctgcagcggctgcgggggaagaggacacagtcaagtttaccgcgggagcggccccggcctccctgccccgcgcccgctaactcggcgtgcccgccccgtacctcgcccgcggccggggaggacgcagcggcggcgccggagcccgcgccctgcgcccgcccggggtccgcatcacctcaggcgcggcgcgggcggcgggcgcggggcctgggcggcggcgcgggcgggcgggcgggcaccgagcgggggcggggcctgccttaaaggtatagcggccgcgccgcctcccgcaggtcgccctcccgcccgcgccggcattgtattgttctccccacgaacggcgtgctcccgctcccgggctccggccgccccgcgcccccgcgcaccttgcccccgccacccctccccgggctccggccgccccgcgcccccgcgcaccttgcccccgccacccctcccccggctccgcgccctgcgagcggcttcccggcagcgagaggggcccgcgccgcccgccgcaggctggagggagcggtggcggggaaggaaccccgcccgtagccagcgtagcgcgctcctggagtcggaaacctggtcccggtggctttcgcgcagggaaagtaactttcctagtggagttttctccgggaccgggttctacgccctcgagtagacgtttcccagtggcccctcggggctccgggcagcggcaggtgacctcccggggggcgaggccagggcgcagagaaacccagccccgcgctcccgcgagtgtggacccgcagccctcagactgccgtggacccccagaaccactgggtagaatttaaaaagaaggggtcaatctgttttcataattagggagaaagtttacacttactttataaaaatgtgcgataccccaagattttcctccacccgccaaaggccttctcatccgcatcagcagttgctggaacccgcctgccggtgagggcgggccggggcggagagtcgggttgtcctgttgcttgctgggtcttgaccatccctttaactttatcacatttctttaaagaaaatctgtcttgccctctctttattgctactccatccttctttcaagatcaaaaggtttagatcaaagccaagatcaaactcactactttaaatagcagcaactttgccatggagtattttacacagaggagcttaatggagacatcaggaatttatcccttcattccatattcataactggactacttaaaattacacggatgatgtatgtctatttcc

SEQ ID NO: 12377 - DNA, 6000 bp, Homo sapiens
ggtcctgggcgctgggaggccccttgggggtggggtggggggccaggggtggttggggcgtggctggggaggagggtgcctcgtccccacatggaggagtcctggcccacctgtccctctgagcacctgcgtgggcagggaggacgggcacggcacctgcctgtcggccctgcctgtgggaccaggggctcccggggccccacacagcactctcacgtccaggcaaggcgggggcacccaggacagtcctggactcctgaccccgcaggtcttgggcaagactgctaacaattaaatgttagtttctatagatgaaaaaactttttttttaaatagagatgaggtctcactatgttgcccacccagtcagatcttgaactcctggcctcaagcgatcctcctgcctcagcctctcaaagtgctgagattaaaggtgtgagccactgtgcccagccagtttgcatagttttgttgttgtttgttgttgttttttaaataaattgagacagagtctcgctctgtcacccgggctggagtgcaatggcgcgatctcggctcacggcaacctctgtcccctggattcaagcgattctcctgcctgagcctcctgggtagctaggattacaggcgcccaccaccacgcctggctaattttttttgtatttttagtagagacggggtttcaccatgttggccaggctggtttcaaactcctgacctcaagtgatctgcccgcctcagcctcccaaagtgctagaattacaggcgtgagccacagcgcccagccatttccatagattttttttttttttttttttttgagacagagtctcactgtcgcccagactggaggcagtggcatgatcccgggtcaccacaacctctgcctcctgggttcaagcaattctcctgcctcagcctctggagtagctgggattacaggcgcctgccaccatgaccagctaatttttgtatttttagtagagacaaggtttcaccatgttggacaggctggtcttgaactcctggcctcaagtgatccacccgcctcagcctcccaaagtgctgggattataggcgtaagccaccacgcccagccaaattatgcaaactattttaaagaacaatgattcacacagagctatcgtgattttatgtagtgtttgaaatttaactagagctcattcaatgcttctgtgaaaatgaaatgccttgtaatccttgcgctgcacatcctctggtcccagagcacacagccaagtggccacgcacttcactcagtgcgggaacccacccagccctgcagtcagaggcgtggagggtcaggctgggccactctgccaccaaccacagcacccaaggtcatcgggtgggtctctggcgccacccctcggacattcagccctccctgaagcttgtgaccgtggccagctacccgactcctcctgcccccagatgagaccctcactttctgtttgggggatgtggggccaggcatggaggaggctttcctggggctcaggcctagagtcttcccggcgttgccagctctgaaccctgagcccttctgctgcgccctgctatctcatgggtctctgggacatggagctggagtgggggaaggcgatgcaagggtacgacctcctgggcccttctccttcccaggtcccggcagtcagggcccctgcctccccttcccaccacctgacttgcctgccctcctggggtctagcagcttagtgaacaggtgggcacggcagggggagccccgcccgtgggatggggacccccctgaagcagctgctggctcctccctgcccccacccaggccgtgtgctttgggaccaactccaaggtgccttctcctcccatccctgcccactgtggccgattggtggctgatccctggacttgtaagttcctagggggagggaccagcccacctggtggtcccagggcccagcacacagtgggccttcagaaatgcttatcaaacaaatgccagtggccgcaggcagggcctgagaggagcagcttagcggccaggtccaggcccagcatggtcaagccatgccgggttcctgattctccggccctagcccaggggctgccccgagggcagagctggcccacccccacattctcttctgcttcctggtttcacgggggacgtgggagtggatgaggtgtgcagagagtgcagtggctgtgggtggacagcaccaactgctgccaccaacacgggccagctggtgccagctcggctcggaagaggccaaaatgggcagtgacgggagacagctggcctcccacgggggcggaagagcagcccgggggctgcaggacaatggcccaggcaagagcagccttggagtgaggctggacgcccccaggtcccagcagggcacaagatgggcatatgccagagaggatctcccctcccaaatcccaagagccgctgaaatcggcccagtgcccactgcgtggactccagccaacagggagcgccgggcttttaaagaggcggggtgggggcagagagggccttggtggtactggcgccggtccagagtggacagaagagtcagagaggggtctgagacatttaataagtaggtaccactccacccactgtcctctggggcagccggcagaagatcccctgccctgggtggcagggccctgatctgaggctggtttcacggaggacaggcagcgggcaccccactggtggggtcgtctctcggggcactgacttctcagcactggagctgtgtgccggcctcacctcctcacttctgcagcagagacgagactcagccggtggcagtggcccccctcaccacgccgccatgcttgccccgctgtgcactcaccgtccaggacgtggaactggtctgcagcctcgcagaagcctgggggcccaaggcaggggtcaggctggacatcagcccagagagtgggggtggctgagctggggacctgctggggacactcaccgtacttggggaagtagaagatctggtcctcagtcaggtgggcctcctggacccgctgctcaaacccactcaggaccgagtcgctcacagggagcgagcgggctgcagggcagacagggttcctggggtcctggcaccaggcggcgtggagggctctggaaacggggtctgtgtgtcccctgccccctcggggccctctccctgctcccacaccaggcctgtctgtcactactccctgggcccctgcttagcaggaggatcaggatgggagaaaggaagtgtgtccccatgggctcacccagcccctcggggtggcccagtgagtgtgcagagcttgagcgcctgcctggtcacagaggctggcccccacataccgtagagcttcactgacagctgccccgcccgctccaggtacaggacagcgaaactctggtagtcggtctcagcgacaaccacgtgcacagcccctcgggcgtctcgggctggggcagagccacagtagccatgtcagagagccacagtggctgcgtcatcccccacccacatgccctgcagcccctgcctcaccttgaagcaggaagcggccgaggacccctgtgtctccatagagctggcgcacctgccagcagatcccatccctgggggggcggggaggaggcaccacaggctgggagaccccaaccaggaatcctagtccaggccacagccggggtggggtcaggggccagagcagggctgaagtccgggggctgagaggagggttggggttagggtgcagggctgctctgggactcacagctttcggaaggtactgacagccatggctgtgccctggggagccacatgcagtgtggtggcctcggcccggtggccctgctcctgcaggaaacggcaagcggagcccacagccacaaggagccaggtccctgcaaactgggggcagaccatgggagaactcgagggcactgtgggagggcccctcacctgcttccctctacaccccccacaacttcacctgcttccctctcccccgcaacaacttctacctgtctccctctacccctcccacaacttctacctgcctccctctaccccccccaacttctacctgctgagcatcaaaattggccttgggctggatggtgctgatgggggatgcgggccggcgtggcctctgaggcttctggcccagcgagccagctgccaggagcagagtcaagagggtcgcagtcccagggggcagcatggtggcggcagcagggtggcaggactgtgggaggccaagggtagcaccaccaagtcccaggacagagtctactctgctgtcacagagcccagcccaggaagtccatgtccatccgttgcctccccaccccccacctccagcctcctcgtgagcctagcttcgatctgcacttcctggcagggccctggcaccatgtcctatgtacaaagtccgagttgacctctggctgtttatccatttctcctgcacccctgatttccaccgacagtccttagccctttacacgttatcttccttaaaccatcacccagtggtcttatctccatggccaacgtcacggggttcatgaagccacttgctcagggcccggcaacagggagcgccggaggcgggtcccgaaccagcgttcgttgagcctcgcctgcaaccccgcccacgaccgccgcccgctggccacaaggggcgctgttcccaatgcgcccgagtgcgcgcaggcgcacaaagaaaagccggccaggccgccggagcccaaggcgcaggcgcacgaggggcggatgcgggctacccgcgcgctctgccttcctcggccatcgatgcctcggggctcgtggcgtcgggcctggcgggctccccgttgggcgggggcggcggtccgagcggctgcggcagcggaagcgggtccgggtcgcgcagggcgggggcggcgcagcgggcggaggcggccgtggtgagtgcgcctgcggccctcgggggtcccgccttgtcgtccccgcccgccttgggcgagtgcaggagccccgaggccgcccgtgcgctcgtccccgccgtccgccccgagcccgccgggcagagctgctccagggccgcagggcggaggccactgcctggccgccccgagcttcctctcggcggaagcccgtccccggacggcgcctggtgtccccgtgcctcgcgtgcggcggtccgggccctggcgggctgaggggcgcccgctgccggccgcaggaggccgggggatgacgcggcggagaggggccggcccggcccgcccggagctgccgggtccttggttgggcggcggtacccgggcgtcccctgcagacacgcagccccgtggaactcccggcgggacggttggggctggaggaacaggacgcccgctctcggcctcccttcccgggcctgggctgagggcagccgttggtgggtttcagggccgcctgggcagaatgtcacgatggacgagggcggcacgcccctgctccccgacagcctggtctaccagatcttcctgagcctgggcccggccgacgtgctggccgccgggctggtgtgccgccaatggcaggccgtgtcgcgggacgagttcctgtggagggagcagttctaccgctactaccaggtggcccgcgacgtgccccgacacccaggtcagtggcgtgtggggcccctacccacgttctgcagccagggccccgggcccctgcgcttgggggtcagcctggctgggggcccgccccgcggccccgcgtgtccatgctcacccccccacaccctgatagaggcctgtcaggacacagcgcaggcgcccctcagagcttggaggccagagggttcattgggtcacttggggggtggggggtacaggggtctctgtgagctacagggttgaatcccccagccgaggcctatgccatgactagtgggttccaggggcaccacggggcctgccaggactgctggggccacactcgg

SEQ ID NO: 12378 - DNA, 6000 bp, Homo sapiens
gcagcctcgactttccaggctcaagtgatccccccacctcagcctcctgagtagctaggactacaggcacatgtcaccacgcccagctacttttttatattttatagatacaaggtttctccatgttgcccaggctggtcttaaacttctgggctcaagtgatcctcttgcctcagcctcccaaatgctggaattacaggcatgagccgctccatccggccaagcccatgtttcacatgggaaatctgcggtttagagaggttaaggattttgcccaatgtcacccagcctgactgacagtgcgggcactgggacttggcctctgctggctggggttgggtattttgggggcatggggacctcctcacagagggaggagctctgccgaccctgtgctggggccctggcaggggctggggaaagagtcatctccatagggttcacttttggatacttctcagcccaacccaggctggccttgccagcgtcccttccccgcccgaggcccacccagcgccagcgcccggttctcttgcagcgactgggccctaatgtcgcacgaggggccttcgcgaaggccaatggtactatcccctcagcccctctcccacccccaccccctaccccctcaggctgtggggggtcaggggtcgaggcccgcgcggcgcgcaccttccaggcgcatccccaccgtcaggcatttctggaagcggcagaagggacagcgcttgcgctgcgtcttgtcgatcttgcagctctggctctcggtgcacgtgtagtgcttgttgttctgcaccgtgcgcttgaagaagccctgcgggagctgagagtcagcgaggccccgcagcgcccgtctgccgcacccctgccgcgcgctcgccgctcaccttgcagctctcacacgtgagcagtccgtagtggtagccggacaccttgtccccgcacacggggcacagctcgtccaggtcctcgtcgtacgaatagtccatgcccgcggcgtccgcctgcggagggacagcgggtcagggagggccggcggagaccggcagcctggggtccccgcggccgccgccccagccgctgtcgccggcccgtcgcgtaatcccctctctgtgcccaggcgctgccgccggcacccaccgagcgccccgcgcagcgtcccggggtgggtccggtgcagtccccgcgcccggccttcccctgccaggccccacgctcccgccccgtccggggggctcctcccgcgcggaccccgtcgcgcccgatctggggccctcgggttcgatgcgcttcgattgggattcgtttgtctgagaacaaaaccccgattctgagaaaaagagatgggctcagccgcggggaagacgccaggggacccaggagcgctggggcgcccggcccgggtgttctgggaacccgacagagacgaaggaggcagagacagagtccgggggagccagagatgggaagaaactctggcgagagacaacgaccgacgccaccgggcgcagacacgaggccagtccgagagtgccagagacacagacactgagacgcccagctagagagaacccggcggggacgagacacagggagggatggagagagacagggagacagagagagagagagagagagagagagacgagagagagagagagagagagaaacgaggggtgggggattggatcagagactcggagagacagcggaggcccgaagagaaaacccaagagagactgacgcagagccagagacacaacgatagacgacagacagagacgccgagacgagaggagccccggagagacgaggccggggagctacagaaacacggagagaaaacctggaggcggaagcgcccagcccgagggtcggggacaggggacgcgcggaaacctgccgggcaggagcccaagcgccaaggcgaggccccgcagggtcggacccagacgggggcccgggccgcaggaggcggaaaacgacggcgccgggaccgagagcccgaaaacgcagagccgccgggaccccctccccgggggagacaaagccgcagcagcgacggcaacgggaggcgcagcccgagccgccgctgccaccgggacgtcgggcggggagacctcgggcgggggtcggcgggctccgggaagccgagcccgaggcgagggagcgacctcgggcggagaggcgaagtccggaggagggaagcgcgaagagccagggcccgggacgcgagagggggcgcgacggcggctgcggtcggcccggcgcccacctggtcgctcctgcgagcagcgccccgcgtcccgcccgcgcggagcccgcacctctcggccgcgccgccgccgccggcgaggagccgcacccgggcgcagcgccgcccgcccgcgatgacggccgctcgggccggggacggggaggcgggggcgcggggctggcggcgcgggggcctcggctcccccctcccgcctccccgccccccatcctgcctccctgttcccccccgcaccgccgccggggccgctccgaggcgcacctgggacccgggcccctcagccgccaccccgccctgcgccaacccgccgcgccggggccgggggccggcccctctatatcggcgcgtgcggtatccgggggcggaggcccggtcgtgtcctccccccaagcccggcccgcgccggcaccctctccgcagtccagctcgagtcttcgccctcatcctccaggccccccagccgcagcccggctccccggaccccgagcgcggccagagagctgcggagcccgagtgccccgcgatctgggcaggtatagggcagtgggggccttgggtcacccgcctgcagtgggaggaggcagctcctgtctgtgaacccagctgggtcgtggcgaatgccacgcgggtggctggtcgcactacagcgtggaagtgggtaagggcgagtggcgaccgtggccgaggctcggattcacgggtggaagccagattctcccatggggcccaccacatctcctcactcgagcctgtagcagctctctccccgtctcgggtcttcagttgccgcatctgtgaagtgggtagatgaccgctcttcctcgctaagggtgggtcgtgaggatgaacccaagcagtaggggcaaagcacgcgtgtggcctggcggaagcgctcagtggcgcccctctggggagatctggggcgaaccccttctgctcgctagcctcaggtcgctgggctggaaatgggactcgtggaaatcccattttacaaatgtccgaggcctggggggacccgaagcctctacgggcgcaggagctgggagaggagcccggaggcagggccccgctgctcccctcggagctctcacgggggggtggggcgaggaagaaagcgctgggcggtcttggggacaaaggggttcccgggcctatgggccaagcagttgctctgggctagggaccatccgcggggccactgtttttcagctggagaaacggacccgaaaggaaggggcctgcttgcatcctgcctccgcccccgctggcacctggggtcagagagagtttggggaccatgaggccaaaaagctgcgatcttcaagcaggaaaataccgcaattttgcattgacagcggcgcaacccaccaaaaggctccatctgggctcccgcccgcctggaggcctcgggcttcggttggagctgggcctggggcctgcaagttgtggccagagaaccccccgcgcagaccgcactcagctggctcacccacagaaggagcagaacccgcagactagctgtgcaagctcgggcaagtcacttctcctctctgaaacgagagcctcagttttctccgagcataaagtggaacatgttggctttacagatggggtactgcggtttccatgcaagaatcttggatgaggagggaagaaagagccagagaccctgttaatcgtaccccccgcacccccaaacccctgagaaacaagagcatctgcccgagctggaggtgggggtcactgccgcctctgaacagctccccaccacaatggagccctcagacagtgactgcaggagggaagggggttggtggatgatgggctggggtgccccagttggctgttctaaggtagagctcacccgaggtctcctggaaacctggagctggacacacaggccccagccgccggggttgggtgggggctgggctcaggcccttctccctctatctccaatcccctctccccaagggtttctactctcaccggctggaagcccatggctcctctgcactccaggctccgaggcacccacccccacaggttccaggttccagcccaccgcctggggagttccagcccctcatccacccacccagggagggaagcctagacctggcccggccgcagaacccaggctgacagatggatgccggagacagacacacggatacacagcaagactcagagagagccacagagacaacacagaaactcaggtgggggacagagccccaagacaggcccagagccctccagacacactcacagacctctaggctcagacccacacagcctggtggatgcctggccagagacagcgggacaccagcggacctccatggggcttgtggtcacaggcctggctcctcccatcggcagcccagggaagaagagggggtagcatggtgggagggtgagtctgggagacccctggcaccttccctgcccagagcagggggcaccggtcactaagtggagcaggcagtggccggcccaggctgcagggaggcactgcagaaggaggctggccattagaggcctgggccaaggccctcacttacgaagcggaagcagcgctctcacaccggatgagggtggcagtgggcaccaggggtccagggggaggctccggcagcccaggtgggacggtggcgactgtgggtgcgcagaaaccccctcacaccacggcgggcggcagccggacagcaggctggccctgtccgtccgtcctcctcctcctccccgccctggtgggggggccaccggaggcccaattggtctctgcccccacgtgactctgcaggcctctcgccttctttgttggtgtttctcttcatttacgtctattttttcttcttctcctaaaagaaaaaaaatacccctatctatctgggggctgagggtgggggcggaggccaaggcactgcagaggccttggccagctggctgttccaggcccgctgtgggagcccagaggcagggaccccacagaggcgggtaggcagccccgcttgttagaaaccgggtgggagtggggcttgatttatgggctgctcccccacccggcctgccgcctgctcctctctccttgtgaatggctacctccctggggcctggcctggcatggtctggcccagcccggacattggagtagagtcaggacaggccagtgcggaggcaaggccatggcgacttgactaggcggcctgctgcttccacctctttttcctcttccatcaggtggaagaagaggggggccggaaggggagcaggtgagcggcctggacacctggtgcgtgcatgccacggtggcctctgaatgtcctcatctgctgtgggctgctgatgttcccagtcgatggctggaaaaactgaggctgggctgagactgcctctgaggccaagtggtggctatagtggccccaggttgaaccaagtatgaagctagtccaggataggacagggtagcaggaaggggcccttatctagaaggctaggcctccctagacaacctgggacgtccccatccaatctctgggcccagatgggctctgaaatatcctgttcctgtagggcccgggttgcagggtgttgtgccgctcccacggtgactggatcttttgtgtgttcctctgtttgtctcacatttactgagcgcacacttaggggtcaggcactgttccaggcaccagggatcccataggaaagagaagaaaagt

SEQ ID NO: 12379 - DNA, 6000 bp, Homo sapiens
aagattccctctttatttctctgtctgaataatgcccacagtgagggggagaactgagagttaattgatataactgattattggatgactagatccctcctctagctacccttaatgctggggactcttggctgggcaataatgctcacagaagaaagtgaggcttttcttccacaaatagaatacagccagcaaggcgcagtggctcatgcctgtaatcccagcactttgagaggccaaggcaagaagatcatttgagcccaggagttcgagaccagcctgggcaacatgataagaccccatctctataaaaaataaaaaattatctgggcatggtgtcatatgcctgtagtcccagcaactcgggaggctgaagtgggaggattgcttcagcctgggaggtcaagactgcagtgagcagctgtgatcacaccactgctctccaacttgggcaacagagctgtctcaaaaagaaaaaggatataaccaggaaggttatggagtgctcccatctgagagggtcacagatcttctgcagtccacaccagctgaagtacaatccccttgttcttctcttttcataacactctattcctttcctctttatgttttagtaacacatcacaatatgttcctacatttgtatttatttgcttacttatttattgcctgcccatcctaccaaatgtaaactccaaaaaggcaggaacaaagtctgttatgctctcccttgtataccagtacctagcacagtgactggacatgataggtgctcagtaaatactaatgaaatgagtcagccttcaaataaatcaaacacagactgaataatatggttagttctatggtagatggagttaagcaaaagagtaggaaattcagtcccacttagggattctgggatcatttcctagaaaggaaaataactggtatgagtcttaaagaatatggaagcattacccagacaaaggtgagaagattgttttaggaaaacattatggcataaacaaaacctgccctgccactgcccatattcaagtgtgacagtcacagactcattctcaggcatgcaaacagctatgtcattctcagtcagacacacactcgtcagtcgcaaccaaatatataatcacagccacataaaaccttattggagaagaatggccacccaggtccagcccttatacacagctacttcgaaccaaataatcccagagtttaaaggactttaaggttatcccataagccacctccaatccttcttggaaaaaaggagggatatggataaatacacgggaaacacttatatgcacggttagtaaaaaagtggcgggggaatcgggaagattcatgggtatgattttgagaggcagatatttgggatgagggaaggaagagcattccagacaaaaggaaaaagaacataaaggcacaggggcaggaaggccctggggttgggggaactcagaggcctggtaggctgcagttctcagcatgagggtaccaggaggtaagactgaaaaagtggtttgagaacagactgcagaaggtcttaaatgtcacaataaggagtcaggattttattctctagaacacaagtcactgaaagttttgagcaggagtgaaatgaacagagtcatgccaacattccccacaaattttctgaaatctgaaatgcgtttctttccattcctgctatcatcacactagttcaagctatatcacctcacccccttctaatctgttacagttggtctcactgccccaggtctccccctcttctaatcctgaattctgtcactactgtataattatctccacacacacacacacacacacaaaaagtcaaggaccccaaattcaagtcctagtgccttaagacttagagctctccttaatctgattctacctttgcaactttatttcctgtatctcctttaagtgaacccctcattcttgtcgggtcagtatcttcttggtctctcaaacacgcccattcctatctttttctctttgctcaggatgcttggatctcctctcccactctgactatgaatatgacatctatcattaaagtcacaatacggtctcacttcctgtgtaaaagccttccctaaacacagcccacactgactcttcctcctctgagccactaaagttcttagtgtctgttccaggacacataatcatatcctttctcaaactttgtctgactgtaccagaacgatgcctcacctctccataaagggtggaagcccacccaagggctaggatcagatctcttcctgaacttttctcccccacaatatagcctactactggcacttaggaaagtcagtgttttaggattttggaggcagccaaagtcagtcttggcagcaagcacactaagagtcacaaaagtagagaagtaagaaagggtgacactagactcagaatgcctctgttcattttactcctgtggctcacaattcctgcctggttcctagggtttctttagggtcttgtgagagagaatttccagcgaagcacctcttccccctcctccttcagatttggctcaaatgatacctgaaaggcctctctgagggcctgggcctgttcccgggtgcgattgtcctgccagggccggcctgtagcacgtgtggggcctgcacggagactctccccaaagacatccaggtaaaagaagacataatccccattggtcagattctccctctgggcctgaagcaggatctcatgcagcatctccagagggccgcagatatacacaactgggagcaggtacatgacagaggagcaccctgagaaggtatccaggtcccccacacagccccctctctgaatcactgggatgtccctcttcagcaagaaagagagtgccctaacctatcaaccccaaagcagatgctccccagcccacccctcttggagtccaccataagtaccctggggccatatggaccatctggcagaagtcagagcctgtccagaccccagaggaagggagctgtcactctcaagcccctccctttcccagagcctcccttgctgctccccacccaaccggcctgctccctgactcttccctgcccttccctgggctcaaaggcacagacagcacagatttctcagtatgagctttatctgtctttcccaaatctgctgagccctgagtccgttcatggagccctcattatttttacaccaccaaggggtcttggcgcccagtctgggtggtagctctgatcacagacagggcacatttcagagtggctatcaatcacattcactactctagggcacaaacattgctcccgaaacttaatatcccctcattttcacattccaccttgatacaaggcttcacccctcatgctctcttcttccttgtttgcatctgcctagggtgttcacaagctcccatgatgaagccttggccctctcacaggtgctctgtccacgtgtgcttcttgatcccaaccaccacatacagctgctcaatgcctatctccatctacagttccccagtgctgagctttagggacacagcgaccctcctcccatgaccctaaaatagcccaggccacactcactgcgcccgttggcccggatgaagtgggtggcctgctcggggccccctggctctcgggcatacacctggtgctgcacactgaggttgctgccctgcagggcctcaaagacgccctcgatggtgaagtagtgaggccggtcatctgtgcgagcatccaggtacagcaaggcagcacgggcagtccaattgaagtgcccgtgtagtgtcaccacaaactcacccagcttgggagcagaggggccagtgcgaaccagggtacgataatggtcattcttagccgaaaaaccagaggccacagcacccgcagtcagcaggggaaggcgccagtgggaggcaaagcgggccacagaggcagcagggtacacgcaaccgggacctaacagcaggtcggggtcatggtacagcttgaggtccacagcgctcagcggtgccaggtactcagagcaggcgccttccagttcggagctgacaaaccgcaggtccacgggcagtgcccggcccagagcctccacagctagtgccacagcgggtcccacccgtggccaggcccaggcatagctcaggttgtgttctggcagcaccaccgccagcgtcaggttccgcgccccgggaggacgcaccccacctgccagggctgccaccaacagcagaagtgatggcagcgccatggggataaagcagcagccccaccgcccccagaacttggggctgctctggcctacaggggagacgcgagcaccccccagcctggagcctggggaagagggccaggaagaggaggagtaggctaggtaggctgggatgcagaaggtgctgggggccggggagaggagggggagatgggaggaaggcggggggcgggcaaggagtgggctaccagcctagggcaaggactgaggactgagaacggggtggcagggggagggagggaccgagggggcctgcggccaggatggggacagtgcgaggtgaagaagcctgataaatctaaagctgagaaggaaaaggggatctgggactgggatggggtgggggtggggggcgggtggtacaaagaaacggcctgggggaacctcacagctgaaagggccgggagggcaggagggcgctgcgccacataggaccaagggggtaaggtgggagggtgcccgcgccgcggaaggactgggatcatgggcaggcggggagcgaagcgaggcctgggccggagggcaggggaaggcaggggtaaatctccctgtgaaggattctcccggagctcctgcttggactaacgggcccgggcgctggtcccatccggagctacggcggccccgcccgtgtccccgctcctctctgctccgcttctcctgggccctggcggccggcgctgcccggcgcttcctcccgccccccgcctgggccccgcgcgcgccgctcgtccgggtcaggtcgcctcggcccggcccgtctccgctcgctgcgccggcggccgagtgcgactcccccgggcaggccgcccgcccccgcccctcccccgctgcctctcctcctccctcccggccccaccctccggcgccggctgccttcccccaccccccacccgggcgctcgggaccgccaggtcccaaacccaccccggtgagcacttgggggctccgcaccaaggcctcgccggccagcagggttcccgggcgctccctcactctcagggcctaccctggtctcccccacgcccctggtccccctgccgcccctccttccatttccatctcacacacgccagcgaccccagggtttgtcctctccccctcgctcagcccgttcttcttgggtctcccctctgaactccctgagtccctcagtggttccagtctccaggaagcagtcgaggatccccagacgtgtggtatcctcaccagccccctcacctagcaaaccatagcgccctcccgacggcagtgcggcttactccaccgcggaccatgcccgctccctggacgggcccctccagcagccaggggcccctgctgtacacttcccaccagtccttagaaagtccacgaggctccttcttgcttgggactcaactctcggccccccgctgtctccatgccccctgccctcctcgtgtcctcagaggcccaccgcagcccgcccggcttcctccgcaccatctgctcagtcagggcctcgattttcttttgtctcctgcacagcgcaggctggcgcctggggaaagcctgtaacggaccggcgggacactccccgcagtggaagcccatccacgctctcctggggttccaccttgctcccagcttcccttaggaagctctccctagggccctcatatctggagtgccaatctgaccccaagaacagcttgtgagggatgatctcatggtggctgagagggactgcta

SEQ ID NO: 12380 - DNA, 6000 bp, Homo sapiens
atttctttttaaactgtttgaataattacatttcttggaatgaagacagcttactgatgattacttaatgagcaattattaatggactactaacagagatgtccttccagcaatgttttttttaattgcgggaggtggaatgttggttagaaatatttaattggaacttgtggaggaaattaagagagagaacttgtttaggtaatctaaaggccctgccagcaggacattcagagctccatacttctgaagggctgccatacctctgagagcaagaagcctcttttctaaagtttagcacttggcaaaaattaactacctgcaaataatagaggaaaactagactttaaaaaagccaaacccaatccttgtttatagcaagtataaaaccagatttctaatccgccccagcgacaatcacctattgattgcgacgacatctgtgcccctgtttttggaagcagggttttccgtggaggcaggactgaaaaatccgaccatttccgcgcccctgtgtaataaacagcccacagatctttcaagaaggaaccctgaaacccacacctcggctcacttctttctcacctagtgatgggcccaattaaaggtcctccctttcgccttcagaagttattcctttcagtaatgaaatctacggagaagcctctctagaacttctgtggtaccctctcacagacaaaggatgaaaggctttgtgcgccaccaaatacaacctcctccgccccaggctagagtaagcaactgcgctgtgtccgggactcagttcagccgtggggcaggacaaggacgtcaaagatcagggactcttaacccctttctttccccgtagcttccctggggatagtctcttaaatgccctaggcgggggaggagtagggggtgggaataggtttgccggattggccccgagggagaccactgaatcccagatcacctttccgtcgctcaaagcgccctgattcaggacagttgtcagctgcaaactgtggagcccaggcgctaactaggaccacctgggaatggaaagcgcgcgcgtgtggatgagggaaatgcagtgggcccaccgtaaagcccaggtcaaaaatggcccctctcccaacatagggtgcttagtagccctgcacgagcgaaagctgattcttttcccgctttcacttctcaagttcactctcaagttcaactcccaactccacaagacgtcagagtagcctggatcttttctcaatcccattcttacggaacagcctctcatactgtggtagggcactgtccggggaaaatatgaagaggtagtaaggaaagacactaggggtcaggaaagggcaaccaggaatggcgatagagtgacctggtcatcttttaagcttacattttctccagcgcattcccctaaggccgcctgagagctgcctcaagttagaagttgtaaggggtcctagggcgcctggcgaggctggcgccctctttgataggtctgtgggcttaaactggttttctcaaggtgagcatgaggaccagcgcctggctttcaatccttccagcttctggagtcctcaaagcgaccgccgtggcgaaccaggacagtcatctgcaaactgctccttcaggagatgctagatcaagctacaacccatccccaccccgcgccgcactccttctacgatgtaaggagtgagcggattttatgccctaggtcctagtgctgggtccgagctgaggtggcgcatagtttacgacgttcagaaagtatgaacccagccacagggggaaagttagaagggaagaaggggagggacgaactggcagctctggactgggacgggggaaaccgaaagaatggatgggatggtgagatgggctagaaaaagaaaaacaaaagaccgggcgtctcttactaagccaaggttctctactctccaattgcccaagtatagtttcttgaaagaatttagacagtggagcgtgtaaccaacccccaaccgggacaatcagctggagccagcgcgcacacacacgggtgccccactcccagcgagccggccaatcaagaccatcccatcaggacgtccttgtttcttatctacagtcaaccccctcccccatggacagtctctctccgttccttcttctccttccctttcctgacacatcccagcgtccagccagcaaacccttgagtccaggctcggggctcaccgggtgcgggagggagtgggagtgagacccgctgcctcctggggtgctcctctaggggcgtagggggactgggtgggagaggatcactttcagtggaaggaggagaccagtgattgcatcccaactctcccaagtgctccctgcctagaccacctctctccgggtctgggatgcaagaaggtctggagctggccgttactaactttctgttgtcaagacccaggggtacgtgcgaaggatagagaagagcccccgattaaccgctgtgtggccaggaagagggactgggagtgggggtgggtgcccagagcttgcacagatccccatgtcaagcggacacccgcctggctcttcagtaaaagagtgaagaaaggccgagcacagcgcgaaggaaacctgaggtctccggcaaggcaggagaggagaccaagtgactccccgaaacccaccctccagcccttcgagaggcccagagtccagccggagcaagcgtaacgctacagtccctggcgcgcatccctgcagaccccagctcgccccggggtcccgccgccgccgccgccaccgcctgcgactgcgagggtcctggcccgagggtgcaccagcacctccttccactaccggccctttatctgacaaaagagccggagcccatgactctccgactgtgagcagtgtggcctttccaagcctccagaactttctcattacaacttttccggggtcgcactactccctgggccgcgcgggctcgggcacgaggacctggccagggcgcagcgccggcacgaaggcgcgcgccgcagaactgtttcctcagccgcgtgccggggaactaactgtttcctcagccgcgtccagcctcgcagcactgctcttctgcttgctactccagcgaagggacatgcctgctggccaggacgcttagtgggcctcgtaacctggcgagtgtgtgcccgcgcgtgtccaccctgcccccggccggtgcgccccgcgcgcccaaacccggccggcgaccactgcgcgccgggcgcttccaaactgctcctgtccagaggcatccctctttcggctttctccatcccgcgtccgcttccgcacccgagagcgacaagcaaaaaagattcagtgcaactcaaggactggtaagaaccaactagcctgtctcccctctccaaaaaagcgccctcccgcgtccctccagaactcccgaaagacatcaacaccttcccgcaactttctacgcccaggccatttgcagccccacctgcgagagcgaattcggggaactgcgcctgggcaacctctttccctttctgctgggtgccctcccctcccccatctccccgtctggctggagttggccggactcggggagcctcggtgcccgcagactcgcttacctcgcatggtgtggccgctctcccgctccgcgtagtcatgaagctgctcccagcccgaaccccggagagcccaaaaatcccgctcagcacgagtgaagaaggtggtcggcgaagagctgctctgccgagaaaaccatccctttaggcggacgccgtggctgcagggtgacgtttgccgccgccgccgctatgttaacagttttgatgttggtggtgactgttttgatgattgtttgtttgtttgtttgttttcaggaagggtgaaaaaaaaatgttctggctgtctggtgcctgggttttgttttggttttgtttttctttttctttctctccaatgtgcttgctttttaaaaaatgccaccgcctccggctcagaagatttcttttgtgatcacttggactgaggaggaggaggaagggcagcagcaggaggaggagttggtggtggttttgttagttacaaagaagagggagaaggaacaagggggaaaaaaggaaacagaaagaaaagaaagaaaggcggtgtggatggcagagcatgtgcgttttcacatgacatctgtgcctgttagcggatccacaatgtgaattttcactgttcagttacagggaggaagggagcagcgagagagaaagagaggggagagatggagagagagcgctgagaggggcttatacgcgagggcgggcttggccgcgacttccaggccccgcctgctgtcagcgcagccgccaatcagagcccagcagcgcctggagaggctgggaccgcggggaggggacgtggtggaggcggggggtggggcgggggctggggaccagggagtccgaggtggccggggctgcgacggggaattcgagactgtccgaactgggcagagaagaagggccgaccgggagagtcgggcagatccgcaggtgacaggcacttccgactccagcagagaaggggacactgatcacggaaaaccttcggaggcaagagacgcggggctccccgggtttcacgttcggtccctgtctcgcaacccccgcgggcccggcagagttagttttgaatttatggcagcgctttgccgagcgctatttgggtaaacttcggtctccggcgggggtttccgtgggcaggtggtttgggtgttggtggtagaataatgcaaacccactttcatcacttttagcacaactaaaatgcagtcccatggaagtagctgtccccttcctttaaaaacgtccgtcagatgctccctgaccctcttctaaaaaaaaaaaaaaaagaaagaaagaaagaaaaaaacgtgtatatgttcttttgtctgggaaattgatttttattagcatttggagactcccctggcgatggactacaggactgaaggagaacagctcaaattggcggtgtagccaccttactaattcaagagaaatggctgttgctagaaggtgtgattgcagggtgctctttagaaaggttttagaaggaagacattgttaactttagttagaggcgattggtaactgaacatagataaacttacttgtattccttaggtgaaaattgtcatctatgaccatttatttgtattttgataaaaatctaatacatatatccaaactgttcctttgcaagtttttccaactcagttgacaaaataagcatatagatgattacatctacttccttcccaatagtagggaacttcttaaatacttgagttaattgaacaccctaaaagattgggaggtgaaaatatttgcctcattcactcagtcttgaggctgggagatgtctactcattagcatacctgttggcacagcaggcctcatcatcatttaagtatccaaataatttgatttttgactggtatttattcatgatatgtcatgtaacacaaagtacaatgtagaattggcagttatttagttaattaggtcgctctacactgccaagtagttttttccttcctgattaaatgaaaaatgaattatctgctgaattttcaccagtattaaattgacgtagccctgctatatgccatcccatttgcaaaccaatgtgtaatttaggaaaattttagtattaagagtgaaagttgattgagtcattaattaaatgaaatgaacaaaaggaagttactgtttagaatagttattcctttataaatatctttctcctagatttgtaattgacacagtagttaatcttttaagataatatttaaggctccctggttttatcatttttaatcaagtaaaatatattcatcataactatgttaaagctgtacaaagttatgcctaatttagttgcttcattaaaaattactgaatataaaatagtcaagagacaaattgtgactatatcattttaattttgtt

SEQ ID NO: 12381 - DNA, 6000 bp, Homo sapiens
actgtacagaggcttctcaaaaaattaaaaataaaactaccatatgatccagcaatcccactactgggtatttatccaaaggaaaaaaaatcagtatatcaaagagatacctacagccccatgtttattgcagcagcattcacaatagccaagatatggaatcaacctaagtgtctgtcaatggatgactggataaagaaaatgtggtgtatatacacaatgaaataccgttcagccattaaaaaaaagaatgggtcaggcgcgatggctcatgcctataatcccagcactttgggaggtggaggcgggccgatcaggtcaggagatcgagaccatcctggctaacatggtgaaaccccgtctctactaaaaaatacaaaaaattagccaggcgtggtggcatgcacctgtattcccagctgctccggaggctgaggcaggagaatcgcttgaacccaggaggcggaggttgcggtgaacccagatctcaccactgcactccagcttgggcaacagagcgagactccgtctagggagaaaaaaaaaaaaaagaatgaaatcctgtcatttacaacaacatggatggaacatctagcctgtactcccagctactcaggaagccgaggtaggaggatcacttgagcccagaaattagaagccagcctgggcaatataatgagacctccatttctaaataaaaagggggaaaaaagttgatctcctggaggtagagagtagagtgatgggaaggggcaggaggggtgaagagaagttgattaatgggtacaaacatacagttagatagaaggaatacattattcatgtttaataacacagtgaggtagctatagttaacaataatttattgcatatttcaaaatagctagaagatctgaagtgctcctaacacaaagaaataataaatgtttgacatgatatatatcccaaataccctgatttgatcattacacattgtatgtatgtatcaaaacatcacatgtatcctataaatatgtaaaattattgtgtattaattgaaaaaagtaacataaaaataaaaaataaatatctagaaatagaattattaggtagacagatttttcaaggtttttaaaacatatatatagccatatcccacaaaaggttatgcctattatgttcctaccagaaacataacacaatgtccatttatccatattccaagcaatatacttagtattatcattcttagacatgtcattggtgaaaaaaatgatgtctcattattgctttactttgcattccttaaattactaacagggtggatttatcagccatttgcatttcttttttttttttctttttttttgttttgagacggagtctcactcttttgcccaggctggagtgaagtggtgcgatctcagctcactgcaacctccgccccttaggttcaagtgactctcctgcctcagcctcccaagtagctgggattacaggcacgtgccaccacgcccagctaatttttgtatttttagtagagacggggtttcaccatgttggccaggctggtctcgaactcccgacctcaggtgatccacctgcctcggcctcccaaagtgctaggattacaagtgtgaggcaccatgcccagctgcatttcttctttttttaatttttaatttttgtgggtatatattagtagtaggtatatatttatgggatatttgagttattttgatacaggcatacaatgtgtaataatcacattagggtaaatgaggtatccatcacctcaagcatttattctttgtgttgcaaacaatccagttatactcttttagttatttttaaatatacaattgaattattatagtcaccctgttcggctatcaagtactatattttattcatcctctatcactatttttttgtactcattgcatttcttctttcatgaattgcctgttcatgtcatatgcatctgtttttactacaggggatgtctttctcttattaactcataaaaggctattacatgttaaatgtatcaattatttgtctaacattaacatttcccaatctatcacactgcctcttttcttttcttctataccacaaagagattatctttatatctaccatcattcctatcaaaatgttttttgaacacacctgttgttcaatagatgctgcctgaactaaaatatttcttcacacgtcccttctatacaattgctaatcctatcactctagtcaaatagcacaatatgcatagccatgataatggagcttcaattagtctacctttagactctttccctccaaaatggaatataaactataaaaacataaactgtattataaacgaatagcataaccacactgaaagaagtgaggaagaaaaattatctaagccactttagaaaacaatattttaactgaatactataagcctagagacaaaaagaactacactgtactctatttagtaaatgtgtttctcacaggaacataggtcagaaatcctgaaattactttatgtgtatactaggactgaagaaataagaaaatattttgtagaatgccaagagtcagatttctcactgtcagataaaaagttaaaaataagggacaaaactagaatgaaccctgtggtgttagactagaagcaaagctactgggatgaacttttgtttttaaaaagtatatggatagacaaatacagaaataaacatagatctttgtgtatgcatgggtatgcatatgtatagactggtgtcttctgtggggccctggaagcaatgttaccccagtagcaatgagcatccctagagcacagatctttgtgtttaaatactattctccaaaaaaagaaactacgggtcgttggagaagtggctgactatcagggctgaggcacagaaaacacaagatgagcctggggcatcctatggtaccagaaaattaggaagttccaaaaaagaaaaaaaaggatggaagcatgctgaaaagctacagaaagcaacctgaaagaaaactcccaatgatcaaagctggaacaatttcaaacataaaataacacaagtgtaggataacaaccaatagaaaaacatctaagtccacatggatacaaataaataacggaatacaaataaacaaatgggaaatgggcagctcatccttacagaataatttcaattaataaagaaatgaggaaagtagaaaatcatcattagaacaccatagtcataataattgctgaaggcaagatccaccaatggatgtgaaatttagcaagggaaagtctgaggagaaacaggatatgcgtacggtttaaaagctcccccccaagatgtcaattataaggagaaaaataagacctttacattggagaatcccagcagacactctctaccaagtgatcaagattaacctcacgagcaataagtcatatatatcagctatgctcatatgatgaactgagaagggcacacacacttttgtgttcttaacaaaaatgtataaccttaatctaatcatgagagaacactggacaaaccccatttgaggggcactctacaaaataactgaccagcattcttcaaaagtgtaaagatcagaaagagtataaagacagaaaaagactatcagtgtaaagacaggaaaagacagaggaactgtcacagactggaggagaccaaggacccaagacaactaactgcaatgtcgggtcttagagtggatcctagaatagaaaaaggacattaatacaggaaaaaaaatcacaagttagtaattcagttaatagtattatactaatattaacttcttgcttttgataattgcgctatggtatgtaaaaaattattaatggaggcaatagggaactctgtattacttttgaaacttttctgtaattttaaaattatttcaaaataaaaaagttttttagtataagaggatgtttcacgtaagacaggtaaaaacatttagaagtcaaagaactgccatcgtattcactgcattaatacttggagagaggggtgccaggactgtgccaggtgctttacaaactttatcatgtagtgcttacaactaatatgagatgggtaccataatactcatgtttcccagtaagttacttaggaggttattaataagtgaaagaccccatttctcaggaaacccagcccccaaaagtgacgaacaccttccatcggcccagagctcccacttttcaggatactagtggcgcccgatttcttccggcccgccgcttaatgtttctgacttatggaagagataccgaatttggagagaaaagtcaaagtaaagtctcctctctgaacctcggttagctaaaaggagggagccaaggtgtgggaccttctgccaaccacctctgggtttggcgagcaggggcttccggcctctcgctcccagtcctccgagcctcactaccatcgagcgtcgcgtcattcctcgcagtgtcacccacagcacacctgggccacacacaccaaacgcccccaccagcgaacggatgcgcgggtctgtcccgggacccagacgccagcgaccctggcgacccggggcctacagcgcgccagagacaggacgcgcgccggaaacttttccaccccgcgaccccgggaggccgtcctgctcgcatcgtctgcggcctccctataccagcttccaataaagcttccaaaaacgaaaccaagcgaggctccgccacttctgaaaaacaggaggagccaccatggcgctcgcacttcggatccaatgccctacttgccgcccagcgcctcttgcgcgcgccacacgggcgccaggcccaccaagcctgtgagggcccgacgcccccaaaggcggcctccagagagccccttacctcccgccggggcgctcgaggccggtcggtgggcacggcgcaggcgcaggagcgacggggcggggcatcacgaggggtgggcagggttgggccccgcccccgcccccgcccccgccccgcagggcccccaggccgggcgctgggggcgcacaggtgagtacaaatgcggacgctgctgagaacagcgaaagcctttttcaaaagtgatattgatttacgttatggggttgtgactcgagccaagaggagagagacgcacaaacgctctttaggtctgcttgttgtgtttaagacaattcatgcttgtatggccgactgcatttcgcagttttcctgtccgttttcctctgttcttcctagaattttatttgcgggttgggcatgtattcttagctctgttttgaaactgaagctcagaaaggtggtgcctccccatcccgtccccaaaagccctgtgaagtggacagggcaggagtgccatcttaattgcaacaggtgtaaaaattaaagctcagcaaattgtggtttcctccaaaaactggtggagggcttaaggcaaacgtctttatcccgattttatagattatgactctggggtttaacaaagagttttaagtgactcactccagttcagccagcttatggcagagctggaactccaactgggtgtcctaatttccttcccaagttattccagttagaccagctgcaaccacatgaacaagcaggtggccggctttgaagccttgtccaagtcacaggtcctcctctcttcatggcctaacttccagatccagcccttttaaaaagatgtctgtgaatattcagatgacgtgcttagaatgtattcactaatggcattgtctcagaagtgatcaggatgttcaaaccacagttaaggaaactgagttcttagggtcttccagtagagtaggaggtaaacagggaagattaggggcctgtagatcctttaaaaagccttgaaagacaatttctaaaacaaagcaccaaatctaccaagcaatttggattttctttggggacataatgtatactgatatttgttttacaatgagctccagaatgtatttatcaaattttgattctaaggagaaaaatta

SEQ ID NO: 12382 - DNA, 6000 bp, Homo sapiens
tggcccggccccagccccgctggtctcccatgctgctccctgctcacgccatcttgctcagcttggtcctactctacagaagacccctgcggtcaccaccttcccccgccagccccagccccactcacgtcctggcctccttcccaccatacacttgctgggcctccttctcgttgagcatgagccagtacttattgccgaactcggtcacctccttgccctgctcgttcacagccttcatggctgggtagtaggtgatgatctcttccaggggctgccttcggagagagccacaatatcaccccaactccttccccctccgtcccctgtggccgaccaaccccgctgccccagcctcagagtggagccaggaccaacaaaggctctccggactcttgcagtaagagggatttggagtagatgccagggctacctccccaagagagggaggtgtggggaggacaaagtagggggcttggaggaggacggccacgggctactctggaaaatcatttttttttttttttgagacggagtctcgctctgtcacccaggctggagtgcagtggcacgatcttggctcaccgcaaccctctgcctcccgggttcaagcgattctcctgcctcagcctcctgagtagctgggactacaggcactcgccactatgcctggctaatttttgtatttttagtagagatggagcttcgccatgttggccaggctggtctggaactcctgacctcaggtgatctgcctgcctcggcctcccaaagtgctgggattacaggtgcgagccactctgtactctggaaatctaagcagcagctccacgtgctcccaggagggaactcaggggaggcctccctggaggaagccaccaaaagcaatggccacctggtctccgaggggctccttaccccgacaccaggtaggtcttgagggcgctgatgatgacagaggagtcatttagttgttgctggaagagaaaagggtggtttaatcagaggttgcaacccagccgctgggagtcaccaggggctctttaacaagacactctgggcattgtttatccattcctggggacatgcccggagtcctccccgccctgccctcagggcacccatcctaagtagggagacgtggttgtggccaatggggaggaaggtgtgggaaagccgtggggtctaagccccagcccactcacccatttggcctcccaggtagaggggcagggtgggttctggaagctacatactagaccccaagcactgtgccaggcatttcatatctgccgtccctgcaagccagaatatggtcccttgttgactcatgaagcaagcaagcgcagagaggctaagtgacttgccccaagtcacacagctagtgagtgggtgaatcacacctcaaacccagatcgctgatttcagaatctatgttgttaagctgtggtgttctgcctccctgagacccagcaggtgtttggttttggtacggaaggagagagcctacatttattgagcatctaccgtatgcagctacttcccccatagtccttacaggcacaaggatcacaagttccttcccaggctgcagagccaggccaggctagggggcgctccaggacaacccaggaaaggaggaaggatgcagggggttccctggggctcaccgagctttctccttcctgggccaccaggatgggcacctttctgtaggaggagaacttgatctcagccctgcgcacagggttcacctccaccacctggtagggcagggcatggaagtcgaggaaggctcggaccttgctgcagaagggacacgtcttgtactggtacagggtcagctgcaggcggctggacagggagagctgcgggcagcagacggaaaaggcttctagacctggcacccccaggcccaggccctgcccccaagggtgttttccagaggagtcttctgaaatgacgctagaacatcgggaagaggaactagagatggaagggggcggtaggggaaagggaggcactggacagcagcccaggtttaagcccctggccagcacggtccccaagcaggagtcccaccctttgctgcgaggttgtgtaggaggaatcttctagtctctgtcccatactggacagacccctcttttctcactccagtcccaaggggacaccagacagccccagggtatacaccccactcccacagacatggaacaactgtttcaacttgacttgttcactctcactcctctaaccccagggacctctgggggcagagctgggctaccacccaggctcatgttcaccagtggggtctacctccaatctctttcttgtttttttctctggagacagggtctcactctgccatccaagctggagtgcagtagcttgatcacagctcactgcagccttgaactccggggttcatgtgatcctccagccaaagtctatctcaaatatccgagggggagggtggtatctgagccaaggcctgcgtgtggcaagctccgcaggaaagcccccaggggagcctgctgcacgttcatgccgggaagccacaactgtagaccatccccctgtgttcagaggggaagctggaccgtggaggcaggaagggagacacagagtactccatgccctttttacccacctctgttccctctggtccagcaaataagcatctgtgggcgggtggtgggaagtcaagtaatgaagagttgcaaggtgtggggtaggtataaagtgtctcaaggcagctgggccaccacttagggggtcaccacttggggggggcacctttctacctcttcctgtttcagcctggagtctaagtcatcagttccataaaggtaccaccactactactaaataaatacacagccttaggatttgggggcagtggggagagaggatgatgaacgtttggaaagtgaaaaaggctttccctttcctgtgatctcccatctcttaatcaaaaaagtcttaaaacacggtagaggctgggctccgtggctcacacctgtaatcccagcactttgggaggccgaggcgggtggctcatttgaggtcaggagttcgagaccagcttggccaacatggtgagacccccgtctctagtaaaaatacaaaaattagccgggctgggtggcaggcgcctgtaatcccagctactggggaggctgaggcaggagaattgcttgaacccaggaggcggaggttgcagtgaaccgagatcgcgccactgcactccagcctgggcaacagagcaaaaaaaaactccgtctcaaaaaaaaaaagtctccttaaaacatggtaaaggctgggcgcagtggctcacgcctgtgatcccagcactttcagaggccaaggtgggcggatcacttgaggccaggagttcgagaccagcctgggcgacatggtgaaaccctatctctacaaaaaatacaaaaattagcagggcgcagtggggtgagcctatagtcccagctactcgggaggctgaggcaggaggatcccttcaacctgggaggcagaggctgcagtgagccgcgatcgcactccagcctgggcgataatgcgagaccctgtctcgaaaacataaataaacaaaccaaaaaaaaaaaaaaaaaaaaaaccacggtagaagaacgattttatgagaactcgaacaattccaggtagtaggcatcaggagtgcccctattttacacaaaagaatacagagggttcggagacttcagaccaagtcactcgcccaaggtcacaagcaggcagaggcaactcctgaccctgcgggttcccaggagtcccgagttcggcgctgatcagcatccccatccccggccgggccaggccttacctgcgcggctgagcgctctgcgtggaggtcctgggcgcgcaggtgccaccgcgccgtgtggtacagccccagggctccccccagggccagcgccgcagctcccagcagccgcgggctccccttacgagctgcagccacggggctcgggccgcccgccgcccccgcgaagccagcccggctctgcgtgggtagcagcggctgggggcggcctcccagcctccaggccaaggcgcacccaccaggccacagcgcccgcaccacccgcgcagccgggtccatgttcgctccgccggcgccgcgggcgggcgcgcgaaacgaagacgccgaggcacgcgcggcgtttaaagggccaggactctggcgccccgcgggttggccggggtgagggcgacgctaagggaaccctcagcgctctcgggactgggcgtgtgcccggcgcccaagttcgaaacgcccgccagagccgcagaggcccgctcgggaacgtttgcagaccgttccatgcttccgcctccaaaggctcttgggtagtgacccggccgactgcaggggggcgaacgtctcctcgccccaccttgaccgcctaaagggcggcgtggccgtctgtaacacgtacttgcccacctctcttacgggcgcccattcaaaacaactccagcccttcctagagtcagtacaggcgccgcgacttccggccactgaaagccccggaaacgacccgacccggcaccaggtgttgcggttctctctgccctcccgcctcattgtccgcttcctactgtgacccgaaccataaaattttcccgaacccgaaggggccttggaaaccacgtgtctctgatttcgcccacgcgaagcggccggcccgccgaccccgagatttccagggagaggatggcaaagtggggtgccaggctgctcggtccttctgctgggctcccccgccctagctgaagcccggagcctccaccgcataggcgtctccgcggacagccccgggatggccccgcccggcgcccgagagggggcgggactcgcagagtgggcggggagaggggcggggcgaggggggagctctgagtcccggctctgctgctccgccgcgtcccactcttctcgctccgctttcgccccgcatcttccaccttccttccagtccttgcggcgaccgagcccgcagtgtcagtccccagcggggacctgagtatgccggtgaagacgagagcggaaggcgaggacgacggcttcggggaagcgggtgacccgaggagactgctggagcgaccttggcgtttccgggggtgccttcccgggaaggggaatcgggatgttggcttcgaagggaccgaagggcccacctcgacccgccccgagtgggtttggagttgtaggtgctgtctcggatgcagggcgagcacccgcgagcgggtaaccagtcccgtgagagctgcaggtccccagccccgttttacagatagggaaactgaggcagctgctgggacactcgcccatatgggttttgctccacccacttccttcagccactttacagaccaggagttgagggactgctcgagcttagagtgtttaggggtggttgagggtgacccccatgttctgtgctctactctatccctatccaggccttctcccagcgccactctcacgctcctgcttgctagctcctgcttgctagctcctgctcctcccagcttcatcctcctcctgtttacattaattgctcctgatcttccacactcttgattttccggattctaactccatcaaaatgtaacttgatgtgttcaggccccggggacacctaggcacttgaggggggcgggtccgtgtttggcctgctgggcttagtaggagggtctggcccggggcggggagcgcgatgctctgctgggtcagcatctccagccacctggctttgctggtgtggcctcgcagccttgccaaatgtgagcagcttacagagcaaccagttgcacgtgcttaagctgccgaggtgacacagggcgctgtagggtccagccccacagggtcggtaggtctctccctgtgtgcggcgacgagagagtgtagaaataaagacacaagacaaagagacgagaaaaggcagctgggcc

SEQ ID NO: 12383 - DNA, 6000 bp, Homo sapiens
cttcttggggagcagagatgcccagagctaggaatccagagttccaggttctggtcctggctctgtgagcaacttgctctctggtctcaggccagggcctttccttcctctgggcctgtttcctcccatgtccagtaagggggccagactagggccttcaggggcccttcctgtttgggcatgcttggcaggcactcagaccttcagaacaactgccaaatctaaaaccttagctgaggtttggcccagaggctacaaactggggaacacaggctgattctagcccacagacgcattttgtctgggcctcagcattttttttttttttttgagacagagtctcactctgtcacccaggctggagtgcagtggcaagatctcagctcattgcgacctccgcctcccgggttcaagcaattctctccctcagtatccagagtagctgggattacaggcgcctgccaccacacccggctaatttttgtatttttagtagagacagggtttcaccatctttgccaggctggtcttgaactcctgacctagtgatccacccgccttggcctcccatagtgctgggattacaggcgtgagccaccgcgcctggccaggcctcagcatttaagaaaaaacttgaagattccacataataatccaggttcctaagcttcctcgaatgagcatgcaattgacaacacggggcctacactctagcatggtggctactggctggagctcccttagaggctcagtgtggtcccctgttgtcgttcactgcgttacctgattggccttggcagtcatttgagtttgtgaccctgatgtagcctatcccccaactatatacatggacaacccaaggcccagaggatagagccctttcccaaggccaccctgggagtccgtggggcaaagctggtgctctttcaccaacattttgctgcttccttttgcaagcaataggagggagcctaagagaagggaagcgtctccattgagtcccaaagaaatgtctcaatactctcctctgagggaaaggacatggcagtgattctcaagcagaagcttcgctccctggagctctgctcccggcttctggccttggtggaccaaagctctcacctcctctgatgtcctcccaagcttggggagaaagggagaaccttgtccagcctcaggaatcttgctgtgctatcttcctagtgacggaaaatgtttatccattcactatctgtgtagtgtacaattctgggagggacacagtgcagatggactcccaaatctactgatttcctgctccttgtcagtgccctgtgctagccttgggggatggggtggggagtgaggcagtgccggagcctgtcttcccagccagagagcaaggctgcagcgtgggcccctcatacagtcattttacctctcaggaaactcccccagcccctgtggatctttcctaccttaggaaaagacaaacacaggtttggataggattagaacatggaaaggtcttaagaagggccccttgatgaggtcctggtgctgttcagcccatctttctctatggacaccactcagtgggacaccagaggcggggtggggttggctaaaacaagatccagcccaagcaggatctgatcctccctcaaccctgccaaagttgacccacctctcccttcagtaattcctagccctctgctctttccctcaggagttctccacctccaagtgaagccaggagagcaaaggtcactctggtttccaagtggtttgcccagcttttcggcttttcactaagatgaggactggtctttggtaaaaatgactccctttctgactgcttatcaagggtgggctctaggctggaccctcacaacaccccgcgaggtgtgggctgtcattactcccatctgcaagagaattgaggttcagcctggctaagtgactcacccaaggtcacaaagttgtttttttgttttgttttgttttgttttgagacggagtttcgctcttgttgcccagactggagtgcaatggcgcgatctcagctcacttcaacctccgtctcccaggttcaagtgattctcctgcctcagcctctctagtaggtgggattacaggcatatgccaccacgcctggctaattttgtatttttagtagagacagtgtttctccatgttggtcaggctggtctcgatctcccgacctcaggtgatccacctgcctcggcctcccaaagtgctgggattacaggcatgagccaccacgcctggccattcaaggtcacaaagttagtaagaagctgtgcagccaaggattctgaccagattagtttgacccagagactaaagtgttaaccattatgctttactccctccagtgtccactctggcctcctccgaggctgcagggcgaaagagggggctctatagcacactcaggttctttgagttgctggactatcccttaagactcttttctttttaaatatcagcaaggctgggatggtggctcacgcctgtaatctcaacactttgggaggccaaggtgggcagatcacctgaggtcgggagatcgagaccagcctgaccaacatggagaaaccctgtctctactcaaaatacaaaattagctgggcatggtggcgcatgcctgtaatcccagctactcaggaggctgggacaggagaatcgcttgaacctgggaggtggaggttgcggtgagccgagatcgcgccattgcactccaacctgggcaacaagagcaaaactgtctcaaaaaaaaataaaaaaaaaaatatatcagcaaaactagaactaggagagctttgctttttattttaaatctgaatcaactgaaaaatcaaatctgcttttcacaccttggctcttcatgcccaagtagctgtctgctgtggggactgttcaccctccccatgtctgtttcctccgtcactgctgctgcactgtaacagctaggccatcagcaatatcaggaggtagagaggcagaaggagattgtctatctgtgtagtgtatgcttccaggagggacacagtgctgatggaccccaaaatccaagcataactgtagtttaggtccactccactgtcaaagattaagatcagagctacagaaatgatctgcgcaaatatagatgtcatggtcccctcaaaagtctttttggttccaggccagcggatctcccccatggtgctaccgaagatggaggccacagtatcacccacacccacagccaggacaccggcataggggacgagggccctggctcctcccaggctacccttctgtgtgcagggtctggggatcagccagatgggaagagacatgcccaggagcaggtagatgtgtgtcagaatgagtggtccactgtctcgttcatccagaaaaagggacaggaagctccgtagagtgtgacccaaaggcttgatgcggaagtagcgcacatactccaggaagatgaagaccgccaggcatacagtggcggctacatagagcagtggccggtcaaagatgatacctgggatgtaggtggctaccacaatgaggtggaaatactttcgggcgatggtgggggcctggtgcttcttggactcggaagatgaccgcttggcattctggtacagcaccaccaggcaggccaaggtggccagcagagaccaataggctaggaggtagatgcgggtgtctgtctggaagagaaactgaagaagccagagcaggggattcctgcggatgagccggtgcagccagggtaggaccacaccaaggctcagcacacaggtcatgaggtggaagaagatggaggaggcccaggtgcctgagtccatgaagacaaacagagtgctgaagaaaatgcccatgagtaccatccctactaccaccaccagcaggaagaagtccactgggtccccctgactttccaccagtgtcagagagcgcttgatgagctggttgaggacaaagctaatgccacccaataccagcagtgcctcaccaggggtgaagcagcggggcagcaggtacagcaggatcatgttgagataaacgaagatcagaaggacttccaggacttcgatcacctcccccacgctcaacgagtgcttcatgatataaatgataacacctccagccaagcccaagatgacacaagtgttggttggcactgggcgagtgatgccgagcgccaacactgatgagaagagggccactgccatgccagtggctgccaccacaatgccaaaacgctcaaagaacgggttcccagcagtctggcaccgctccttcatgactagtccaagcaaaggcatgaccatggaggcgggcaataggccactgtttgcggacattcggaactggaagacggcgcttccctgctgtagcagccggtcccacttgtattggacgtagaaggcctgcactgcgagggccacggcgcaccacgagtatcggtcccatacggttgcgtggatgctcagcaccactgcaaacactactgccgcctctgccagcaccgatccactcagcggagccccaggccccggggccggagatgggcactctcgggtcatatctctagacctggggcttcacggaggccggggcgactacggacgccctagacttcgggcccctcagccccgtcaagcagagggaggcactttcacccggccagcaaccttctccctccgttctccagcagcgaggagggaactccaccgcaggtcacttctgcggcctgggagctggcgcccggccaccccccacagcctccaacctacggcgtagacgtcgccactctgcagccttcctcacagttacagccgcccccgctgccggctcctcacctctttgggcctcgccatcttggcaccgccccgcggcaacgtcacgtgacgaaatccccgcccacgctccgggtccgggggcgagcggtcacgtgggcatggcgtctgggggcggggttagggcgagcgggcgcgcgaagatggcggcggccgccggcgggccgtgtgtgaggtgcggagcgggtcgaatggaccggggtggctgtgaagcgcggtgtcaaagccgagcggaagcggggcgggaattggaggcgggatgtggcgacagtggcagggccaaccccggctggatggacgggcaccgagacgggaggcggttacgtccaaacggtccccgcgcgcggggatctgaagagtcttcttcaggaggggggccggctcttcaccccttccctccgcgctcggcctcccatctcctcacccagggccctttgccttcctcctctctcacctccgacgcgtctcttggcgccccacccgcgcttccttctccggccgtgacgctccctcgagccacggggagctttgcggtctcctggggtaccccccacccacgtccctgctgcaggctcccagtgtcctgccccggcgtcgagtgcgccctgctggctccccgacctctcccgcgatctgttcttgttaggattttgtttcgcgttgagcggagccacgcttgcggcttctgtcctctccgcgcctcgtatcgttcttttcttgcactgaatcaagtcagccagcatgtccaaatcctccaagagatttcagggattgaactaggctttagggacaagaagatgaaatattatatacgaaaactacaattctgacaaagtgctttctagcgtcagaccctggtggagcgcttcccaggagttatctcattcaattctcgcaactccgagaggcgccttctatttcacagatgactcagaagtccggctcagagctagccaagtgataaagagagccttcaagctgaagtctgcgtacctccagtgctataaccagaccaccacgcctccttctgtcttccacattgcagctcgaaggtcttcgttcttcccaccaccctccctcaaagttaaacatccccgtctcttatccttccctgtgccagcagtgttttccccacttt

SEQ ID NO: 12384 - DNA, 6000 bp, Homo sapiens
atggagtttcaccatgttggctaggctgatctcgaactccccacctcaagtgatctgcctgccttggcctcccaaagtgctgggattacaggcgtgagccaaggcacccgaccgcaaatgcagttttttgtgctttcttttttttttttttttttgagacggagtctcactctgttacccaggatggagtgcagtggcgcaatcttggctcactgcaacctccgcctcctgggttcaagcaattctcctacctcagcctcctgagcagatgggactacaggcgcacgccaccatgccagtcagttttttttgtatttttagtagagatggggtttcaccatattgtccaagctggtcttgaactcctgaactcgtgatctgcccatgtcagcaaagtgcagggattacaggtgtgagccactgcgcccggcccaaatgcagttttattaataatcagactcggccaggcatggtggctcaggcctgtaatcctagcactttgggaggccgaagcgggcggatcccctagggttgggagttggagaccagcctgaccaacatggagaaaccctgtctctactaaaaaatacaaaattagctgggcgtggtggtgtatgcctgtaatcccagctactcgggaggctgaggcaggagaatcacttgaacctgggaggcagaggttgtggtgagccgagattgcaccaatgcactctagccaggacaacaagcacgaaactccgtctcaaaaaaaaaaaaaaaaaatcagattccagaatcacactaagtattacacattcctttgagtgtttttaatatgcatttttccccagagttgaaatcattttgaatacagaattctgtaaccttcttttctttgcttaacattataacataatgacttaaccttattatgaaagtcttgataaacatactttcaagttgctgcataatacttgtatcaagttggtagatcataattcatttaccattcctctaatgtttgatatacttaagctgactgtaattatttaataatataaatgatgttgtggtgaagttttctttgttgttttttgagacagggtcctgttctgtcacccaggctggagtgcagtgatgcaatcatggctcactgcaggcttgatatcctgagcttaagcgatctttccaccacagcctcctgagtagctggaactactaatacaagcatatgccaccaagcctgacttttttttttttttttttttgagatggagtctcgctttgtcacccaggctggagtacagttgcgcgatctcgactcactgcaacctccacttccgggttcaagcgaatctcctgcctcagcctcccgagtagctgggattacaggcatgcaccaccacaccgggctaattttgtatttttagtagagacggggtttctccatgttgaggctggtcacgaactcctgacctcaggtgatccgcccgcctcggcctcccaaagtgctgggattacaggcgtgagccaccatgcctggccaagaatctttcttaggttgaggtagaagaatggtatttgcacccctactctcagcagccaagcaatgaacacaggtatcttttcataaaaggaatcaatgaaatacaaaggtagatttaaaagacttcagcagctaggctaggtagtctcatttcagcaaagaagtagggaatgcgtaatgtttataaagctttttgcttttttgagctggggtctcgatgtgtctcccaggctagagttcactgcagcctcaacctcccaggatcaagcaatcctcccaccttggactcctaagtagctgggactacagacatgcaccaccatgcctggctaattttttaaaaaattttttgtagagacggggtcttgctatcttgccagggttggccttgagcttgtgcactcaattgatccttctgccttggccttccaaagtgctggggttacaggcatgagccactgcatctgaccacgtttataaagttttaggaacaaaaaaaaagtgtttataccaggcacagtggctcatgcctgcaatccaagcactttgggagactgaggtgggcagatcacctgaggccaggaattcaagaccagcctggccaacatggtgaaaccccatctctactaaaaatacaaaaattagccgggcgtggtggcatgcatctgtaatccccagctccttgagaggctaaggcaggaatcacttgaacccaggagacagaggttgcagtgagccaagatcgtgccactgcactccaacctgggcgagagccagactctgtctcaacaacaacaaaaaaacgtagccgggtgtggtggctcatgcctgtaatcccagcactttgggaggctgaggcaggcagatcacctgaggtcgggagttcaagaccgacctggccaacatggcaaaaccctgtctctactaaaaatataaaaatcagcagggcgtggtggtgggcacctctaatcccagctactggggaggctgaggcaggagaatcacttgaacccaggtggcagaggttgaagtgagccaagatcgagctacttacactccagcctgggagcaagacacccccctcaaaaaaaaaaaaaaaaaaaaaaaaagtggccgtcacgcctgttatcccaggactttgagatgccaaggcaagtagatcacctgaggtcaggagttcaacaccagcctggccaacatggtgaaaccctgtctccactaaaaatacaaaaattagccaggtgtggtggcatgcacctgtaatctcagctactcgggaggctgtggcaggaaaatcgcttgaactcgggaggcggaggttgcagtgagctgggatcatgctgttacactccagcctgggtaacaagagtgaaactccatctcaaaataaataaataggccaggtgtggtggctcacgcctataatcacagcaatttgggaggccaaggagggcagatcacctaaggtcgggagttggagaccagcctgaccaaaatggaaaaaccccatctctactaaaaatacaaaattagtcgggcgtggtggtgcatgcctgtaatcccagctactcgagaagctgaggcaggagaatcgcttgaacctgggaggcggaggttgcggtgagccgagatcacgccattgcactccagcctgggaaacaagagcgaaactctgtctctaaataaataaatgtgtttacttcctacatttaaaaaaaggttttttttggtaacaaaagctacacaaagaacccagagaacccactcaagaacaccaccacttaccagctctctcagagctgaccttccaagcagaatagtccacagttctctactgctcctgcaaaatgagagaacagaggtaattttgctctttctgatcatacaaacttgtacactgcctcatagccattttgtctgctctctaaaagcaaaaaatctcaatatacaaaacgatttgttaaatttttggaaagtaatcttgttatataataatattgttagggccgggcacggtggctcatgcctgtaatcccagcactttgggaggtcgaggcgggcggatcatgaggtcagaagatcgagaccatcctggctaacacagtgaaaccctgtctctactgaaaatacaaaaaattagccaggcgttgtggcgggtgcctgtatccccagctacttgggaggctgaggcaggagaatggcatgaacccgggagacagagcttgcagtgagccgagatcgtgccattgcactccagcctgggcgacagagcgagactccgtctcaaaaaaaaaaaaaaaaaaaaaaaaaaaaaaaagtggggaaaacactgctggcacagggaaggataagagacggggatgtttaactttgagggagggtggtgggaagaacgaagaccttcgagctgcaatgtggaagacagaaggaggcgtggtggtctggttatagcactggaggtacgcagacttcagcttgaaggctctctttatcacttggctagctctgagccggacttctgagtcatctgtgaaatagaaggcgcctctcggagttgcgagaattgaatgagataactcctgggaagcgctccaccagggtctgacgctagaaagcactttgtcagaattgtagttttcgtatataatatttcatcttcttgtccctaaagcctagttcaatccctgaaatctcttggaggatttggacatgctggctgacttgattcagtgcaagaaaagaacgatacgaggcgcggagaggacagaagccgcaagcgtggctccgctcaacgcgaaacaaaatcctaacaagaacagatcgcgggagaggtcggggagccagcagggcgcactcgacgccggggcaggacactgggagcctgcagcagggacgtgggtggggggtaccccaggagaccgcaaagctccccgtggctcgagggagcgtcacggccggagaaggaagcgcgggtggggcgccaagagacgcgtcggaggtgagagaggaggaaggcaaagggccctgggtgaggagatgggaggccgagcgcggagggaaggggtgaagagccggcccccctcctgaagaagactcttcagatccccgcgcgcggggaccgtttggacgtaaccgcctcccgtctcggtgcccgtccatccagccggggttggccctgccactgtcgccacatcccgcctccaattcccgccccgcttccgctcggctttgacaccgcgcttcacagccaccccggtccattcgacccgctccgcacctcacacacggcccgccggcggccgccgccatcttcgcgcgcccgctcgccctaaccccgcccccagacgccatgcccacgtgaccgctcgcccccggacccggagcgtgggcggggatttcgtcacgtgacgttgccgcggggcggtgccaagatggcgaggcccaaagaggtgaggagccggcagcgggggcggctgtaactgtgaggaaggctgcagagtggcgacgtctacgccgtaggttggaggctgtggggggtggccgggcgccagctcccaggccgcagaagtgacctgcggtggagttccctcctcgctgctggagaacggagggagaaggttgctggccgggtgaaagtgcctccctctgcttgacggggctgaggggcccgaagtctagggcgtccgtagtcgccccggcctccgtgaagccccaggtctagagatatgacccgagagtgcccatctccggccccggggcctggggctccgctgagtggatcggtgctggcagaggcggcagtagtgtttgcagtggtgctgagcatccacgcaaccgtatgggaccgatactcgtggtgcgccgtggccctcgcagtgcaggccttctacgtccaatacaagtgggaccggctgctacagcagggaagcgccgtcttccagttccgaatgtccgcaaacagtggcctattgcccgcctccatggtcatgcctttgcttggactagtcatgaaggagcggtgccagactgctgggaacccgttctttgagcgttttggcattgtggtggcagccactggcatggcagtggccctcttctcatcagtgttggcgctcggcatcactcgcccagtgccaaccaacacttgtgtcatcttgggcttggctggaggtgttatcatttatatcatgaagcactcgttgagcgtgggggaggtgatcgaagtcctggaagtccttctgatcttcgtttatctcaacatgatcctgctgtacctgctgccccgctgcttcacccctggtgaggcactgctggtattgggtggcattagctttgtcctcaaccagctcatcaagcgctctctgacactggtggaaagtcagggggacccagtggacttcttcctgctggtggtggtagtagggatggtactcatgggcattttcttcagcactctgtttgtcttcatggactca

SEQ ID NO: 12385 - DNA, 6000 bp, Homo sapiens
tcgcctgaacctgggaggtagaggttgcagtgagccgagataacgccattgcgctccagcctaggcaacagtccgagactccgtctaaaaaaaaaaaaagaaaaaaagcctactcatcctgtgattccacttacattaaacatccagaaagggtaggtttatagagacagaaagtagattagtggctgcctgggactagtggtgggaatgggaattgattctaaaccaacacaagggatcttatggggtgacagaaacgttctgtggctagattgtggtcatagctgtacaactcggtaaacttactaacaatcattgcattatacagttaaaatgggtgatcttatggtatgtaaattatacctcaataaagttgttcttaaaaggcaaggagtatttcctgctgacaggtctttaaaaaaataaacaaaaataataaatagccaggagcggtggctcacgcctgtaatcccagcactttgggaggccgaggcaggtggatcacctgaggttaggagttcaagactagcctgatcaatatggcaaaaccccatctctactaaaaatacaaaaattagccaggcgtggtggcgcatgcctataatcccagctacttgggaggttgaggcaggagatcgcttgaaccgggaggcggaggttgctgtaagctgagatcgcgccattgctttccagcctgggtgccagagcaaaactctgtctcaaaaaaaaaaaataataataataaataaataaaaaggcaaggaatatagggaaaagtcaaaagagatggactgtgagaagactgggaaagccagaagaatggtggaaaatgtagcatggagtaagacaataaaaatataagaggactcatttctaattttaaaaataataaaaaataagaaccagaaattgatgtatgtgggatgaggcagaatcagccatgtgttgatggttattgagggtgacaggcacatgggagttcattatgctattctatctgctttagtatattggaaattctccacaataaaaaggttgttttgctttgtcttttttttttttttttttaagaaatagggtctcactctgtcccccaggctggagccattatagctcactacagcttctgactcctaggctcaagggatcctgccacctcagcctccctggtagctgggactataggtatgcaccaccacatctggctaatttttgttgctgttgttgagatggggtcttgctctgtcgcccaggctagagtgtagtgtcgccatcatagctcaccgcagcctccaactcttgacctcaaacgagcttccctaagtgctgagattacaggtgtgagctaccaggcgcagccaggttttaagagatcaacgcatactcctggtactcagtgacctcttcatgttatccttgccattatgggtctctaatctgatcaagtaccctatttcactcagtctcaagcaaaacagacaatctaaagttgctgctctgacaggctctcttcaaatgatttccatttccttgggcaagaactcagaacaagcttgtccaggatgcatgcggcccaggatggctttgaatgcggcccaacacaaatttgtgaactttctttttttttttttttttttttttttttgagaaggagtctcgctctgtcacccaggctggaatgcaatggcgtgatcttggctcactgcaagctccgactcccgggttcatgccattctcctgcctcagcctcccgagtagctgagaccaccggcacctgccaccacgcctggctaattttttgtatttttagtagagacggggtttcaccttgttagccaggatggtctcaatctcctgaccctgtgatccgcccatctcggcctcccaaagtgctgggattacaggcgtgagccactgcgcccagccaaatttgtgaactttcttaaaacattatgagatttttttgcaattttttaaagcttatcagctatggttactgttagtctattttaggtgtgacccaaaacaacttttcatcttccaatgtggccctgggaagccaaaagattggacacccctgacttcggatgtttattttattttatttatttatttattttgagacggagtcttgctctgtcgcccaggctggagtacaggggctcaatcttggctcactgcaacttcctactcctgggtccaagcgattctcctgcctcagccccgagtagctgggattacaggtacctgccaccacgcctggctaatttttgtatttttagtagagatgtgatttcacaatgttggccaggctggtctcaaactcctgacctcaagtgatccacccacctcagcctctgaaagtgctgggattacaggcgtgagccaccgtgcccggccaagttttgtctacatttctacatgcacttttctggagagaggttctatagctctcaacagattctcaaagagtcaaaattcacttgccccacccccacccctgtgattgaaccattttaatcaggataatttttacctacaaacaacaaaagttgttaccaaaaagtaaggttgtatggatccagtcaggcttgcatttatttatttatttatttatttatttgagacagagtatagttctttcgccccgactggagtgcagtggcacaatgatctctgctcactgcaatctcagcctcccgggttcaagcaattatcctgtctcagcctcccaagtagctgggactacaggcatgtgccaccatgcccgtctaatatttgtatttttagtagagaggggttttgccatgttggccaggctggtctcgaactcctgacctcaggtgatccgcccacctcggcctcccaaagtgctaggattataggtgtgagccaccgtgcccagtcaagccaggcttttaatttcattctgtattctttaaattctacattaacaaaatacaatgcttcatagtttgctaaaacaatgtgtttttacaagacaaactttctacagttccacttctttttttttttttttttgagacggagtctcgcgctgttgcccaggctggagtgcagtggcgggatcttggctcactgcaagctccgcctcccgggttcacgccattctcctgcctcagtctcccgagtagctgggactacaagcgcctcccaggttcacgccattctcctgccttagcctcccgagtagctgggactgcaggcgcctgccaccacgcctggctaattttttttttatttttagtagagatagggtttcaccgtgctagccaggatggtctcgatctcctcacctcgtgatctgcctgcctcggcctcccaaagtgctaggattacaggcgtgagccaccgcgccccgcctacagttccacttcttagaagactgtatggtatgaaaataatgtacaagagtttgggtcataacaatttacttttctatgtctctaattttgtttatatgttttgagaaagggtcttgctctgttcctcaggctggaatgcaatgagtaatcacggctcactgcagtctcaacctcctaggctcaagtgatcctccagcctcagcctccccagaagctgcaggcgtttgccaccacacctggttaatttttaattttttgtagagacaggtttggggagggggtccttagcacgttgactaggctggtctcgaactcctgggctcaaacaatcctcctgcataggcctcccagtgttgggattacaggcatgagccacagcacctggacaatttcccagatatagtaaactgctgaaccaccttagggtgcgtttcagccttagaggtcttttctctgctagttacaaagcaagatccagagtatcattctaggtttatcaaaaatctctcttccctagacaatggctggatagaggaagaaaaagcaggccctttgattagagacacaccttaatgctggctttacattctcagtcacgtgttttaagcaagatttgaaattccttctctagagtctcgctccagagagcgccctaaaccgaaatgggaaactgaggctaaggttccaagtaccttcaaaccgccggtacagtacaagggcacagaagagcggagaccgcggacaaggaaagccagcataaaagctggaggggagaaagaagaaaggcgatcgggctgccctgagtgaggaattcagggaagccagcagggatttaagagcagcctcccgagtccgtgggggcaacgccacagttcagccccttcccctccctcagctcgagtcttcccgccccgtgccggtcagcccgaagaccccagcgccgcccagacccgccttccccacagaccccgccacctgtcagtgaaaggccgcagccaggggcaaagaggtggtccagtggctcagaggtccccaatgggccaaagttgccctaaaacccggggagtggcctcggcctccgccccccggcccggccttgccaagctttaccttgagtgccaggtgatggacgcggcccaggccaggctcggccagcaactgcagcaaacccagcattgggagcagccggaggcccgcggccagcctaggaccgcgggaggcgggggagccgacgggcgccagagcggccatgtttgttccagcatcaccagccgcttcctctcccgcccacgtccggggtgaaagggcgcagccgccggaagggcccggggagcggggctcggcggctagctccgctgaccctgtggtcgttttcctggagattgcgacctaggaagtcgtcgaggagcctgtgctgcccacctcggggcccttcgatcggccgctcctgtgcagactttcagttagagatgaagccaacctattggcggttgccataacaacggtggccgaaccagaccagcccgggccgcacctccgcctcgctgagctttggaagcgaccttgggctccggggacccctgatctcagggtcgggggataagctgtgtcagccgcacggtgtcgggccactgattgaactgatttcactgagcgttgactcggaggaaaatatctaaaaattcccggctcgccgtaggggtcctgtggttttctaggcgcttcacactcaaatacaagcgaaatggttgcaataatacgattgattgagcccttatgaggcaatttgttaggccttttgttgtatttaatttttggaacaatttgatgagctaggaggtacgtattatcattattcctactttacaggtaagcaaactgaggctctgagaaataagtcatttgctccaggttgagctgggaatcacacggaagctcttaactcctgtgttctgttgcctcatgctatttcatccaaccccaagtctgggtcttaacatttttctcttaattctgtatggaaactttctttgcttctttcagaaattataggaacttcttttttttgagacggagtctagctcttgtcacccaggctggagtgcaatggcacgatctcagctcactgcaacctccgccttctgggttcaagcgattctcctgcctcagcctctggagtaactagaattacaggcctgcgccaccacgcccggctaatttttgtatttttagtagacacggggtttctcccatgttggccaggctggtctcgaactcctgacctcaagttatcctcccgcctcggcctcccaaagtgctgggattacaggcgtgagtcactgcgcccaacctgctttggagtactttttatcttttaaagttaagtggcatctttgaaaatctctggttttaaatttgaatataatactgtactaaaaacgaaatgaggcctggcagggtggtgattcgcgcctgaatcccagcactttggaacgccgaggcgggcggatcacttgaaagtcagttgttcgggaccagcctgggcaacatggcaaaacctcgtctctactaaaaatacaaaaattagcggggcatcacggccgcgcgcctgtag

SEQ ID NO: 12386 - DNA, 6000 bp, Homo sapiens; identical to SEQ ID NO: 1447

SEQ ID NO: 12387 - DNA, 6000 bp, Homo sapiens
tagagatggggtttcaccatgttagccaggctggtctgagctcctgaccgcacccggcccttcccacccttaaatacattcttaaaccaggcattttgttccctagagatgtaacttgcatatcaagttttgggaaagttctttggactgaaaccaagccaggattttatgatgaaccagtcatgagctcatttaaggtagaaggccagaactttataccagtagcacatgatccagcataaaggcagtcttgaaatactgcattatccagggacagggcttcagcagctgatctgtcacacaccaggtgtcccacgtaggaatttcttaaaccacaggtaggatgtagctgcagagagtccatacctaggggttgaaagcaagccagcattagcaggctgctaggctgaaggggaggaagccagagggccgctggggactcaccaggtcacgatgtactgcagatgctcgttcctcagagtaactctggtttgccctccaatgggtcctccagggactgtgctctctgtggagacagcagactcaagtccaccccctactggcctgccagcctctgcaccacttcctagtggctgtcatttttgcgtggccagttggaagtcctgtatggcctttacgttgggtgaccatccccgcccttgtccgctcagtacttgcctaggttctttgctgagttgctgcctcctcccacccgccatatacacatgtgagaacataagccacagtagtgactgggcaatgagggttaggaggaaggacagtattcacaaaagctacttgttccgagatgggctggtccacaacgtacggaagttggcatcaatgaagatgggctctgcgcctgtgattctggccatagcttccaggtctcgataatgccagtggttcctttctggattgttctcagggacaaaaggctgcctggtttctgtcagcctcaccatcccaatgaggtccacttctccctcaatctataaaggaaggtgtgtgagattgcatggagcctggtggactcccagagccttctctaaagtaggaagagtccatgtcccttacctggcctttctgccgggtttcaggattcactttcttcctgggaacgaaccctctatttaccaggatggtgactctagggtaatgaaagtgctacttcaggtggggagggtttttgactaaagacagtcactcatggtcactcaggcacccataggaacaactagagcaccaaggaaggcttttaaaacagggctggctcagtggagccctggcagtgccacacaggcaaagtcttcctctcttgaggcaccttcgtggttggtaaaaggctccctgccaccatcactacctttttaccagtgtggctttccccttctatctctgcttcttgtggtctacctactacaacgtgcaactggtgagcaacgctgccacgccagagtttagaccccacacctctcccctgaactatggcaagagctgtctccaatccctcctcctaaccaaggcagccgtgaggagcagccctggcaccccagcctgctggagatgagtacttgggccccatcccagccctaaaacaggaacccatgggttaacaagagccccaggtattttcatttttacgtgaatcctccagttccctagttaatcacacaggtgctcctgtacctgtcatttgctttgcctggaatgttcttcccatctcttaactcccaaatagccctctagggagccacccctgcctccactccctcaaggtagggctggggtcctttctcttgaagtcctcttgctggcccctcatagcttgccatcatctaatgtgtgggcaactagacagttctccagaggcagggcccctgtttcacgaatccctcctttcccttcagaggtcaacatacagaaattatccagtcataaatgagctggctgagaagattaagtcaatgtcacaattagggacttaaactatgcaaggaattgaatctcctgggtatcttgggttccccagggtcctaccaaggttggggattgtgaaggaaatagtgatgtaaattagtataccctgactgcctctgccaggacagccagctcccacatgtcctactcaccccaggtcggtgcagtggaagggagtgaccacataggccccactctgagttgaggaggagatgaggccgccctcccgggcctcccggacagggtccaccatggtccggggcatcatatacagctccttggaatggtcaaagcaccccctgaccttcactggcctatactccagatttttcagttccattgggctgcatggagataagaacagtggccgagcaaggtttggctggaaaacgaatcccctgagggtggcagactacacagcccaccagggccagacaagtgaaggagaaaggcaaagggcgtgctcttcaaaggggaactttgatgccatgtgggaatgtggatctgcactgccagagtccaactttacaagagaggctaaaaatctggactcctcaatgaatattttatgtgaaattttaaaaaatatgtgggccaaaaccccatctgcaagccaaatctggcatactgtttgctaccctgaatggaaaatgtggctgaatatacctatctctgtagggcatattctagggagagagcagacaaatcattcagggcactttttcaaacgaccaccctcacggtgagacctacattatctgccctcagccacagggccttgggccctgtggaggataagtttactatacctgaaaaaagggtgacacccaggactcaaaataagactttcctccatatgtcaggaggcggtctcaggtagcttcacaagggcagtcaggtgtcaacagcaagcccaacagatgactgataatgagagctcccacctgaggtcaaggcagtgactaaaagtcccaccaaaaggggcaagctggccagcagaagccagggctctgctgttgaactcaagtaaaacaggccctaggggggcagccatgcactcactcggctggcagagggacaggctcagccagaactctggactccaactctgcaatcaggttcagcttccacttccgacgctggacctacagtgacagagcataaggccaagcagatggcagcaaggtcaagggcccagagttacgcacaccagatgccggtctttacctgccatgtccccaagccaaaggcagtcacagggatgaggagcaggacccactgaagaaaggagtcatcttccgcttttgtggcagatgcttctgctgcagaactgccacatctgcttggcctccaggccacccctggagagtttcacaacactgacatggagccagaagccctcgaacacagacctggagcagcccgttccaagacagactccagtactgccaatcaaaacctgctgcctagagccaactagcagcacctgtatccagcccagctcctaacccggtgcccagaacaaggcacacacagtacgtctgccaagtgagtaagtgggatctagggctcagtgccggtttgaccaccaaccacgaccctgagtaactcatgcctttttactcaagaatctagatgtattccactgcactaagatgcaccattcatccattcaaaatgcatttaataagcagctacagttggccgggcacggtggctcacgcctgtaatcccagcactttgggaggccaaggcgggcggatcacgagatcaggagttcgagaccagcctgaccaacatgcagaaaccccatctctacaaaaaaatgcaaaaattagctgagcacgatggtgcttctgtaatcccagctactcgggaggctgaggcaggagaatcgcttgaacctgggaggaggtggttgctgtaagccgagattgcgccactgcactccagcctgggcaacaagagcgaaactgtctcaaaaaataaaaaataagcagctacagttactaagtagcttagtcaggcactagtggttattgtgttatgtagaaaaatatatcaattcagtaatggctcacagagctctcttaacagctttccatttttacaactcatcgtaaatgtaaagagggaagaatgtacacagaaagtgcctttaagctctcagaggatgagttccatccgctgaaaagcaccaggggccttgcggatactatttttttttttttttttataaaaaggcaggcctggggcaggcttgcacagcactctacacacggcaaaacagccctgtgctgcacactgagaggaacacgtaagccgcggtggttagatacgctttactttcagagccctgggctttcagcctgggctggccacccattagctggatgggacgttcggaagtaactctcgagccttctctgtaacaggggaacgaccaaggagctacctctcgcgttgtgaggacaaagcgctcgctacatgcccggcacacgaccacaattccactgaaagcattttaatacggaacttgtcactcccagggagcctccgctcagccggcagttggttcatttcaatccccacgacaacccttcaaagtgcagggcagacagcaggtggctctgcccaggcgcctggatcacagcccggcctgcagccctcacctgggcgcggggagaccctgaggacgctcctccaggcggcgctggccggggcctgcggacacggacgggcgggctgagctccgggacccctccccgcgccccgcaccccgcaccccgcaccccgcaccccgcaccccgcacccggcgctcacccgtcccagccccgccgcccgcagccccagctgcaacgcagccaccgccgccatcgcacccggccccgcgggcgcttccgggacgcaggaggcatctgcatccggggcgccgctgagtcccgcccagagccccgcccccggctccaggttctgcgagcggcttccgccgggctgctccgcgggcgcgtcggccatgagcgagttgccgggcgacgtgcgggcgtttctgcgggagcacccgagcctgcggctccagacggacgcccgcaaggttcgcagcgcgggaggggaacggagtggcggagaagggcgcagttgggatgaggggctgaggggagggcaggggagaggagagggcaggggagaggggagaggggagagcaggagagaggggagggcaggggagagggcgcggcgggatcaggggaggagagggaagggggcgcggcaggagggggcaccagggagcggagccctggccctcctgacgtcctgcccgcccacgcgtccgcaggtgaggtgcatcctgacaggtcacgagctgccctgccgcctgccggagctccaggtctacacccgcggcaaaaagtaccagcggctggtccgcgcctccccggccttcgactatgcagagttcgagccgcacatcgtgcccagcaccaagaacccgtaggtggtccgcggcggcgcggggaggcccagggcaattaggacagcccctccgctggactccgccagtgctgcagcccctactctttcagagttgggagccctgggacccaggtgggcgcccgggtgctggaatcacctgcggtcccagcggcgaggcctcttggtgagctcgtttgctcacctgaggtttgtcctgtggggtgtggctgcttcccagatgagtagaggcttgtgatttgtcacctgaggttgtgaacagcgttgggttcttcccttaaccccagaaggggtctttgatttagctgggagctaggctttgtaataatcgtcaaaacagagataggatgtttccattcattgagcccttgctccaggtggagccatcctcttgcatgaactcatcctggagcagtcagtgaggctgccatgcgtgcttttccggtaaacattaagaggctgcagtcggcctgggtcagacggttccccacccagcttcagagtggaattgctccgggagcctttaa

SEQ ID NO: 12388 - DNA, 6000 bp, Homo sapiens
ctaacttgtgctcctttacaggtaatgagctaataaattatttctgatctcaaagctgtataacaactgaatttgttcaaaagccaaaaaagtagtagaaatacagtctatactgcctggtgcagttgctcgcgcctgtaatccctgaactttgggaggccgaggtgggtagatcacttgaggtcaagagttcgagaccagcctggccaacatggtgaaatcccttgtctcctaatagtacaaaaattagccgggccatggtggcgggcgcctgtaatcccagctactcaggaagctgaggcaggagaactgcttgaacccaggaggcagaggtttcagtgaaatcacaccatcgcactccagcctgggcgacagagcggactgcttctcaaaaaaaaataaaatagataaataggccaggcgcggtagctcacgcctgtaatcccagtgctttggggggccaaggcgggcagatcatctgaggtcaggagtttgagaccagcctggccaacatggtgaaaccccatttctactaaaaatacaaaaaaaaaaaaaaaattagcagggcgtggtggtgcgtgcctgtagtcccagggaggctgagccaggagaatcacttgaacccaggaggcaaaggttgcagtgagctgagatcattccattgcactcctgcttgggcaacaaaagtgcaactccatctcagaaaagtaataataataatagataaataaatgaaatacactctatactaaacccacacaccaaaagaataaagaaatgcttcctatcatagaacttagatctgtcatggagtcaaagattttagagtcaaagtgaccccaaggggctaggctctctttggttaataaaagttttctttcaaaaccagaaagaaaaatgatcactttctccttatttgccccgagaaattcaccactaaaaaaacagattaggatcaatatcagatgtgccttgaatctcgagaacattgtgactctagttgatgcacaaagcatggggcagacatttaacatgctcccgcagccagacgttctcaatgtgcctggcagcaatgccaagtgggtaggttcacaaaagcagaaacagaaaccctctgggtttagccttcctattttttcttttctttctttctttttttttttttttttttttttgagatggagtttcactcttgttgcccaggctggagtgcaatggtgcaatctcagctcaccgcaatctccgcctcccgggttcaagcgattctcctgcctcagcctcccgagtactggaattacaggcatgcgccaccactccccgttaattttgtatttttagtagagacgggttttctccaaattggtcaggctggtctcaaactcctgacctcaggtgatccacccggcttggcctcccaaagtgctgggattacaggcgtaagccactgtgcccggccagccattctaccttttcaagtgagtattcatcagatacatacaggaaaatctccagttcacaacactattttgtgtaaaactgactggaaacattacaaaacaaaacaaaacaaaaaaaacctgtctctagccgggtgcggtggctcacgcctgtaatcccaacactttgggaggccgaggcaggtggatcacctgaggtcaggagcccgagaccaacctggccaacatggtggaagcctatctctactaaaaatacaaaaattagctgggtggccgggcgcggtggctcatgcctgtaatcccagcactttgggaggctgaggcgggcggatcacaaggtcaggagatcaagaccatcctggctaacacggtgaaaccccatctctcttaaaaattcaaacaaaaaaaaaattagctgggcatggtggcgggcacctgtagtcccagctactagggaggctgaggcaggagaatggcgtgaaccccggaggcggagcttgcagtgagccaagatcgcaccactgcactcgagcctgggtgacagagtgagactgtctcaaaaaaaaaaaaaaaaaaaaaaaaaattagctgggtgtggtggcacatgcctgtaatcccagctactagggaggctgaggcaggagaatggcgtgaacccgggaggcggagcttgcagtgagccaagatcgcaccactgcactcgagcctgggtgacagagtgagactctctcaaaaaaaaaaaaaaaaaaattagctgggtgtggtggcacatgcctgtaatcccagctactggggaggctgaggcgggagaatctcttgaacccaggaggcggaggctgcagtgagccaagattgcaccaatgcactccagcctgggagacagaaccagactccgtctcaaaacaaacaaacaaaaaaaacttgtctctaaatctcctggacttaaccattctatcttgcgtagtgttactcttggtcctcctaggctgatcctaatagttagcgctaaataccttggatgttgatccaagaatcttgaacatgagttaacaacacctatgtacacccacccaacaaattggtttaattcattggcggtttaccagattcttttcatacttggctacgagattctctaattgtcatgtgtacaaatggaccaaactaactcagcagtgaaacaggttcttaggtaaagtactcaggagtcctattccaggctgtaaatcaggctaagctacagtaaatgaaatacttgggaaaatggcagctacacccgccaagtcagactgaagggggaagagacagaagggaaagaaacagcctctgctctgaggttctcatacagaaaggccagcacttctcttcctggcaggcccagggatgaccatttctctgcgcccctatgcccacacctcggccaagagcccacaatagtaacaatctcgctttgacttttagaaaaaaaatttcccccggattctttcactccgtccacactccaaccccgcggggatcacgatcccattttctggataaacagggcaatggagatgagcctaaaccatgagaactgtcagtcttcgccgccaacgtccacacggatcagcctgaaaccccaataccaatttttttttcaactcccacatgttcctgagaggaaccagatcagggcccacggctggcatggaaacgagagggaaaggagggggtgctgctggggactgatggatgaacccatccttgggtgaagggagcgtccagcttggccttgaggtcaggaggtgacaaaggcacactcctgagacctggccttctactctgggcaagaaagggcttttcgcccatcagaaagcccataggatgcccacctgtgtccacgaagaacccggctcaagcacccaaagaagtcaggaaggagccccgctcccaccagggcataagtggggtgtccctcagtgagtcagggggcacccttcctctggacagtgggggttccgcccagcccaaggggccgtcccccgagacctgtcacccggccctcgaggggctccctccccgccagtgctgaggacgcgcgcagcctacctggagctcgccctcggtgcggtgcagtcccaggcgccgcagccccaccgccaggtcgttgacacacaggccgccgtcccggttgacgtcgagcgtctgaaagagtctccacaggcgcagccggtggtccgggcccccgcagatagcgccgccgcaggggtcccccacggacgccggcgatgaggcagacgaagaggcggcggtggcggcggcgtccggcggcggggaggccacacagcggcacaacacactgctcaccatcgggcgcgaggcaggggctccgggcgcgggcgggagcgggggcggcgggccggcggtgaccgcgcgggaggcaagccaggcgctctgcagctgggagcgcgggctcggagacgccggcaagctggcggaaggggcggcttccgggagccccgcccctccgcgccccgcttcgccggccacgcccgggcgcaccgaaggccagtcacaggctcggatggggaggagggaggggcggagcctgtctaaggacagcccacgcgccacggactacccggatcaatggggtgggcggggtcacccggctccgcctggggccgattcaaactgagggaggcggggattggctgagccgggggccaagagagagaaaatcacgcagcgataggcatgagtaatgtgattggcaggcggaaggccccgtgtccagtttccattgatgaactaactctgtttagactgcgggatcttaaggatgggaggagcggtagtgtacggagagatcgtagcctccagtgggaaacaggatttgtgtgagagcatttgtgaactgcagttgcgaggcagagtttgtgccggtgggaggaattaaaagttaattgacccatgggtcacggccgaaagcactaagtatcctcaggaagcagggttttggtaatctaactccctaaaccaccaataaaatagctgaatttaacggcttaatagtcgtaatactgacaattgaacgacagaatgattttccaatggaagtgaataaaggttaggtgggcggggccctctgggcgacggacacaattttagaccaatgatcaggcgaattacagtaagcaggcgtgctctttagctgagcgacagatcgaaagaaccagtgatcgacgtgatatttgagcagctaccaaccgggaaggccggttttcccggagaagcgctgggaggcgggaagaggggaagtgggcggatctccgcacacctcggcggaagaggcagattcaggaagccattacgctgctggctggcagcggccgggccggtcggggctgggccctacgcactttgcgtagcgaggggggttaccaaaggcctagtgcttggcctcgagcaagcctggcctatcccctgtagggggtgggtgaggggcgaggctgaggaagaagagaaggggaattggggcgcttgaggggattataatttctttaaaaagaggggaggggagaggccatggccgtcccagccaagaaaaggaagatgaacttctcagagcgggaggtggagatcatcgtggaggagctggagctgaagaagcacctgctggtgaaccacttcaacgccggggtacccctggccgccaagagtgcggcctggcacggcatcctgagaagggtcaacgccgtggccacctgccgcagagagctgcctgaggtcaagaagaagtggtctgacctcaagaccgaggtccgtcgcaaggttgcccaggtccgggccgccgtggagggtggtgaggcgccggggcccactgaggaggacggagctggggggcctgggacaggcggtggcagtggtggcggtggcccagctgtagccccagtgctgctgacccccatgcaacaacgtatctgcaacctgctgggcgaggccaccatcatcagcctgcccagcaccacagagatccaccctgtggccctcggaccctcggccaccgcagccgcagccacggtcaccctgacacagagtgagtgacctctcctgcccaggcggcgtgcataagtgggaagggccagcaagctctggggtggcctggggaaggttggctgccaagggtcagaggtcagatgggggtcttggaagaccatgaggccttccaagagcagcacccagacagaagtgatcttgctctctttgggacttcctcagcacgtgggctggacttctgacgtgctggatagctcgccactgagcattgccaccatgtttgtccatgacttacctccacttgccgaactgggtggtccttgaaaacaagagaccgtgtctgtatccccacaggacttttcacagggcccggcttgtagtagacagccaggccatatttgttgaaaaaattgatgggaataatactgcccaagtgagacaacgattctggattctgttttcagtgtgggggatctttcatcaggtgctgctcaggagcctcatg

SEQ ID NO: 12389 - DNA, 6000 bp, Homo sapiens
ggttgtcttgtttctgtatatagtgacatagcattctgctgccatcttagctgtggacaaaggggggtcagctggcatgagaatattttttttttttaagtgcggtagtttttaaactgtttgtttttaaacaaactatagaactcttcattgtcagcaaagcaaagagtcactgcatcaatgaaagttcaagaacctcctgtacttaaacacgattcgcaacgttctgttattttttttgtatgtttagaatgctgaaatgtttttgaagttaaataaacagtattacatttttaaaactcttctctattataacagtcaatttctgactcacagcagtgaacaaacccccactccattgtatttggagactggcctccctataaatgtggtagcttcttttattactcagtggccagctcacttagggctgagatgaaggagagggctacttgaagctactgtgtgattttgtttgtgtctgagtggcattcagatgaagtctggaggagttaggagaacgacataggcaaggttcagcagccttccaaggtataggaaggtgggtgattaggactgaggctatctaggtttaacttttgtcccacctccaccccctattttgtggggccaaatgcattgctaaacagcaatttcagagtgtatggtgtgtcaaaaattaaggccttattgtttttctctttcacccctaccccccgtgctcctggcacatatcacattatttgtggtgcccaacatttggggtcttgagcctgctgctggtctcctggatgccagtgagggtatgtgggatggggtggtggggtaggggacggtatcctttttttgctcctacttggaaacaccaaacaccccaaggaagatgataggctccatcttgggccacctgagctatagggcaggctaatggaatcaaccatttctgagcactaaatgtatcatgaaaagttgaatggcctgctcataagtttagctcattcactggaaatgtagattgatgttcaatgttaaactggaaggagcttggtttgtgtgtcagtggttatattagtgggtagtgtaacattttatccaggttggggtgaggggagatggccacagtagcaagtggtgacactaaataccattttgaaggctgatgtgtatatacatcattactgtccgtagcaatgaaggatacagtactgtgttgtgggtgagtgttgctattgcccagcattaatatttgggtgtgtatgtttgaggctatgaaacacgcaggagtgtttttgtgctattaattttaagagaaagcagctttttcttaaaattcactgttgagaaacttgcatgtctggaggcggtgtcctctccgccctgtcgggtcctggatgagtacgagttatggtcacggtcacagcctgatctcttatgtgttcatagccattcgctctcccatcagaactgtttgtcctgaatgtgttcctctagttctagaaaatgaccactaatttaaaaaactcggttgtgaggtttgcccagaggcacttgttccagaatttcccctcctgcttcagccatgtccttgtcacttggcattctaagctaaagctttagcttcccaattcgtgatgtgctaggccaagattcgggagctgttgccagcctcgtcaaatatggaagagaaacaacctgcggtcaaaagggagtgatttgttaagtggtgcgcgtctatctcataactagatgtaccaaccagggaagggccaaggatggaaaggggtaacttttgtgcttccaaagtagctaagcagaagtgggggagcagtttagccagatgatctttgattaggcaaacattgagttttaaagaggctgtcaagttgaggccacttggtccattagctggggcagcaagatcactactcaacgttttcacactgtggcaagattgctcttctagtggaataatgccctagtttctctgagatgatgtaagtggcatgatgttacctaaggcttaggcttagcttgatttctgggcccactgtctgtgttcttaagatgccaacctgttgctttttttttttttttcccccatttaaaaggatagtacctactccctctaaccacctcaccccattcttgaatgacattttatccttcggaaagaacaaggctgtgatgtagtgactattgtctgtgtctcctgtgtgtgtctgttcttgtcacaaatgtatttggggacgttggatgcattcattttctgtaataaagtttcttaatcactcttcccaaaaagtaatcagtgggctgtctgcgatctgtctgagatactgaacctctgtacttttggttgattatcatcaaggttttagaagtgcaaactttgtggtaaccatagatctgaactactaacatttagtggaatgataccatcaaaatgacttaagtgttaaggactccaaagccccaagatcaacctcctggcccgaggcataagggggagttggctctgaagccctggaccaggataaataggcaatttgcaggatgctaacgagctactatttgataaagtggttgggtacttgtaatcagccagccctgcccacagggctcctcgaggccaagggtctgggcttagttggctgactcagccatgcccaacaaggagttctggaggagagccacagggaccgcttgctgttcttggctcccagctcagttttctgtggagcccaaggctacctggtaaggaaaggccattgagccagcttggcggccccaagcttcccttactgcttcaaccagagcagcctcccaccctgttttatatgttgggcatcctacgatttcagctttcaaaagaagctgggataccatatcaataaaaggaaaaagacacacatgatcatctcaatagacacaaaaaccttgacaaacactttcatgataaaaacaagggtagaagggaacttcctcaacctgatataggacgtttaggaaaacccatgggtttattcatgattgtactagaagttctagccagggcaattaggcaaaagaaaaagaaaacatccagactgaaattgagaagacaaagctatgtctatttgtagatgatatgaccttgtatacagataaccgtaaggaatctccaaataaaactgctagaaaaatgaattgatcatctgcagtatacaagattaacatacaaaaactagtatttctatataccagccatgaacaatctgaaactaagaaaacattctcttaaatatctacaataacatcaaaaagaataaaatatttaggaatgaacaatataagtgcaaaacttacatggggaaaagtacaaaacattaaagacctaaggaaatagacattccacgttcatgaatgggaaggtttaatattgttaagatggcaatactcctgaaattgatctagaacgcaatctctattagaatcccagctggcttcctctagtagaaatcaggctgattctaaatgtcatatagaaattcaagagatgcaggagatacccagatcaatcttgaaaacagttggaggattcacatttcttgatttcaaaactactttattaaaactttttttttttttttgagacagagtcttgctctgttgtccaggctattgtgcagtggcacaatcacagctcattgcagcttcaacctcccaggctcaaggcatccttccacctcatcctcccaggtaactgggactacaagtagcaccaccgcacctggctaatttaatttcttttagaggcagggtctcactgtgttgcccaggctggtcacaaactcctggactcgatcctcctgcctcgacctcccaaagtgtagggattacagcacacctgtaagccactgcacctggcctgatttgaaaacttacaacaaagccaggtgcagtggctcatgcccgtaatcccagcactttgggaggccgaggcaggtgggtcacttaaggtcaagtgttcaagaccagcctggccaacatgatgaaaccccatctctactaaaaatacaaaaaaaaaaaaaaaattccaggcatggtggtgcatgcctgtagtttcagctactctggccggaggttgaggcaggagaatcgcttgaacccaggaggcggaggttgcagtgagccaagactgtggccactgcactctaacctgggcaacagagtgactgagactccgtctcaaaaaaacaaaaacaaacaaaaaacccaaaaacttaaagctacaataatcaagacggtgtagtaccagcataaggacagacatataggccaatacaattgtgagtccagaaatgaacccagacatttgtggccaactgatttttcaatggggataaaaataacattcaatgggggaaataattttcaacaaatgatgttgggacaactggatatccatgtgcaaaggaatgaattttgacccttccctcacagcacattcaaaaatcaattcaaaatagatgaaagacccaaatgtaagagctacaactataaaattcttagtaggaaacataagtgtgaatttcatgaccttggatttggcaatagtttcttaggacaccaaaagcatgtgcaactaaagaaaacaatagataagttgaacttcattaaaattaaaacaaacaaaacatttgtgcttcaaacagtaccaccaggaaagtgaaaagacaacctacagaatgggggaaaatatttgcacaacgtatatcctatagggatctagtattcaaaatatataaaggactattacaactcagcaataaaaagacaacccaatttaaaaaatgagcaaaagatcttaacagacatttctccaaagaagatgtataaatggccaataaacacatgaaaaatcctcagcatcattagtcatcaagaaatttaaatcaagactataataggatactacttaacacccactaggatggttataataatgataaaaaagggagctctttcctttcgctgctgcgactacagccatgagtatgctcaggcttcagaagaggctcgcctctagtgtccttcgctgtggcaagaagaaggtgtggttggaccccaataagaccaatgaaatcgccaatgccaattcccatcagcagatctggaagctgatcaaagatgggctgatcatccgcaagcctgtgacggtccattcccgggctcgatgccagaaaaacaccttggcccactggaagggcaggcacataggcatagataagtgaaagggtacagccaatgcccgaatgccagagaaggtcacgtggatgaagagaatgaggattctgcacctgctgctcagaagatactgtgaatctaagaagattgatcgccacatgtatcacagcctgtacctgaaggtgcaggggaatgtgttcacaaacaagccgattctcatggaacacagccacaagctgaaggcagacaaggctcacaagaagctcctggctgaccaggctgaggcccgcaggcctaagaccaaggaagcacggaagcgcagtgaagagcgcctccaggccaagaaggaggagatcatcaagactttgttcaaggaggaagacaccaagaaataaaagctcgccttttgtctgtacatactggcctccgtgaatacatagatcagccattaaaataaaacaagcctttatctgcttgccaaaaaaaaaaaaaaaagataaaaaaggaaaataactagtattggtgaggacgtagagaaattacagtcctggtacattgcaggtgggaatgtaaaatggtgcagtcgctatgggaaacagcttggagatttctcaataagttaaacatagaattaccatatggctcatcagttccactcctaggtatacagccaaaataattgaaaacaggtattcaaacaaatacttgtacatgaatattcatgtacataatttttttttttctctgtcacccaggctggagtgtaatggcacg

SEQ ID NO: 12390 - DNA, 6000 bp, Homo sapiens
atcgcatagtcagcctgcaaattttccaaacttttatgctctgcttctcttataaaactgaatgcctttaacagcatccaagttacctcttgaatgctttgctgcttagaaatttcttctgccagataccttaaatcatctctctgaagttcaaagttctacaaatctctagggcaggggcaaaatgctgccagtctctttgccaaaacataacaagcgtcacctttgctccagttcccaacaagtccctcatctccatctgagaccacctcagcctgaattttattttccatatcactatcaacattttgggcaaagccattcaacaagtgtctaggaagttccaaactttcccacattttcctgtcttcttctgagccctgttccaacctctgcctgttacccagtttcaaagtcgcttccatattttggggtgtcttttgagcaacaccccactctaccggtaccaatttactgtattagtttgttttcacgctgctgataaagacatacccgagactgggaagaaaaagaggtttaattggacttacagttccacatggctggggaggcctcagaatcatggcaggaggtaaaaggcacttcttacatggcagtgacaatataaaaatgaggaagaagcaaaaatagaaccccctgataaacccatcagattttgtgagacttattcactatcatgagaatagcactggaaagactggcccccatgattcaattacctccccctgggtccctctcacaacatgtgggaattctgggagttacaattcgagttgagacttgggtggggacacagtcaaaccatatcaagtcccatcaatggaatgtgagtggaaatgatgtgagcatttcctcaccatggattttaagaaggaaatcaactacttctattctcctttttctcatttgctggctggatgcaggctgtggtgaggccctatcatgatgaggcaggaagtgatggttagttaatgagaaacaacaacaaaaggtagtgtagttttctcattattttttctattatagaaagcaatttgacattccattaatttctaatatttattgacattgtggaaattcaggttttcttctccctgtaaagctaattagctctccttgccagctcctatagttctaaaaatcctcaaggggtatttcctatgtcctgaatttttggggttttcctgtgattcttccagttgttgctgccattctaagctgtattgccaggcatttaatgtcctctaattaactgttctctctaatttcctaactccacctatacacagggttttcatgatgtcagatctgagtagtagtcaaaagtttaaatccatgttagaaaggaggatattttcctctctttaggttatgctttattaatgggttccttacactggagcattacagagtttacttaaagacagttatttcctggatatgtataaacctgcctttgctatgacagatatacagttgagggtttgtgttggaataggcacaaataggagttctataataatttcagtgttgctattagaatatctatacttccctaatggcaaggcattgttcatgggctagggtccttgtgcgtgacttggtttttcttcaagattaattctcttgaagtagaccccaccccaaatatgacctgaaaatattcttgggccaggcctccccaccagttctgcaaatgtaccctgtctcaagaagtagagacaggctgagatctttcccatagcattttcaggctacactgaaaatagacatctgttgggccaatttcaccatatagttcaccagaccaacctcagcctagttattcctgactacaggggactttaatttctgtgtacaacctttgaaactttgagatagaagaaggggatacattataagaaaacacagggtttggctcagcctcgaccaaaagagaagtctcagaaggaagctttgcttgaggcccataaaggacagtatagaggcaagtaaaactaaataggcaaaaacaagtccatgaccatggtgattgagacagacaagaggagaacaggcaagtgataggctggtgtgcaagttcatgagcatgcttgggggtggtgggtgggatttggaagaaaacagtgagtatgatgagtgagcacagttgcatctgtatcatggacttaatgcttatggattatttggctctgacatttagatttcagtggtaagtcagggttacacaggtgctagtgtaggcactgaggagtagaaagatgactgttgcaatttattgaactagaatcaattataggaggaaataaatagtgcttagcagtcagagtatcttatttcaatcttttatttgctcaaaggttttaaaaataataatctatttgatacatacccatacaaagctaacatatgaaaagcttaaagtagggcctttatcacttcaatacatactaaccaatacaagaccatgttttctaagagtactgacaacaaattgtccaacacacattttaaagtctcacacagtaaaatttgtcagcttttggtagaaccattcctctgtcagtaaatatcttggaataaagatcctagcacctgcagaattaccacagaagcttgtgcaaatgtgattttggacataattataaaacagtaaaggggattggtggctgtattggtgagatgagccctaaaatatttctcagagactgaagcacaggtaaagaaaggcaatgggaatagaattcatcaggatggtgagtgtattctgttcctactcctgctattgttaccaaccaacacagtgggtgggttcagtcgtttgacatcaaccccatgatcacagcaaggatttagtaaggggatttattacttgtaacgaagtaatgagaccaccagggatacttcccaaaataatgtctccctgagatgggggctgggtcaggttttcataagcattgggtattaagggtatatcctgatggctttggatcttacaatgaggtgatgctgagaggcatgatctgactggatcctgccatccagtgtccacttcttaattcagccctggtcctaattcaaaacacttacattctccctctgattgcatgcttggttcatctgaggatgctcaggtaacatgatctgagggtccccggcaactgaaagacaatgcacaactttgttatataaaagttaaaccagataggtctggtgctgctaccctgtaaccagttaccatacatggaatggcttaaaataataccaatttattattatcttacagtcctggaaggttggaaatcttcaaagggcttcaccacactaaaatcaagatgttgccagaggagctatccctctggcatttctagggaagaatctgtttctttgtcttttccaggttctggagacagcctgtatttcttggatcttggcttccttccatcttcaaagccaacgatgaccagtgtagactttctatgctgcttcaatctgacatggagtccctgccttccacatctaaagtacccttgcaattacattggccaagataacccagaataatcttaaattaaactcagctgaatagcaatcttaatgatcctttgtcaggtaatataaaatggtacatgttctggagaacaggacatggacatctttaggggaccgttacctgccaaacacaatgagggtagtgtctaaatgagttttcaaatggacaacagtaacaacatcaacttggtgtttaaccacattgctctgtctgtcccatgcaggaagcagggaaaggaggggctcaagagtagaggacggatgtgggggtgaaagaagaggattcaaatgagccaggttgctttgtctcggggaggggggtgcacggtgggatcctctcctgagaatgactgctgaaacaataggtagttgtggcaggtggcggagatccaagctggtttgataccagccacatttccacactgccaaatatcatggcaagagaagacttgacagggaaccgaagagaagccaggaccatccctacctggcggcatcaaagagagaggactgttatgacctcctgcgggtcctgacagggaaaggtcctcttttgggggcaactgtggggacggtgcaatgccaacgtgagccaccatttgaaatgagaaacagcggtgtggcagaaagaaatgagtctggtgcagaccagtggttggtttcctagggttagaggtctaggtctaccttcttttagaagaggggcagtggtgagtccttgatgggagccccctgccccggagttcacttaagagcaggtgtaccttcctcccctgcgtggctccacgaagctgggaaagaaacgcacaggacgaccaccctagaaccccgggcctgtctggactgaaatcgcctctcccctcccacactgcagtgctgacaccccctctcccattaacatccaggaaggagggtgagcagactagggagggggagagggcaaacacccagcagtccttataggggggcggttggggcgggggtgcagacacaccaagggacggtttggtatccatccgctgctccctccagcgcggctcttcgcgacctcgcgatcctgtcctccgcccggccccgcagccgcccgccggtgccatatattatagcagcgccagaaatgtggtggtcgtcgccacgttagggtccgcggggtcctcctgaggcagcctggtgccaacccgcaggccccggctggggctcgtcctggccccgcccacctctgggtcggaactatggtggttctgtgagggggggcgtcctgcactttcgcgccgtatccctccgccccccttcccgacaccctcgcggagagcggttcttgccgcatcctgcgcagcccctgcccagtttggtgcagaggcgtggggggcgggactcgtctttgccattcggatcgctgggaaagcggtgggaatccaactgaagagcagccagaggagagctgaagagaggagggggaggccgatgacctgggctctgggcctctgaaggcaagtaggggtgcgtgaggtggggggccgtggtgtgggggtggtccgccagggtggaccggctggcaacctgccccccggaccctgacagcctggcaacgaggagacgatccgttcggagccgggcgctagagagaggtgcgcagtgcccgagatccctggctatggggaggcggtgactggtgcgggccaggccggaccaagggctgaggggctggctccagaggcaccgtcagatcgtctggaggagaaccgcgctgaccgcttcccagccagctttgcaggcgcccgcgcgcagccctcgacggtttcggtaccgagagacggctgtgggggaggctcctgcgggagaaatggccaaacgggagccgtgttggggggcgcccgggaggcagttggggggcgcctgggggggccctcgtgggccagcgtcccagctctgtgcctagcccgtgggaggtgggtcgcgttcgctgctccgggccctgattccggaaaggggcctgtggggccccgtgtcctgggtgctgtcccttcccacagactccaggttgatgtcaaagtctgtctgcgcggtaggtctggcgtattctgacaggacacagtgagcatctgtagaggagaggcttgaaataaaggaggagcacgaatattccctggatttctggaggtgtgtggggatgtggggtgggtgccaaacactggagaaccgaatcggggtgggggactgcgaccagagcaggtcaggcatccaggagcacctcttaatcttcccctctctaatggtgttccaggcgcttcccccaccttccatccccatctgcctcccccaccgtcctaaactgggggcttgaaagggtgagctttggaggtaggggtgatgagggagacatactgacaagtaccaattcacgacctgttttctagaatatgtggc

SEQ ID NO: 12391 - DNA, 6000 bp, Homo sapiens
tttactgttcgtgatgcttaccattcctttgtgcagatctaagtttccatctggtgtaattttccttctgcttgaatggctacctgtaacatttcttatagtgaagttctgtcggtgacagattgtctcagctttttctttcatctgaaaatgcccttattttatcttcattttttgaaggattttgtcctagataaagaattctaggttgactattttttcttttcttttcttcttcttttttttttttttgagatggagtctcactgtcacccaggctggagtgcagtggtgtgatctcggctcactgcaacctctacctcccgggttcaagtgattctcctgcctcagcctcctgagtggctgagactacaggcgtgtgccaccacaccaggctaatttttgtatttttagtagagacggggtttctccatgttggccaggctgctctcgaactcctgacctcatgtgatccacccacctcggcctcccaaagtgctgggattataggtgtgagccaccgtgcctggcctaggttgacttggttgactattttttaatttcagcaagctaaagacatgtttccattttcttctgatttgcattgtttctgatgggaaatcagtagaaattttctttgttccttttcatgtaatgtgtcatttttttctcctgtttttcagatttatcctttattactgattttcagccttttgattatgtgccttggtgtgattcaatttttaaaattctgcttagcacttgttgagatccatgcctgtctaggtgcagtcagggctctttgtgttgacgtatttgggttaaaattatttaaaaaaattgtaagatacctaggagaatgtttcccattttacttctgagtaaacagaggcctagaaaagcagcaatctaaccagggtcccataggatagtagtaggagagccaagtctcaaacacgtccttgcctgtgaaatgagtgtcatagcctcagccaacatttcctatttaggggtctgtgacagtgttttatgggtttgataaacttgaagatggtgataactcctggtttaatttcaattaaaattaacaacattaaaaattatttaaatatttccccctttaaaaccagaccagtttgaaagtatctcaataagtgttgagtgaaaatgcgggttttactgtagatgtggttaatatcagtttataattcagctaaatacttctattccccatggtcattttgactcattatacagtttaaattgattttattcttctgtaaagaaaatattgactatttatattcgtaaagggctactacttcaagacatagacataaggaccacatgatattcaaatacaagcaaatgaggaggataaaatgataatgattttgcaatttcacctcatgatgatttttagcagatatataagttacattcatctcacaaaaattcctataaaacacactaagaaatttctattacttcaaaaacaatgttaagaagagaaaatatagtggcagggaccaaaatgatttggtctttcatttatttggaatagacatgagcaagctgtttttggagaaaagtgtttataactacagcagccttaaatgttgtctcttagctaatcatgtagacacaagatctgtagatttcaaataataactacatgatttttaaagtttaaatacaagaatccaaaacattaggccacaaaagtaatttttgtcctgcagtatttgatcctgtaataagtgtgtttttgtttatttttaattacaaaaatatttctttggtagagtcagggttttgctatgttgaccaggctggtcttgaactcctagcctcaagtgatcctcctacctcggccttccaaagtccagggattattggcatgagggatttttggtgtgagtgtttatgagtgatgtgtgtgtgtgtgtgtgtatgagtgtgttggtgtatatgtgtaagtgtgtgtaaacgtatatatgtgtgactgtgtgcatgtgtatttaagcctgtgtacgtgtctgtgtttctgtgagtttgcctgtgtatgtgtgaaacagcccaagctctggggaagaaaatctagattcatatgacagtggaacaagaaaattcaaaaccacacaaacttattaaatttgatgaaatagattcctgatatcctgaatggagctgacaagagccatgtcatctctttctgtgctcatttggtggtagtcatgtagcagtaaggatgcatgcacatgtgcacgtgtgtgtgtgtgtgtgtgtgtgtgtgtgtgtgtgtatgtgtggatgtgttgaaggggggccagtgggaagcactcaacaaagtggatcaacctgtcagcccaggttcagccaactgggtgccccctgggatgagggcagctgtgggtgccagcaggtgaatccatgctgccagcgcagagtggaaatctccccagctctttggttggttctcccttcttgtctccctccctcattctatccatcccccatcgcccacctaggacacacacaccaaagtgggctcaagcctctgtctttaataagctcagaagacagtaaatcatggtaatgagaaaaacaaggagcacatctgctcccaatgaagcattgcatatgggttgatcaattgctctagaaattgtcctttggacattattcacgatgaagctgtcctgttagagtacagtttcccatacataattggatgatgtgtcagactggttgtgggtccttctagtgggaccatcatgatgttttcagtttaggccattttaaggaatttggagtcgcgttaccaaagtgcttttaatttttttttaaccttagagtccattttcactgaaaaacaattttagcaatggtggtgaatttccaggagcaccttctggctaaaagacatgcttttgacccctgaattgtttttagagtctccgatcaacattaacctctctaccaccatgaattcacatttgtttgtggcaaggactggagacaatttctgattaaaagcattcacaggcccgtctgtgagccccttgagagtacgctcctctaaaccagctctgactctcccagagccacaagggtagggagttataagtatatataaccttttagggcttccaaggactgctgatgcaatcagcacatggtcattcattcactcatttgacgctggtttagacacttgagatacaccagtgatgcaaagaaatatctctgccctctgaggtttatgggacagcagatagagagagacatataatattaatagcatcataaataaggaaatagtatgtacatatgttagcaggtgctatgaaaaaaagaagagcaggatgcgggggatgttacgagcattaaatggagtggtcagggaaggcctcagtgagaaaatgtcatttgagcagccttgaaggatgaagctgacatcaaagggaggtgcattccagcagaggagataggcagagcaaagccccgaagcgggcatgcgcctgcaggtttgcggaacagcaaagaggcctgtgtggctgattgggagagagcaaagggaggagagtagggtgagtggatagaaaggtgatagcatcagatgacatacagggcctcgcaggccatggcaaggacttaggctttgactctgttggagatgggagcccgtgcaagcttttgagcagaggaggggtgggtcctcacgtgtgtttgaatggaatcactctggctgctatactgggaatagattgtaaagctgcaagggtggaagctagctaatgtagtaattcaggtgagaaatgatgatgacttgtcccattcgctgggttgagctgctgaattgagaaacctgcctctaagataatggcaggaatttagcagggtaggttttaaagctgtaagtggacaatgtttttttgctactgagggttcaatttggcttccaactcccctggagctggccgtgtatattaagcgtgagcgcggggtctagtccttcaggttcttataaaggcagaccctaaggagaggctgctgctcccagagtgaggctaaacatgaaaaatccttcacagctgtgggggaatctgggtccaaggacgtgggggtctgtttggggagcaggggtcggattcctggcctggaagacaggtgggaaggaaggcttactgctctttgactgcctagctgccttcagaagctgcctgttattaatggcagtctctggaagacttcaggacacacagaaggagaatggagaaggctctctcatctttctttcctggcgtgctctgaacagaaatgtgagaagattgcagcctcttacccccgcccccatggaggagctcaggaaagggggtctgtaggtacacctgggcaggaggctttctggagggggaggaagcagcgtacctcggaagcttgggggtgagagtggcagcaaactccagggaaagggctagttggagggcctttgcaagccttaagtccatcgtgcagttccagggacatccagaattgtgtatagggtcagtattcaggagaccgggcttctggtcctggctgcaccgccgtggccttgagcaaggccctgtccccctctgggtgccatccctcagtaaggagaggccaggtgacttctggggccttccagccaggacacgatggactgcggcttagccagaagccagtttctcccgctgcgctgagccagctccgcagaggacgccgacgcaggaaagcacgcagagtccggactttaataatgcacgcggcggctcgctcagaatacaaatgcggcgggcggcagcgcaggggcgcccgccaccctgtggtcagcctaagcactgcaggctgcgctgcggtcttggaatttatttcacgtggggcggggcgcgtggggagtgaaggttggagggcgtcaggagagggaggtgggtatagggaggcggtgaagagcgaggctccaagagagcgcagcagctcccgcagctcccctctcctggctgcaatcggtttctcgtccacagcccctttctgaccatctcttggggatctttctacacatagagtcacagtttgactttccctttcccagtctcagctatgtggactgttcaatgggagcaatagcactcacttcacagggtgattgggcggtcattattgcccttgagcctgagcaagccccgtgtttcaggggccccatgctttccagtgccttctaagcaggaagctccccaccagctcctggaacctctggaccgaccagaaggtaaccccaagcccagactacggacctgcatgaaacctggtactggtttcccttctctgggctcccttcagtcctctattttccacctgaccccctgcagtcagatatcctgagaagctccaggactcccacctatgggaatcatcccagggcgccatgcttggcctctgctgagggtgtttttgggaaaaaagattgctcccactggccagcaaggtatttctttcataggagcgagacagattaggtcatcaggctggtaccgacacacggattttggtaactcaaatagtctatatagacaggggcccagtacaccttaggggtgccctgtggcaaacaaatatgtgaggtgctgctgcctgtgctgtttattgataaggaatgtcggagcattaatcccctcattccacaaatctggagcaccttttctgtgccaggcacattgctgggttctgggccctgcctctagactcaaagaacctctgtcttctgagaccttttgaccgctctggcctatggctcctcttcaatttctgaaagctgtcttctgcaggcttccaggacaccaccctctcttggctttcccatgacctctctctccactgtaggattgtctgtccctcaggtgggtctctgttctggactccttcccttgtttcttcccacactgccttaccaccaagcttgtccacacccaggac

SEQ ID NO: 12392 - DNA, 6000 bp, Homo sapiens
tttttgtattttttagtagagatggggtttcaccgtgttagccaggatggtcttgatctcctgacctcatgatccacctgccttggcctcccaaagtgctgagattacaggcataagccattacgcccggactccacaaaaaaattttttttttaaattagccaggtgcggccaggcaagatggctcacacctgtaatcccagcactttgggaggccgaggcgggtggatcacctgaggtcaggagttcaagaccaacctgatcaacatggtgaaactacgtgtctactaaaaataaaaaaaattagctgggcgtggtagtgcatgcctgtaatcccagctactccagaggctgagacaggagaatggctagaaccctggagatggaggttgcagtgagccaagattgtgccactgtactccagcctgggcgacagagtgagactctgtctcaaaaaaaaaaaaaaaattagccaggtgtggcagagtatgctcccatagtcccagctactcaggaggctgaggaaggaggattgcttgaggccaggagttggaggctacagtgaattatgatcgcaccactgcactccagcctgagtgagacagactgaataaagaaagaaatgcaaattattctcgacttctatatctgtgaattcctccacacactaacatttatttggaaccccaaaaccaagactcatgacgattttgcaaacgttcaaaaacagatacacagtggtgaaaaatgggggccttccgggatcagctcatccttttgggggtatactgagtgccaggtatttttacatttttgtgcattttgttggcgatttctgtttcaaaagccccagaagctgcaaagctgcctagcatccgtaagcccatgaagactgcagcgcgtcttctggagaaaataggtgtgttagagacgctttgcccaggcatgaattataatgccgttggctgtgagttcaatgtgactgcgtccacaatatcgactccatacggctttttaaacagaaacacacgtaaaataaggttatgtatggatcagctgtgaaaaatttggggaccagaggtacaaaagctacaggcgtctaagtgtggactttttgcaggacggtttgtatttgttaactcagcgtttgctccgactttatggaccacgtctaccatgaagaaggagggaccactgtaatcctgaagacaaacacttcacaaactgatgaatagactctgcctttgattttctttccttttttttttttttttttttttttttttttgagacagagtctcactctgacgcccaggctggagtgcagtggcatgatctcggctcactgcaatctctgcctcccgggttcaagcaattctcctgcctcagcgttccgagttgctgagactacaggcatatgccaccacgcctggttaatttttgtatttttggtagagactgcaacctccacttcccgggttcaagcgattctcctgccttagcctctctagtagctgagattacaggtgtctgtgaccatacccggctaatttttgtatttttagtacagacagtatttcaccatgttggccaggctggtcttgaactcctgacctcaggtgatccgcccacctcggcctcccaaagtcctgggattataggcatgagccactgtgcccagcctttactttattttagattccgggggtacatgtgcaggtttgttacaagggtatcttgtgtgatgctgagattttgggtatgaatgatctcatgacctagctactgagtttagcacccagtaggtagtttttcagcccttcatctccctccctccccactctaggagtctgtaacgcctcttcttcccatctttttttttttttttgagacagaattttcactcctgttgcccaggctggagtgcagtggtgcgatcttggctcactgcaacctccacctccagggttcaagcgattctcctgcctcagcctcctgagtagctgggattacaggcatgtgccaccatgctcgagtaatttttgtacttttagtagcgactgcaacctcctcttcccgggttcaagcgattctcctgcctcagcctcccgagtagctgagattacaggtgtctgtgaccatgcccagctaatttttgtgtttttagtacagacagggtttcatcatgttggtcaggctggtctcaaactcctcacctcaggtgatccacccacctcggcctcccacagtgctgggattacaggcatgagccaccacgcctggcctgttgttcccatctttatgtccatgagtaccctgtgtttacctcctgcttataagtgagaacatgcggtatttggctttctgtctctgtattaatttactttggagaatggcctccggctggatccaagttgctgcaaaggacatgatttcattctttttcacagctttgtactattccatggtgtctatgtaccccattttattattttttatttttatttgtttatttatttattttttgagacagagtttcgctcttgttgcccaggctggggtgcagcggcatgatctcggctcactgcaacctccgcctcccgggttcaagcgatcctcctgactcagtctcccaaatagctgggattacaggtgtctttcaccacgccaagattattttttgtatttttagtagagagggggtttctccatgttgaccagtctggtctcgaactcctgacctcaggtgatccacctgcctcggcctcccagactgctgggattacaggcgtgagcctctgcacccgccggtcacgtaccctattttctttatccgatgcatggtggataagcacctgggttgactctgtgtctttgctatggtgaatagtgctgtgatgaactgtgagtgtggatgtccttttacagaacgatttccttaataaggtgttttcaaacagaaacacacataatataaagctacttattgatctgttgaagaaaacactgtgaccaggggcctgaaggattcttttgattttttttttttttttttttgagacagggtctctctctgttgcccaggctggagtgcagtggcatgatctcggctctctgcaacctctgcctctctggttcaagtcattctcttgcctcagcctccccagtagctggaactacaggcccccaccatcacacccagctaatttttgtatttttagtagagacagggtttcgccatgttggccaggctagtcttgaactgctgatctcaagtgatccacccgccttggcctcccaaagtgctgggattataggcgtgagccaccaggcctggcctttttttttttttttttttgagacagtctcactctgtcacccaggctggggtacaatggcccaatctgggctcactgccacctccacctcctaggttcacatgcttctcctgcctcagcctccccagtagctgggattacaggcgtccaccaccacgcctagctaatttttgtatttttaagggacaggtttcgctatgttggccaggctggtctcgaactcctgacctcaagtgatccggcccaccttggcacctcaaagtgctgggaatacaggtgtgagccaccaggcctcgactttttttttttttttgagacagtctcactctgttacccaggctggagtgcaatggcctgatcttggctcactgcaacctccagctcccgggttcaagtgattctcctgcctcagcctccccagtagctaggattacaggcatccaccaccatgcccagctaatttttgtatttttagtagggacgggatttcgctatgttggccaggctggtctcgaactcctgacctcaagtgatccacccgccttggcctcccaaagtgctgggattataggcgtgagccagcaggcctggtctttttgtttgtttgtttgttttttgggacagtctcactgtcacccagactggagtgcaatggcctgatcttggctcactgcaacctccacctcccaggttcaagtgattctcctgcctcagcctccccagtagctgggactacaggtgtccaccaccacacccagctaatttttgtgtttttagtagggacgggatttcgccatgttggccaggctggtctcaaactcctgacctgaagtgatccacccgccttggcctcccaaagtgctgggactacaggcgtgagccaccacacccagcctggcttgagggattgattctaccatgtcttttccctgagcagtggttcaatattcattcattctttctcagtgacagatccttccctctcaacctcctcccacgagtgacaagaaccaaccgttgctcctcacaagcaaggataccagagctcggaaacctggttctcattcctgaaactggccgatcccccatgggatgttgaggatatgagcctgcagcgcccgtgaccaactgtgagagccggaatgatcagtgcccaaggtctgttcgcttgtcacagtctggctgtgtaccaagagatgtcgcaatgagcacagctttagagtctaaaaggaaacgtgttctgttctttctttgttttgttttgttatttcagaagaaacaggaatcggttctggagcatgccacggctcttcactgctggttacaaaatttagaaaaatcattctccctcttttcctcactctcagggttctcttaagagtagggccccctgcgagccagtgatagggaggtgggcggttaacggtgctgcccagagacacagcgacgttactccagtgggctcagccctgcacatgagtgttcagacagttacagaggaaatgtcacaacacacttcctttccacctaagcctgagtcgcaaccgtggtggtgcgctgggaggtggagtttgcagaatttgcattcggagacagtcgtgccagccggtgggccacccagcgaagcggccgcctttgcaaggttgctggacagatggaactggaagggcagccgtctgccgcccacgaacaccttctcaagcactttgagtgaccacggcttgcaagctggtggctggccccccgagtcccgggctctgaggcacggccgtcgacttaagcgttgcatcctgttacctggagaccctctgagctctcacctgctacttctgccgctgcttctgcacaggtgagccgccgagctggacttttatgcttgtcctgcactgtcaagggagaagacagggtcgctgggagggtccgtgtacggtgagaacatgggggaagacggtgcaaactccatgaggcgtgttctcctcacgctagagcagaccaggagtgcaaatttcctgggaggaagactttgcacagccgcttcgtcacttaggggagaaatgctcaaattttccagggctgcaagccacccttcctttaataactcattccatgaactttcagaggccgaggtgggcggatcacgaggtcaggagttcgagaccatcctggctaacacggtgaaaccccgtctctactaaaaatacaaaaattagccaggcgtggtggcaggtgcctgtaatcccagcactttgggggaccgaggtgggtggatcatctgaggtcaggagttcgagaccatcctggctaacacggtgaaaccccgtctctactaaaaatacaaaaattagctgggcttggtggtgggcgcctgcggtcccagctactcgggaggctgaggcaggagaatggcatgatccctggaggtggagcttgcagtgagcagagatcacgccactgcactccagcctgggcgacagagcgagactctgtttagaaaaaaaaaaacaaaaaaaaactcattccatgaaatgcgcctctcttgaggttaaccttagagagggtaagcagctgcggctgctgcacgtaacccatttacgcctgagattgcagttttttcaatgtttgcaatgagaccttggcgatgaccttgagccgtgggatataa

SEQ ID NO: 12393 - DNA, 6000 bp, Homo sapiens
aactcttcacttcgcaggcccttctagggctgcatttcctggccctctgtgtctgggtgcaactatttgcacagttccagctgatgagttgggtgcagaagcgttgtacaccacttctaggctacagcatttaaatacttgtggtccagagctctcttttccctctagctcggcaaccagcaatgtttgagaaggtggctactcagtcatcctggatccctgattgactgcaataagtaaacacccccttctaacctatgatgcacatgtagtgtgagtaaaaaaattaatgtttttggccaagcgcggtggctcatgcctgtaatccctgcactttgggaggtcgaggtaggcagatcacttgaggtcaggagtttgagaccagactggccaacagggtgaaacccggtctctactaaaaatacaaaaattagccaggtgtggtggtacacacctgtaatcccagctactcgggaggctgaggcaggagaattgttgaacccagagccagaagttacagagtacgtcactgcactccagcctgggtgacagagtgagactccatctcaaacaaaacaaaacaaaaacaaacaaacaaaacacctttgtttatactaaccactgagattttgagggttgtttgttactgcagaataacctaggctatcctcactgataccatatgcataaaatacatgtttgttgaatgaatgaatgaatgacttaagccagaagagactgctgagcagtgttgctctagaattcctttctataaagaagagattcagacatggtaatctgattacacgtgtgtgggaagtgaggaccatgttggtgaggggacttttcttgttttgtttgcatagtacactatttttattacatgtcttttatttgggctatgagagtgctgatggggattatggggggcctaaagccccccaaaccaaaccttggcattatcactgaagtttcaattgaccttgccacctcctatgtcttttacaagtggggaaactgagacccagactgtctaagtgatgatacccattagttagtggcaacactggtaaacaccaagcccctcgtttcctgattgtctacctggtgcttttgctatgacaccattccacctttcacacccaggtgttaagagagcaggggcttgagagttgtgctctgacttattccagtcctggctctgccacttactagctgtggaccttaggaaaagcacttaacctatctgtgccttggtttcctcagctgtacagtcctctgtgggttgccacgaggattttgtgaaatcaagtataaagtatgtaaagatctagcagtattagtcgattgttactgttatcctaaaccctcatcccacagtctttttttttttttttttttttttgagtcagtgtctcactctgtcacccaggctggagtacagtggtgcaatcccggctcactgcagccttgacctcctgggttcaagcgatcctcccacttcagccttctgagtagctgagactacaggcaacgccaccatgcccagctaatttttgtacttttctgggtatagatgaggtttcaccatgttggccaggctggtctcgaactcctgggctcaagcaatcctcttgcctcagcctcccaaagtgctgggattacaggcatgagccaccacgcccagcccagctcaccgtcttgatttgcacctgagccccatgttctcttcatgctctgtttcccttgggaaagaatgaatctgttttagaccatcatgtgctctatttgtagacgatttggccacaggtcaattacatttgaagttctaaggagagccgtgccctgagcactggtgagctgtcctcctctgccacctccctttgccaagaaccttcattaagggacctaccagtgggaagggggcaaggtgacaagaacttttgccttctctattcggtctctgccatatttgctgcctgactgatgcctgctgatcaagctccatcactggttcaaagaccctgtgggactacagccaaagccacccactcttcagttgctgggacatcagcccacaggctttggataaatattcacctgcaaatcctgagcagccatagccttccttcatatctccagatagtacccgtgtagaaggcatgtgactagggctccctctctcagaaaaggcagaaaaacctgtggctggagggccggggttccctccttaatcccaacctctttcctcttccataggccctgatgtcagagttatgtgaatctgagagtgtgtgtcaagaagaatgaaactttggctgaaagtgcagcaaaatatgaatttttaagaactgtcttatttatgttttttagacatatttcttttctttttctttcttttcttttttttttttagagacaggatctcactctgtcacccaggctggagtacagggtcatgatcatagctcatggtagcctccaacttctgggctcaagccatcctcccacctcagcctcctcagtagctgggattacaggggcaagccactgtgtctggctaccagtttttgataaagctaaacttaccatatgacatagcactcttacttctaggtatttacctaagtgaaatagaggtttatattcacacaaaaagctgtatgtgaatatttatattgcctttattcacaataatcaatagctggggctacaggcatgcaccgccatgcctggctgatttttttttattttttatttttacagaaatggagtctcactatgttgctcaggctggtcttgaactcctgggctcaagcaatcccctcaccccagcctcccaaagagccttaaagtccttttttaaacagcaagtttgtttaaaggaaaagcatacttactctggtatcacgcttaactttagaaattcaagcaactgttaatatgagatagacatatattaacttgttattgacgtgagacatacatacagaaaagtgctcatagatccgtttaaactgtacccagatcaagaagccagacattacctgtaagcccttcttattctccagtgaccgctatcctaacagcataggttagttttgcctgttttatcctttacagaaacaaaatcatatagtgtctgtgtttttgggcctgacttcttcactcaacattgtttcagaggttcatctatattaagcatagcagtggttcatgcagtctcattgctgtctgggattccgctttgtgactataccatcacaatgtctgcgatccattctgttggtgggcatctgggtcatttccaatctgggctattgcaaatatactggtatgatattctagttcatatcctttggtaaacatacacactgattgaggttgtgtgtacatccagaaggggaattgctggtcagagggtagttgtactctcagctttaatagattctgccaaagagttttccaaaatgcttgtaaaaatttacactcccactagcggtgtatgaaaattctttaggtatgaggtctatgtaaagcaaaaataaagaagttaatatgcaaaagttatatgtaagttaaaaatacgtgttaagttcattcaaacggaaccaatttaacccgttggagtaataccgggtgtgtttatttaatacaccattttccccttcatcaaaacttttaatttatgtaacctggatgagcttcctgactctactctcccttaatccaatcagttaaaagtctctctgaaaagactgtccattcatttattcagttagaatgttgtgagtgttaataaactggtgtttgcaaaacaaattcaacccctcctgcaaagcagaatatacatctcgcccatcatgtgtctaaaatggcagagtcagccaggatatgccttaaagatctgcacttgataaccatcgcgtctccagggctgtgaatgcaattcagaatccagaattttgttctagttgtaaaggaaaaatggtatattctcccgcaggtttaacgaaagagaacgatgcctttaaaacgacaaagcattttgcaaacacaggtgttattcgactataaaggcggcgggggaggggggcagtaaaatgagccggaaagggaattcagagcgcttattttttccctggtctctacaactaattcgtattgtagaactgagcctccattttcccatctgtaaaatagggtactttgacaaattgcttaggggatctgtaagtcctatccagatctagtttttattctatgaccatgcaggaggagagatgctgagacagaaaggtagaggggaccagggacaactcactttatataccccctccacctcgacccccagcaggcagagcgcccgagatcccggtttctgggaacccggtgtatttccagtccttcaccaggaaaaccatcgaactgaatcctttactgggacatttctcgtttactgctctctccaaattcccctctcaagtggtctgacatctgatctccggattcaggaatatcttggtagaagtgcgccctcggggctcccacccattacagcgtgcgacactgaaacgggcatatgggtaccggggcgagccctaaaggtgagccgctgagtctggaggttggggtccgttggggtccccaaggaggagctcgctgggctggacgccgggcatctgagggtcccgcagtgcctggagcccaggagcgctgcggggcccccggctgcggtggggtgggcggccgagctcgccgcccccgcttctccccggcccctgcccctgccccgagctcccagcccggcttcggccggccgcgctgcccgctccccctcctccctccgcgccccgcccgctccccacctccgcgcccagcctcgccgccgccgagcgcccgacgcgccacgccgcgctgggcagctggagagctggcggcggagcgggccgggagcggcgggggcggcgccgaggccgcgggcggggggaggagggccgcagccccggagaggggaaaaggcgggccggacggcgccagcagccagccccgaggacgcgagcggcaggtaagcgctcggcgccaggacgggtctggccccttggggtcctgagacccagactcgcacagccggccacgggcgctggaggctcgggcgcagcgtctagccccggagggcggcgggccagcgggccggcgggacgaacgcgccttccgcccggctgctgttcctagccggggcccgggaacatcctgaaaggcggaggcgtagctcccagccccggggctagttccccgactgggggagcccgcgcgccgtgggaaaggaggctccaaggggagacgcgcgtctccaaaaccttcggacggagccgtactttccccaacccgcgggaaactgagccacgagcctgactcgcgcgggtggtgtgctagacgccaactcccgggagcccggctccgcgcgcctggtcgggctgcggcggtgctggcggagcgcgaacgcgcccgggccccggacggcttggggcggcaccactcggcgcggccccgaacaggtggccccgggcaccgagggacggagcggcggcccggagccagggggtgagcacgccggggaaggagggggctcgtggtctcggagtgagcgcatttcggcagggactcgagtttcgaggctccgaaacccgataaaaagtgagggggaagaagagagctgacctcccgagagccagacgaagcaggggacaggttttccgtggctgcttcgacagtgacagtctgtactgtgcacgataatcccccagggatcccgttaaaatgagattctgatcccgcaggtctggggtgggggccgagcgtctgcatttctaagaagctcccagtggctgctgatgctgttccatggaccacactttatccggcaggccctacggaagtactttttgtccagcaggctgaaaaccttaggaaaagtgggagattgggagacgaggtcct

SEQ ID NO: 12394 - DNA, 6000 bp, Homo sapiens
gatagtggatgatctctcctatgacagtcagtctttgggccaattctcattaatgaatctgaattttttcagaatttttatttatttttacttttatatttatgttcaggggtacatgtacaggtttgttacgtgggtaaattatgtgttactgaggcttggtgtacaaatgattttgtcacccaggtagtaagcatagcacctgataggtagttttttgacccttgtcccctcccaaactcccccctcaagtagtacccagtgtctattgttcctatctttatgtccatgtgtgttcaatgtttagctcccacttataagtgagaacatgcattatttctaaacttgacacatttttaagtgattgtagataatctccctaattaaggaaaggcctagctctcactgaaggtctttgcctaattcctccattactgttcctctcctgtagcaaaagttgaggtaagagcaagtctaactggctccagttcctaggcttggagaccatgaagcaggtttcctgaccacacacacccgcagactctctgtcacctcagctgccaaaatttcctccaacccagcccacttccccatccatactcatctccagctgaactcaggggcaaacactaagcagcaggaagtaaagctggagctcatcataatcatgacacctttcatttgtataacttttttgtttttttttgtttgtttgtttttttattgaacctttatgaatattttctcttttggtcttgtcaggagagaaaggcaagaactgcaaaaatttatgtaaaggagctctctcatccatgctaaccagatcccacgccccccaaaacactttaaagcccacaaatagagtcacacacactcaatgtgcttgaaccatgctcagagatccacactgaatataaataaatatgtagaggtagaaacaaatctgcttcctcttcatagatgcccaaaagcctgtattcttttcccagctttggcacttaattatatgaacttgtactgatattctttaccccaagctaggtattaattttaacaactgtcctaactttgtgctgttcaatgcagtagccacattcacatgtggctatgtggctatactactgagtgcctgaaatgtggctagtgtaattaaaatacagaactatttatttattttattaatttacagttaaatctaaataaccaggtgtggctagtggttagtgcatggctagtggtgacagcacaaaataatgtacatagtaatgtaacattatttagatgatctgtaccatccttcctaggtggtctgtgctgttctgttcacagggttcattcaacctcatccagcactctcagttagagggcccttgcctcactaaaaatgacaatccagggttgttttatacccatggaataggccctggggcaggaaaaaggaaagttgtaatagccatatttctacagccagcctgatttttttcattgtctccgtgtttctataagctggaactaaaagttgaatcatggctattctagtctctgtgaatgaatgtgataaaagaaaatccttagacaaattaaagttaacagagtttaattgagcaaagaacaatttgtgaatcaggcagtttccaaaccagaaaaggttcagagaggctccagtgctgaggtatggttgaagatttatagatagaaaaaggaaagtgatgtacagcaagtcaaagtgaaatacagaaacagctggattggttacagcttggcattttccttatttgaacatagttggaacaggtggttaccttcgtttggtcaatcttgatgactggtacaagagtaggttacagtctgtttatacttctagttaggttttagttcactatgtacagagaaatctttaggctgaacttaaaatatttccaggagacagctttaggctaaacttaatttaacaagcatatatgtctgtatagagctgggctttgagtatagtcatgctctttacccttccaaagtgcaattagtattggctgtgaaaaaatttcagtcctggagaaagaaaaattactatttttgattttgtggtaaaataatggcatcttgagagagcctctttctagcctgctttttcatctataatatgaaagggttggactagatttatttattcaacaaaccaaacaaggcaatgagctaacagctgaggacacaatgatgaatcagacatgtcataccctcacaaattcaatttaatataaagtctgaaccagatgatgatttttcattacctctttcagctctgagtccacataagctatgaatcctgtcacttacgtgtgaacgctgttgtgactgaaaattctttatcttgctacccaagtcttacttcattgagacagatttcccatccaactacatgttatcccccctctccctcaccactccctatttggtcttccttacctcaataagaaagtaagaactgaaggagtctgggaaaatgagcaagagtagagagacagcagcagacaggtatcattctgggcacttcaacctttcctaaagtgaaagagaatgtgagagtagatatgtaatgaagatggatggatgggaagagaaaagataaagagatgaagcaaggagacaaggagtctgatgtcatttatagcaaatgtggtgtaaattgatccagctgtacaaggcaaagacccatttgggaatgggtgaatcactgccttccccattgctcaagaacagaaaattagctaatgaaagaaacaggtaggggagcacaaagaagaaccacaggaaacaccctctctgccacagctatttcggtgccaacttgaagctcaaggattgaagggggcctgcccctccacgcctgtgggtatttctcatcaggtggtacgagagactgagaaaagaaatgacacagagacaaagtatagagaaagaacagtgggcccaggggaccggcagcctcagcatgtgaggacctgcaccagcgctggtctctgagttccctcagtatttattgatcattatttttactatcttggcaaggggagtgtagcagagcaacaggtggggagaaggtcagcaggaaaacgtgagcaaaggatctgtatcatgcataaattcaaggaaaggtactgtgcctggatgtgcatgtaggccagatttatgtttcactttatacaaacacctcagtgtagcaaagagtaacagagcagtatttctgccagcatatctcgcctctagccacagggcggttttatcctatctcagaatagaaagaatgggaatggttggctttacaggagacattccattcccagggaggagcaggagacagaagccttcctcttatctcaactgcaaagagacctccctctttcactactcctcctcagcagagaccctttacgggtgttgtgctggggtatggtatcaaagcagaaacaatttttcctggtacagatcaaaatggaatttcttgtgtcttccttttctacatagacacagtaacaatctgatctctcttatccccacaaaggatctagctcctttctcttttcttcatttcctgagtatgaattgcccttccactgtagctcaaaatggctgtaacatttcagactggaggaaaagtgataattcactctgtgtctcacttataaattttcctgtagatatttggggatccaaactcagttgaagaaatactagtttgaatgtcagtttagttactaaaactccctaggagaggattagaaagtctagtcttgaatccaaatgttaacatcccttcaaatgtggttggatagccttttcctccaactatcaccatcaccaccacaatccagaactctgtgaaaagagataaagattcaagggccttaaagcgattgtcccaggttggttgtgaggtaattcttgtacctaaagatacaaaatttgagtaaatgactttgttcctacagcaggtagcaagccagaaggctactgctgggctcatattttacaagtacctaaaactagttgttagttatggggcatgtttacaaagtgttaacatcaacatatttatgcccatctccatatagaatcttcttaatataactcaagataattgatgtaacaaattcacatcatgatcttaccaatttggtttttaacatcaaagtgctgccccaggcttcaatcagcacataccagactgctatgtcccttttctccagaagccatattgagcaccccacagctctaacacctcagagcctagccaaaggccaagaacacttgcctgatcccccaaatttccaacacaggaccattgacagcaagcccagtcattccagatcatcttcagtgggacaaaaaaagaaaacaacagttttaatccaatggaggcaatttattgttatgaagatttcaggaaacaaagctcaaaaaggaaccagaaaggaaaaggctttttagaatgtggatagagccacaagtgtcattaaggagagagagagagaaacggagagatgaaatttatgttacttaagatcaagtttcacataatgccagttatattagcatatactggcaggattatctttccccacctacaaatagtctaatgacctcacagtcacagaaatcacagagaactaagctgaagagagaacactcgtccctgcttcccatcttagagcagctgaataatttcctgagaattctattcctgaagctaggaagaaaagtttatttatacatacacgcaacctgcaagtctccagtttctattcttccttcctctttgacccttcccctcccccactttgcaccagagaagtcagactccgggagtgctttaacagtttgaaggctaatctgaaagaggaagaagaatctgtatatctgtatatattggctagcaaatgtgccctgctctctcccctcttaaaaatagcagcaacccatctttgcaaagaagcttgcctatagagcaggcactctgtgaatggactgtgcttttacgaccctacagggtatcaagatactgtgcagctcgccaacaaggattaattgcaaggactggtagatcgaatttactgaagacttggagcttgcttctgagaacaaacgcaaaaggacagtaaactgtggaccttgaagttagcaggtaaggagactcagtattcagtactaagaccagaacagtatgtagtaaaatgttgctgatggtaaattttagcaaattcccaggagtttggggataagttatctgccttgcctgctttaagtttgggtgctagtatgaattctttctgctttatttcttagccagaaatctgataatatgatcagtctgtcaacaaatattgctcagtgcttctgctagggctcaacgtggcaaaatacagaggagacacactccgcaaacctcctgtgcctttgtaatttaagccagaaatgtaagatacattttcaaatccccattttgagggttcagtggagtttctctaatgtagtgacattttccttcaatatggaaaataaatatgtagtaattactgaaggtaaaccagtggagagtaaaattttcacaaggtagtttcacatttgttatcccacctgaacctttcaacatcctataatttagacaaggtaggtgttactgtccatgtttatgaatgagaaaattgactcagagaggctaaaaaattttcttgaaacacaccgtacaactagaaaatggccagttctggccagagactgtaaaaataaagctctctcaactataaatgaatagaagaaaattgcatgatctatttagtaactcagacacatctggtgtagactaagtttacacagagccaaagattcatacattttaataaaatctttagccaggaacatttttctacttagcgacaaaaaaggctgttttcaagaggaaacaaatgggtttgtaagttccacctactgaattcagtggttctg

SEQ ID NO: 12395 - DNA, 6000 bp, Homo sapiens
taggcaagatgcagctaaatcatcacaggcacatggctgatcgaggcaccatgagaaattaggcctggcttatcctggctaccttcctagagttcctctcccagtagcctggttccaatggcagactgttgaaggggggtttgggggggaagagatccatgcagcagagaataccagcgtggtaggtagaaaaatgtccctcaacacagatgttcgtgtcttaatcttaggaacctgtgaatatgtgacttcacatggcaaaagatacttgcagatgtgattaagttaaggatcctgaaatggaggagttatcctggattgtccaggtggacccaatgtcatcacaagggtcctttaaaaagggaaacagggggccgggtgtggtggctcatgtctgtaatcccagcgctttgggaggccacggcgggcggatcacgaggtcaggagttcgagaccagcctgaccaacatggtgaaaccccgtctctactaaaaatacaaaaaaattagctgggcgtggtggcacatgcctctaatcccagctactcaggaggctgaggcaggagaatcgcttgaacccgggaggcggaggttgtgatgagccaagatggcgccactgcactccagtctgggcgacagagtgagactttgtcccaaaaaaaaaaaaagggaaacaggaaggtcagagaagaagacgtgaccatggagtgatgtgtccaggagcctaggagtgcaagcagcctctgagagctgaaaaagttgaggaaatggactcttccctagagcctcccgaaggaacacagctcagctaacaccttgacttcagccctgtaagacccactttggacttctgaccttgataattgtaagatactacattcgtgttaagtcagtttgtggtagttcattacagcagcaaaagaaaactaatacagctagacacctgagagtaggagagaggcaaagataaatgtgcatgcagatcacctggagatcttgttaaactgcagactgcatcactaggtcttgagtaaggcctgagattctgcatttcttctttctttctttcttttttttttttttttttttgagacatagtatcactctatcacccaggctggagtgcagtggcgcaatcttggctcaccgcaacctccacctcccaggttcaagcaattctcctgcgtcagcctcccgagtagctgggattacagacacccatcaccacgcccagctcattttcatatttttagtagagactgggtttcgccatgttggccaggctggtcttgaactcctgacctcaagtgatctgcccgcctcagcctcccaaagtgctgggattacaggcgtaagccagtgtgcctggccgagcttctgcatttctaacaagctctcaggtcataacaatgcttctgatacacactttgattaacagtgtgttaatttgattagcagagactagaagacactggatacccatgtaacattttacactttatgaagccttttcataactatcatacctcatttttaaaaatttatttttatttatttttattatactttaagttctggaatacatgtgcagaacgtgcacgtttgttacataggtatacatgtgccatggtgatttgctgcacccatcaatctgtcatctacattaggcatttctcctaatgctatcccttcccttgccccccacccgcccaacaggcccctggtgtgtgatgttcccctccctgtgcccatatgttcttatcatttttcagctcccacttatgagtgagaacatgtggtgtttggttttctgttcctatgttagtttgctgagaatgatagtttccaacttcatccaagtccctgcaaagggcatgaactcattcttttttatggctgcatagtattccatgatgtatatgtgccacattttctttatccagtctatcattgatgggcatttgggttggttccaagtctttgctattgtgaatagtgctgcaataaacatatgtgtgcatgtgtttttatagtagaatgatttataatcccttgggtatatacccagtaatgggattgctggctcaaatggtatttctggttctagatccttgaggaatcaccacactgtcttccacaatggcagaattaatttacactcccaccaacagtgtaaaagcattcctatttctccacatcctctccagcatctgttgtttcctgactttttaatgattgccattctaactggcatgagatggtatctcattgtggttttgatttgcatttctctaatgaccagtgatgatgagcattttttcatatgtttgttggctgcataaatgtcttcttttgagaagtgtctgttcatgtccttcacccactttttgatggggttgtttttttcttgtaaatttgttgaagttccttgtagattctggatattagccctttgtcagatgaatagattgtaataattttctcccattttgtaggttgcctgttcactctgatgatagtttcttttactgtgcagaagcgctttaattagatcccatttgtcaattttggcttttgttgccattgcttttggtgttttaatcatgaagtctttgcccatatcatacctcgttttatcatcctcacaaccttgtgatataactatgactgtccccatgttacacatgaggaaaccaaggacagtggttctcaaccctggctgaatattagaatcacccaaggaacttttaaaactcccattgcacagttaccacccagaataattatgttagaatctcttggtgtgtggcccaaacagcagtattttttggaatcaccaggtgattccaatgcactgctaagggtaagaaccattgcactagagcagtgcttctcaaagtgtggtccctgagcaagtaacagcagtatctgggaacttgttcgaaatgcagattctggccaggcacggtggctcacgcctgtaatcccaacactttgggaggcccagacaggtgggtcacctgaggccaggagttcgagaccggcttggccaacacggtgaaactccgtccctactaaaaatacaaaattagctgggcgtggtggctgcacacctgtaatcccagctactcaggaggctgaggcaggagaattgcttgaacctgggaggtggaggttgcagtgagctgagatcacaccattgcactccagcctgggcgacaagagcgaaactccttctcaaaaaaaaaaaaaaataaaaataaaaataaaaaagaaaagaaagaaagaaatgcagattctcagactcaccaatgacctgaaactctgggagtaggacccaagaacctgggttttaagacaccctccaggtgattctgatacactctcaagtttgaacatgggtttgaaaagggctaacttgactccgtggagtcaagagctggggaaacccaagcacaccttaggtccaggtataaaattaggctaggttctaagcaactggaatcaatctcctaatggacataccaaagaataagaactgttttcaggatggcaactagaatactgaatccccacaacacagtctttctgatccttttttaggagagacatctgccaaaggccctctcagactgtcaaaacatcctggaatatatttgcgtccaactctgcaccttgctctctattccctcacttcaaacactaacctttcccatttgtgctctcacctgaactgagtaaataagcttctaaccactcttctccccacccctctcttcttggtatccaagatgagagtggcaggcgaaagggtagttctaatgtacccaagcaaatggatacacatcctaaaacaggagtgacttatgcagctgcccctccagagtgcatctcacctgcttcagcaacacagttgccctttggtctaacctccccccctcaaccgcccccacgttcctattcctggaaaatggaaaattccatagccaaacatcaagcagacacttcccagaatgcagctcatctcctcttctcctcccgcagagatacctcaggtctataggattaagaaaggcaagcccagcagccactactcactgaccagacctggcccaacatgctgcagaaataattatcaattagtatacttgagagacagcagcgtgaggtggagaatgggttctaaactgaatgacagctgttaacagtttttggccctgtttttcctgtcctgaatcctcaactgagatcctagggatgagaaacgggggaacagcacgccctacttgagagaattagaatttgaggcgctaggaagcaaaaggtaagaaacagcttaaatgtgtggtagcactcctgaaaatatgctggggcccctcaaaaagctcaccttccctcacttcccacttcaactgattatgagcatcttgcttgattaaaagcaattcataatagtaattgagaattagtaagaaaaagcttaattaagctgagattaattatttaagctggtactcgaggttttggaagaaaagtagaaatttaatgtcaaggtatggaggaagaaaaaagtatgattggagtcaattatatcttttgacagacaggagacctgatgaatgtccctgtccctccagagtccctgaagcaccagtgaagggagagggcctggcgagacagcatgtacaggtacttgggagttgtctagtaacttgctggttggagggggagggactagctcagggcccagggggaggtctatactgaagttgctgcctttagagagctggagaggcaggaggctgaggactgaaaagagagggtgagtaattcttcatgacctgtaggatcccaaagatggcgacctgccagcctggactgccagcgaaggccagaatcgtgctgtagctctgaacccacagctcctctgcccctggcccatgagaatttcagctggagagatagcatgccctggtaagtgaagtcctgccacttcgagacatggaatcatctttctcatttggagtgatccttgctgtcctggcctccctcatcattgctactaacacactagtggctgtggctgtgctgctgttgatccacaagaatgatggtgtcagtctctgcttcaccttgaatctggctgtggctgacaccttgattggtgtggccatctctggcctactcacagaccagctctccagcccttctcggcccacacagaagaccctgtgcagcctgcggatggcatttgtcacttcctccgcagctgcctctgtcctcacggtcatgctgatcacctttgacaggtaccttgccatcaagcagcccttccgctacttgaagatcatgagtgggttcgtggccggggcctgcattgccgggctgtggttagtgtcttacctcattggcttcctcccactcggaatccccatgttccagcagactgcctacaaagggcagtgcagcttctttgctgtatttcaccctcacttcgtgctgaccctctcctgcgttggcttcttcccagccatgctcctctttgtcttcttctactgcgacatgctcaagattgcctccatgcacagccagcagattcgaaagatggaacatgcaggagccatggctggaggttatcgatccccacggactcccagcgacttcaaagctctccgtactgtgtctgttctcattgggagctttgctctatcctggacccccttccttatcactggcattgtgcaggtggcctgccaggagtgtcacctctacctagtgctggaacggtacctgtggctgctcggcgtgggcaactccctgctcaacccactcatctatgcctattggcagaaggaggtgcgactgcagctctaccacatggccctaggagtgaagaaggtgctcacctcattcctcctctttctctcggccaggaattgtggcccagagaggcccagggaaagttcctgtcacatcgtcactatctccagctcagagtttg

SEQ ID NO: 12396 - DNA, 6000 bp, Homo sapiens
actagaactaatacttggctgagtcttgggtttcccaacttccctcatctagctattggtacagcaattggggcaattagtctgacaaggtgaacaagcctgaggccggcacactactgaccagtgttgcaacgtgtgattgtcaatgggaccttgggccctttcttgttggtagcttcttgccctctagtcctggtccattaatatcatcagcttgatcgtgcctctgctgctactgaattatgaaggtagggaaaaggactaggtgacttcttaagccatcatcccaaagtctccctgtttcatcccaaagactctccccagaatgtaatgaggcttgtcagttgaagggctccttcaaggctatcagaatcagagcctgcagggctggaagccaaatccacattccccaaagctccaccacatacttccagttggggaactgatatttggatgtctttgaaatccaagaatacctactctgctcacatctggagggaaagagaagacaccggaggattaaccaccctcaaacatctccctatacagaaaaatagctggtatttatttcctagcacttctctggcttttttcctatctccggctggcaggcttgtctcagttgcagaggcctcatcccacccaaccccttccactccctattatcccccttcgtgcccaaaagtgcagctgcagactccatgagcccatccctctgaggcaccaatctttaacatgtgtctagagggtcccctgctggaacctagcagtctcgggcatggtcacaaccacaataaaaataggaaaggtcaagaaagactggcctttgtctctggccacttctagcagcttcactgcctcccaagtgattgtaaaatcattgagtctgaacaaactaccgcttgacagtgcatgccacccaggattctgtaccatggccagcacgaagctaggaattaataataactgtgagtgattatcacggaaactgtctctaggaaaaatgaccaggtttttaccattcaaccttggggagataaaatcaggcatagcagaaaaaggacaaatgatctaagagcaaatgcaggactccagatccaaagagcattcttgaggcccgattatacacctgtctcatctccctgtctcagaggcaggtgacgagaaggggaggaggtatctccatccagcccatcaaccaactccaaaccctgtgctcattctagaccctccccaacacctccttgcccttattccctgtcaatttgcctctctgtaggtctctgcttgccccgctctgttggacctgtcaagaccctctttgtctcctgccacagcctcccttcagctttctccatccaacaccagccctgattttagaatatcgccctacctaaaacccaccaatgaacaagaatggcaaattatttacccttgtgaaggctgggtaataggaacatggaggattattttattattctcattacgtttgtgtatgcttgaagtctttcataataaaacgactctccgacgacctccagggatctcagggtaaagtccgaagtctgcagactggcattcaagacccctcaggatttgtctctacccagtttaaccagctaacctcctggcactcaccatgctgcagcctgttttcccagcctttggaactcaagtctctcttgcagccctagttttaccccatgcatcttctttttacagaacacatttccccttgtgccctgcctagaaaacacctcctaatcccttggaaatctaatgcaaatgatccctggtctgggtcaccttccctaccttctgggggcagggaagagggggcctcctcagtcctgatatacaacaaatacccagtatgtgtttaggagagaccagaatgtcttggctaatagaacgtgtgcaatatttacttgaacttaggcaagtagggtaatctttcttggcttctgcttctgtctctataaaatgaagataatagcggtacttatctcacaaggctggggtaaagattcagcggtattctctgtgtaaacagtttaacacagtacctggcagagagagggggagaaagagggagagagggagagatgctgactgacttacagacagacatacttcaatcaaagaatatagtgggtaattatgtggcttgtcttaaatgaaatgcttccaaatcccacagggaaagcactgccgcttagctcttcctgggagctagagaaattcgtggaaaatcgttgacattaaagtcacgattcctttctcgggctcaggggctattcatactttggagggttttcagaagtcgaggggagtcccgggccctcctatttggaagaatcggaaggatagtgcagggtctgtgcctgggagctggcccgaaatcagggggctaggaaggcacggggtttgcacgaaaatcagccccggtgacaatccccagtctgtgagctctcggtggactcggggccccaggggtgggaacccggagtgagaaaatctgagtggggtctggtgcacggccccccacctgccagccccgctccctgggctgcggcggcctcgtgcgtcacgggcgcaggcgggggccgaggggagggcggcaccgcaaggtgagggcaccgcgctgccttaagacgccgcgcgcccccgctgcctctcagagcttgcagcgcggcgcgctggccggacgtgcgggcacagacgctgtgccccgctcctgccgcgcccgcagcgcccgctgccccgtgccagctcgcagccgcccgagccccgagaggcggccgggacgagcgcgaggagccccgaaggacctgcacgcggcgcccgcgacgccacgtctgcagcagcaacaggtaagcagcccggccctactccgggctccgtggcccccagcacccggcagggccccgagcctgggagcccacgacgccccctctgaagcgtcccgacggctgctgagctaccaggcgcggtggcccgcggtgcggccccttctcgcctttccctagccatcctcccgccctcgcgttttctctctcactttttctcgtgcgttcttttcccccttcctctccattctctcgttttttcctcatcctttccctcttcctctgcttgttctcttttcttattattttttgctttttctgtctgcgtctctcccagtctgtcttgctctctcattctctctcactctcacgctcccatttcttcttttttctttctttctccctctctgttgctcacattctctctgtctctctgtatgtatctcattctttcgctgtctctcatttcctttttgtctctctgcctctcagtctctctcgccctgcctttctgactctctccaccaccctgcacccctgcctcttttgcctttctccccagctcctttcccactcccctcggctgtcaccgacaccaagcagatccggagaaagcaaagaggatgccaaattgggaatggggatggggctgtggagggtgagggtaggggagctcaataggcatcctctctgcattttccagtctccattgcactgctgataaactaagggttttttaaccaaagcccgcggtggccggggcggcaggtggtttccacggcaaaataaagtccacagggagacagagatccaaagagacagagatccagccagagaaaaaccaaggtgaggggccatgggaaaaagatgtagagaaatagagatgcgcacacactcaaagatacaaagcaagtgtttagccagagtcctggggtgacaggaaagtgaaggacagagaaaccaacgagagagtgcacacactaaagagatagcttgagagacaggtgagacaagcagtagagtgttagagatcaatggagagagaggcagagtaatgcagagagaacttaggcagggagagacagaaaccacacggagagacacagagacaagagggtccgagaaagacagagcaagcgcacacgtgccagtgagagacagaaggagacacccagagaacccgagggagacgcagaaacaagagagttggagagacacggagacgggcagagacacagcgaacgacattgaacaggtgcgctagggacccacaaagatgaactgctggggaaatagactgagagagaaatggagagacaagagagcactagggaaagacggagacacacatgaactagcgagcgacacagtgacaggcagagacacagagagacagaatggatcagaaagagactgagggagagacgggcaagactgtgagaaagatagggagcgagagcgcaagccctgcagagaaagtgcgctagcgaaagagacacacacagagagactgagtgacaaacagagtggaagagataaatgagagtaacaggaaagagacagcgtgcacgtgctatcgagagacggagaaacagagacagacataagtgagagacaaggatgagaaagaatcaggaaacggtgagacacatacagacacacaacccgagagataaagaaaaaaagtgcgctagcgagagacactggagaagagacagaaactgacggtcgtaaacagacagaaacagagagcgcacgcgcatgcgctagcgctagcgaccaaaactccccggagccagagacagtgtgagagacaagcagagaaagcgcacgcacgcacgcgccagcaggagaaacagatgagaggaaatcagagccctggagagagacaggcagacagatctggagagtccggaaaggagccatagaagctgcccgcactggggatggagccgtgcggaaacccggggtagggggtcctgcagcgtccttgctgggcgcggaggcttctccccttgacgggtgactaactctgcctgcgtgtttcttttgtcaccagcataggcactgagtgcggtctgtgcacccctttgccacccaccggtgccggcactgagcctgcaacctgtctcacgccctctggctgttgccatgacgtccacctgcaccaacagcacgcgcgagagtaacagcagccacacgtgcatgcccctctccaaaatgcccatcagcctggcccacggcatcatccgctcaaccgtgctggttatcttcctcgccgcctctttcgtcggcaacatagtgctggcgctagtgttgcagcgcaagccgcagctgctgcaggtgaccaaccgttttatctttaacctcctcgtcaccgacctgctgcagatttcgctcgtggccccctgggtggtggccacctctgtgcctctcttctggcccctcaacagccacttctgcacggccctggttagcctcacccacctgttcgccttcgccagcgtcaacaccattgtcgtggtgtcagtggatcgctacttgtccatcatccaccctctctcctacccgtccaagatgacccagcgccgcggttacctgctcctctatggcacctggattgtggccatcctgcagagcactcctccactctacggctggggccaggctgcctttgatgagcgcaatgctctctgctccatgatctggggggccagccccagctacactattctcagcgtggtgtccttcatcgtcattccactgattgtcatgattgcctgctactccgtggtgttctgtgcagcccggaggcagcatgctctgctgtacaatgtcaagagacacagcttggaagtgcgagtcaaggactgtgtggagaatgaggatgaagagggagcagagaagaaggaggagttccaggatgagagtgagtttcgccgccagcatgaaggtgaggtcaaggccaaggagggcagaatggaagccaaggacggcagcctgaaggccaaggaaggaagcacggggaccagtgagagtagtgtagaggccaggggcagcgaggaggtcagagagagcagcacggtggccagcgacggcagcatggagggtaaggaaggcagcaccaaagttgaggagaacagcatgaagg

SEQ ID NO: 12397 - DNA, 6000 bp, Homo sapiens
agaaactgtcgcagctaggaggagctaaggaatcatgttgattacatgcaatatagtatcttggattggaccctggaacagaaaatgacagtaatggaaagactggtgaagtttgaataaaatatgtagtttagataatagtgttatatcaatgctaatttcttcattttgtaacattttaataatagaggaagctacgtgaggggcatacaggaactctttgtaccgtctttgtgacttttccataaactgaaagacatttcaaaatctaacatttaaagaggaatccatgccagcaacatgttttcttttcagacatctgttattagagatggaaataatataggaatgtatttcagggagtctaggactgtgctgatcgaaccctctcaggggagaggaagaaaaggctagaaacagatggctgagggtagagaaacagtaccactctcatttgccttccatgctcctggtggtgctaatgcatcaagttgtcctggggcataggcaaggggaaaatgttcctgtactttatgaatggagaatccatagcacagaacagttcagtaacaaataatgttcattgaatttattttacttgtccaagttcactgagcagatgcagaaatgaaatataaacggtctaatttccaggtatatggtggctgagcaagaaagttcagttcatttacaatattttaaaaatacatattttgatccagataagaaactttggtgttgcagaatgacaaatgaatttcagtgtgcacaacctttctagatttgaccatactttccttccctcacaccctgtatgaccactccaggtttaactcaggtttatagcacttgccttttctggtcttcctcttctgttttcttttgtctttggggtggttttcttttcttcctcttctccatccattctacttaccaggtgttacctgtgggtgcataacaaattaccataaaacaatgggttaaaacaacaaacatttattaactcatggtctctgtggatcaggaatttaacagtggcttggctgggtgattctggctcagggtctttcatgaagctgcagtcagagagtcagctggggctgcagttatgtgaaggcttgactggggatggatgatccatttccaaaatgactgactcacatagctctggacaggaggtttcagttcctccccatgtggatctgtccataaggtcacttgagtatcctcatgacatggctgctgatttccttcagagcaagtgatccaaggagagagtgcaaagaggaagctgcaatgtcccttatcatctagtcttggaagttacacactattcctgctgtgtcattctatttgttagaagcaagtcactaagtaaagctcacacttaaggggtggaggtgggggttaaattaatctacatctcttgaagcaaagagtactgagaactggcgaatatattttaaccaccacaccaggtgttctcctagcctcagatgtgtctgagaatttcgtcttcctctttaggctttctcttggcatctacatttacttctgcagtttcatgtgactcaaaatgaaacccaattcattttttccttccagaagactcctctcatctttcttctaagtttttaagccccataaaaagtcacagaatgttgagaaaagaaaagggaacttgaaacgatcccagcattacaggatctggatagagtcatctgcctcttttgttcctgctgcagtactaaaatttgacatctctgattcttctcaagcaagagttgctgcagtcttttgagcagcttctccgtggtgctgtcacaaatctaatattgaaatcacgcttagtcttcactgacttttaccacataatcttcttctcaaagcctaacttcacttgattctctgtgattcttttactgtacatttaaactatttggcattcagggttctagttctcaaccagtcctcttaattatttacttctatgctttcagacttcacctctcattttccattggctttcttacattcccttgttcatctagcaaactcaatatgcctgaagccaaattcagcctttccctccagaagcttcccttttgaccttgctcatagccagtgggaagaggctttgtctccacactctgtggtcccattgaatctacctgttctcctaaattctatcaagtcactgttgcccacctcatgttagagccccacagaaaatccagtcttttggaaagatgaaaaaggtgactctattgactgaaatagaaacagaagtgacaaccctgtcccaacacataagaaaagatgctgagtcatactccaattctattcagaaattggactccctggggacagagattttatattacatttgttccatgtcatgttcacatgtcagaggcatctcatgttcaccagtaaataaaaagctaagcaaatgtctgaatacgtttggtgtttggtgttccggctctgccggaaggtgacacataatggtagggatggaaagagtcattatagttaattagttgaaatgacatagaaattatggaattagcttttttttttttttttttttttttgagagggagtcttgctctgtcgcacaggctggagtgcagtggcacgatctcggctcactgcaagctctgcctcctgggttcacgccattctcctgcctcagcctcccaagtagctgggactacaggtgcccatcaccacgcttggttaattttttgtatttttagtacagacggggtttcactgtgttagccaggatggtctcgatctcctgacctcatgatccacccgcctcggcctcccaaagtgctgggattacatgcgtgagccaccgcacctggcccgaattagctttttaaagcatccttgatccccgaaaatattagatgtcaaacctcaacgcacctttactcctaaaataccattagaagaatctatagtgctgtggaacacataatgctaacaccagctatgagaaatcaatatctatcagcatccccttaacttacattggaagaaacactaaccacccaattagatttaagtagtgaggctgactcagcacacaggggtgtctaaagaaataaagggaaacaacatccagaagttctctttgtgaaccaaaaatatgccttttagaccaaacttcttagcaagaatacaagatccatcacaatctcacccaaacctgcttctagctgcatttcacgctgttctttttccacccctgtcttccaatctgggtgaccctctggatttatagatgtccctctgctcaatgtcatgctctttcctttatgccttgatcctaggcacatatgattttcttcattcaaaagaccttgtcaacacttaacctttaaagatatcgtcttttctggagaaaaggtagttgcttcactccagagaggggttggggtctaaagagctgtgagagtacacatcttcatgctatttttctcagcctcttgctcagtgcctggcaactggtagatgtttgataaatttttttcaagtaaataaaggagttgctaattcactcgtatgagtgcttgcctattgatctgaggtcaatcactcttctgaactcattgggcttttccaaagtaagcctttccccctcaatctaataatgataataataataagtgctaatattaattgagcacttactatgtgccaaatactatgcaatcttaacatgaatcatttcatctaacttcataagttctcctcaccctgcagatgaggaacctgaagcttaagacactaagtaacttgccataattataaatgagggagccaggattgaagcagagcctgtgtactgtatcattaagctatattgctggcaactaatcaacaccactgggctcatggctattggctggttactggtgctactgatctctgccgagaagctcttccacctctagccatgcagcatcagtctccctcctgctggcagagaggggcgctgagcctttcatatttacatagaaagcatggcagcagcctcagtgttggaacctgccactggaaatgtccataacaacacagttgggggctttctttgtgggccctggcatggtaagtgcaagttttgttattccttatgggttctgaaaaatgagacttcacctgttagtgactggcttcacgtcatgtacctggaggagctggcttcacatacgtcataaagatgcactctaataatgtatttagaagttgttggctaaaggtctaagcctgattctaatagcacttcctcaattaagctttttctagcactccttcaacgataacttacttcttttaccacccactcaattcctcagtattgtatctatcacgcttttatagttctttattttccacacagggctataaagaggatatttgctataaaacatggcaaacattcaattaaaaatgcaaatagctgcatcaaaatgccgattcataaaatttttagatcagatgagaaaagacccatttttctggaaaagactattgatcattgagagttaagaatacagctggttcccaatttaatttctccctggtaaacagaataggaatggcttggcaaatctacaggaaagaacatgtgtgcattgtgcttctggcttttccagatgtcagttgctgaaggtttaaggtgtgagtctgtgcatgtgtttctgaggatcagtccctgttcaaagaggcagtgggaagactgagtgggataactcacacatggacaccctgtgcatcagtgtgcgtttaattcaaagacagacctcatttgatagcaatattgacatgtcattctaatgaattagaaaaaatgagaaaatgggatgtaaatccccatctggattcatggggatagtatcagaaagattttcagtgcctttgcagaatgctagcaacatttattaaatacctaccctaggtgctatgtgcttacatgagaagccaaaggtatctgttaagctaggtaggaactgcagtcggctggttgcttctcatctggagaaagcaggcaactgggcagtgattgaagtgtccagcagggggctggcattctctgtctataagtaacactggttcctcttcagagcctcagctcagcggagctgccgtttgctggtgaagcccgtgacgtgcaaagcatcctgcctataggatttgaggatttctcagtgcagtttttttctacccactttaaacctccagattctaaatatcaggaaagacgctgtgggaaaatagcaggccaaaagttcttagtaaactgcagccagggagactcagactagaatggaggtagaaagaactgatgcagagtgggtttaattctaagcctttttgtggctaagttttgttgttgttaacttattgaatttagagttgtattgcactggtcatgtgaaagccagagcagcaccagtgtcaaaatagtgacagagagttttgaataccatagttagtatatatgtactcagagtatttttattaaagaaggcaaagagcccggcatagatcttatcttcatcttcactcggttgcaaaatcaatagttaagaaatagcatctaagggaacttttaggtgggaaaaaaaatctagagatggctctaaatgactgtttccttctgaacttggaggtggaccatttcatgcactgcaacatctccagtcacagtgcggatctccccgtgaacgatgactggtcccacccggggatcctctatgtcatccctgcagtttatggggttatcattctgataggcctcattggcaacatcactttgatcaagatcttctgtacagtcaagtccatgcgaaacgttccaaacctgttcatttccagtctggctttgggagacctgctcctcctaataacgtgtgctccagtggatgccagcaggtacctggctgacagatggctatttggcaggattggctgcaaactgat

SEQ ID NO: 12398 - DNA, 6000 bp, Homo sapiens
agaagaaatgctggaatctgtcagttttcattatcgtaactgattcaggtaagaatcatcaaggatgctaacttgtgagtggaagtttgaagagtggtaagatatttatgtgatctctaaatatctccctacagcatacttattaattacaaacaggaaactagtaattttacaagggagaaacccagcagaaactagcgaagttaacactgcttctaatgggactgattgatagcatgtgcttcctgatatgatgcattgagaacttggcaacactgctgtggtattcctgccaaagtacataacgagatctaatcatgaaggaaccctgggcaaacccaaagagggacattctagaaagtaactggcctatattcttcaaatacagttccaggttaaagtgattaaaggagactaaaaagatagatcttgtttttaatatatatatattttcgagacagggtctcactttgtcacccaggctggagtgcagtggcatgatctctgctcactgcaacctccacctcccgagttcaagcgattctcgtgcctcagcctcccaagtagctaggattacaggagcgtgccaccatgcctgactaattttttgcatttttggtagagacagtgttttggcatgttggccaggctggtctcgaactcctggcctcaagtgatccgcccgcctcatcctcccaaagtgctgggattacaggtgtgagccactgtgcccggtttgtttttatttttgttataaaggatatttactaggacaactgatgaaattttaacaaggtctgtagaatacataatgatattaggtcaacataaattaactgattttgataactgtactgcagctatgtaaaggaattccctatttttaggaaatacataaatggataagagtgagagattgagaaggattaaacaaatgaaggaaaaaatgttaacatagagaatctgagtaaaaggtatctagaatcctcgtacttgttctcataacttttctataagtctaaaattacgtaaaaacaaaacaaaaacccctaccctattttaaaagttaccaaaaataattctccttgtggttatgctttcactttgcaatagagtgaggttcatttgtttcaactagattttgccttaatttggtgttttaattgtataaaacatgtacataggttctaaagtacaaactgtaaaacagatactattcagagaggtctagcttttgcactcttcccccactcccaatcttttcttccccattggtaactatttttatcagttttcagtttatccttcagttttttaaaaataagaaaatatgtacaaatattcaaaatttccacataacaatatattctacaggtaattccatagtagtacctagagcttttttgtggaggtttttaaattttttattttatttattttgagacagggtctcactgtcacccaggctagagtgcagtggcacaatcatggcttactgcagcctccacctcctggggcttaagccaccctcttgcctcagcttcctgagtagctgggactacaggtatgtgccaccacacccggctaatttttgtagtttttggtaaagacaggttttcgccatgttgcccaggctactctcgaattcctgagctcaagggatctgcccacctcagctggccaaagtgctgggattacaagcatgaagaactgcgcccggcttttgtttcttagagagacatttgtatatactagcagaggtggacactggaagacaataaaattctcttctgagtgattctattttctcagtgaaataaaaagtgatcaccaggtgggagtgaggaaggagaggggttcctggcagtctgagaagagtacaggtgtgaaaaagtattttcaaggaatagaagaatgaactgattaagcagtggtcctcaaaccttagcatcagaatcacacaggctgctgagccccatccccagaatttctggctcacaggtctgggatgaagtcaggaacatgcattttttttctttttttatttgaaacggagtctcgctctgtcacccaggctggagtgcaatggtgcaatcttggctcactgcaacctctgcctcccgggttcaagcgattctcctgcctcagcctcctgagtagctgggattacaggtgcgtgccaccatacccagctaatttttgtgtttttagtagagatggggtttcaccatgttggtcaggctggtctcgaactcctgaccctcaggtgatctgcccgcctcggtctcccaacatgctgggattacaggcgtgagccaccacacctggccttttctttctttctttttttttttttttttagggacaaggttttgctatgttgcccaggctagactcaaactctcaggctcaagtgctcctcccatctcagcctcccaagtagctggaactacaggcgtacgccaccatgcccagctaagaacatacatttctaacaagcttctgagtggtgttgacgcaactcgtttgggacccctgttttgagaaccactggactaaggaaatatactaggactgttggcagcccaggggcccacttgaggtttgtagtcatgaatttgaagtgagaccaatcagcatcattgagtgtttgtatccagcagtcctcattttacatggcaaggttcaggcctggagtaggtggtgagctgaatttaaccagggttgggatttaaagagaacagtgatatcagtaatagatggcaccaaacaagcgtatacatttgttcttttctacttctatcttaatataaataccttataatcccaacaagagaaagaggaagcgtgaagggaagaggacatatcgaaaatgagctaagaacgcagagacaaaccagaatgttcagaatgaacaggaaaaagcttatataaagaaagaactagaaaaagattatactcaaatctggtggtagctgtgctgactcacattgaggagaaaatgtggtcacaatatgaggaaactgaagattaaaacaattagtgttttgaaaagggttgtcttaggtgtaggaaaataatatagaaaaaaatatattcatgctagattatatgaaatagaatgcacgtagttaaatgcctatttagtcattaaaaaattcctgctaggatcttgaagagatatatgcatactcatgttcactgcagcattattcacattagtcaagaggtggaagcaacccaaaaatccatcaacagatgaatgcatagggaaaatgtggtgcatatacagtggaatataatgcagtttgataaaagaaggaaatcctgtaacatgctgcaacgcagatgaacctcgaggatatgacaccaagtgaaataaacatgtcacaaaaggacaaatactgtgtgattccactcatatgaagtgtccaaagtagtccaaatcaatgaaacataaagaatcatgattgtcaagggcagggggagaggagagaaatcgtttagtggtgaagagttttagttttgcacgatgaaaaacttctagaaactgttgcacaacaatgtgaatatacttaacactattgaattgtatacttaaaaatggttaagatggggctgggcgcaatggctcacacctgtaatcccagcactttgggaggctgaggtgggtggaccacctgaggtcaggagtttgaaactagcctggccaacatggcaaaaccctgtctctattaaaaatacaaaattagccgggcatggtggtgcatgtctgtaatcccagctacttgggaggctgaggcaggagaatcgcttgaacctgggaggtggaggctgcagtgagccgagattgtgccattgtacaatctcttgtcgcctgggcaacaagagcgaaactccgtctcaaaaaaaaaaaaaaaaaaaaaagttaagatggtaaatttaatgttacatattgtaccacaataaaataaaatcctgccaatacaacaatattgcaggactaatacagcaaccaccttccttctcagaggttctaaggggaagtaagagctacaaaacatttttattctattaatttaaaaatatcctgtcccataaatcatatttataacaaacaaaaagctctggagaatataatgttcagaagagtgtacccagaaataattagaatgttagatacagcccaatgagtcaaatatttagtgcaaacaagctgcaggataacaattatggggagaataaaaactaacttcttcatttcaaatgacaacaaaaaaagggaaataacactaaactgcagggccagcagttacatagatggacagatagtggttaaattttggactaggatcaaaaccaagactgcagaatcccatcattatttcgcttaaaatacaggtgatgttttaatttgctcgggagagtttatcatagtgatcaaaaggggagaacaccatcagaaatctcatctagtcctaataatacaagtttgttttagcaaaggtcttaaaggaatacatgaaaatatgctaaaataatgtacagatgaaaacttaagaaacagaaattcagtgcttgtgctttgaaagtccatatagcatattatgtatcatttcttacaaaacacagaaaatacatatttctgcttagaatttataaaacttttaaattttgagcggggggaggaaaacattccacaattgtcaagttggaaggtattcataaagaagatataaataatttcctaaagttcagtgttggttgagcttaaagttgttccatggtagtagggctttttaatattttcaaaaggaatctgagagttgtcataccgaaaaaagaaaaaaaaaaagagggggaaaaaaaaaaccctaccaccacatatgaacataaaaaagaagagaaccccaaccaattgcaccacgaccggatggaagagcccagctgacacaaccaagacgagtctcagtgtctagggaagcttggggttctgctccttttacttcaggcgaacctgaactgtgagtatttcttgatttcggctacataaatgaacctttatttcagctaaaatttgattatctgaacattcaaagtgaaacgtgattcatggtgataaggctactctaatgtcagcagttattcgcttttagaactactgagtaaattgcttgaatgacacctctgccttgatttcaaatgagactgtctttttagttactttaagtactttaagacattcaaggtatttaagctcctactgtcaatatagtcacattgttgatactgcatttggatactgccatcaagattttgcagatctacttgcatgaattaaaagttattttcatatgcaatacattttatttctaatgtattataaattataacttattgactttaagttatgctgtctccctattttaaattactgtcttttctttattatattattactattttatagtattaccagaccatataacatttaagtttggtgtttcagaagtaaataaggtgaatattagataagagagaaagcaaaatatgctttagttcaaataataattttttaaaatgtgtttctagggacacagttaaatttgtaacaaaacctaacacactattaatagtattatttccaaagtaatatgttttcaattttcattttttatacagcagttaatgcaattttgaagcatgccctgaatagattcagtcattatcaagtcaaactaaaaacggtgaaaggttgcgactattaccaaataggtatgtatttcaacatagcaatgtgatattttcacaaacatacccaaactgcattttaaaagcttctgctcatctggagtcacagtggaatctgttgggtcctgccctctgggtccagtactcctacatgagccagttgaaaaaaaactgcaggagtaggtggtggtgcgggggtacaatgcactaatactaggtttttgaacttgtgaataggatttgccaagt

SEQ ID NO: 12399 - DNA, 6000 bp, Homo sapiens
gtggggtttgctggaatggccctggttcaggttcatggaaacatgtggtttggtaagacaaaggatgaaagggttgggagatgaggaacctttaattcctgggtggtcacccacagtttggagcagcagctgtgctgcaatcggttactgaaggtgaagttactagcggaatttagagatggatccaactcctggggagttggttcactggatgcacaaggaaatgcaaactaataagaaaatgccctttgagtttgtgtatgtgtttttcaactcaccaagtccatttctgttttgtcattagtcttttcttaaaagcgtttgaaatgcttgttccccggtaccataaagaaataccacttgaacataaatttaatttactcagcaaggccatttttacttcctgcagaaagggtacactcgccagcagttttgccacaagagtacactgaacaaaggagacagggtcatttataagctgacgtgtccaccctactgctgtgtccggtttccattggctggaacgggacctcgcattctgtatctgtcccgattggctagcaacttagaacttcttaaaaaaggcaaaggcagaggagaacaaaagaaggaggaagtaacttgtggaatgctgagaaaagtaaaaacctgcaaataaggaagaggaacaggctatgacccaatgcttgcttgcaccagtataagcatgccagggcaaatatttaggctaaattgtgggagctaagaacataaagtacattgatttctttatcacggctagcagatatttaagaatgttagcacaggtctttgaataaatttcacttctaagagaagttactatttattcctaattaaatggggaggaaagtcttcgaagaggaacctctgctttactttttacaaaagctgataacttttctgtgttattataaatttacaaacttcagactgtattttctgctgtttttaaaagtaattcttgagagaaacgctcccattgcttgctgagaaaccagctcttcagaacaaggagaggtttttcttcacactctgattaagggtgggacacccacgatcagagctgcttgtggcaggcggtgagggcctgagaacagtgtgactggaaacaaggctgtggccagacaccacttcctggagagggcagggggctcagtgagccttgaacaaaccatagctttgagtaactgcactgtgtctcactcctcctaaagataaccactggcttgggtgtatgttgaactggacaaggcttacttaccactgcccctgatttaaagaaataattatcttttgaatatgatattctaatgtgtactaaattagtcatgtcttctctttctgcataccagcctcccaatgccctgagctcctgattggttagtgagagtacttaagaggccagttgcagccagtttaaacactagtttggatagcctaaaataatttctagatgaagcacatggcttcaggaatgactaagctgtcctgtgtcctctgggttctggctctgagggaaattgataagggaccctaattctaaccccaacaatccatgtgagtcaggaaagctctcatgtccccttgctatgtatagcccaccatggattgccaaaataaatgtccacatgcctgccctttgatgatggtatctcctctgccaggtaagtatatgcctgccctttgaaacactctcactgaaccactccagatgaattttggggccagattaaaaaacacacttgatacacaaatccatctcaaaagcaggaaaattaatacaagacagaacttcaattgtaggacataactctaacacctcaaggaagtaaatcctaagggtgacagcagaacacttaggagatcaatatttggcagatgatacaggaatcaactagaactgttaggccaagagcatttggacttggacaatagaaggggaaccttgaagagacggatgggcaagatgaatgagaaccaaagaaaactattggtgatttgaatgagaaaagtccaaaggggccacttttacagaatacttgtaacatactttattaatctagtattccctgacatttactctttttaccaattgtaacaatatttcctaatttcttagaagaatgaaaataaaatttacatatatttcaattggggaactcaaaatcactgaatcctaaagaatttatactgccattgttggaataatagtttgcttaacaaagtccagagttttcaaagacagaaaaaaactggacttgatttcttccatggtcagtttctgctacctcaagtctagaacaggatacacaaatacataaatcagaacaggaaaccctatctgaacaaagttaaaaatacttaaaacatgaccctattgtgagtaccataaggtacccttattgacctgctagaacaaccaataatttctttctaaggcagagaatgaggtcattttaaagctaatttactaattgtattcctctaggcaagctatttaacctctttgagcctcaatttcctcccgtgtaaaatgggactcccaccacacatctctagggttcttagtcataaaatgctctgtcccatacctggcacaaaactgtcacttactaggttatgttctcctctctttccttccatttgctttcacaaagcctttcagaaccactttgagtcactgtttctgcccttctctaattcacagagcatttgaaatctgtatcacatattaatctaaattcttggcttgcttgtggaatctgctcaatttccagagaccctcaattagcttgtgactaaacatcctacttctgtgacctccacatgctgctaggaacatagtagaaactccaataagtatttgttgaatgaattacactgtttaacaaaaatagacctaaaaaccaaaatagtgtaagaactggcaaaacttacacctatccaggtatgcttgtccaataaacaaccagtggactgacaacggtttttaagcagtacttctgactcttcctttgtttcaacggttgattgacatctgtgatagccagtttccaagatggctcccagtgatcatcacctcctgatatttacccgtcccacactgatgcagggctggctctgtgtgaccaatagaatactgcagaagtgacactgttgacttcagaggctagatcacaaaaaggcattgcagctatggacttgttcttgaattagttgctttgaggtgagccaatcaccatcctgtgaggacagatggctgtgtgaccttgggcaacttatgagatctttctgagtttcagttttcctcacctttaaaatgagacatttcacagggtgttgtgaaaaccaaataagacttggatgtaaggcacatagcgagatatctggcacatagtaagctctcatgaaatgtggctaatgaatgatggtagtgatagtagaagctgtagtaccagcaattgattagatgtgagatgtgaaagaaagaggaattaaggatgattcgtaagtttttggcttgaataactgaaggagtgatggtatcatttactgagtttggagacaatggaggaaaacaagagcgttcttttttcggaccaaagacgcttatgcctgaacagataatattacaactatctttcaatcacttagaaatagcattccatttctgttcttctctaaattaattaaaactgttttttgttctatgtaattccttcctggaacatgatacattactgaagtaaaagtgatgggaattctaaaagccaaactactctgtaatgaacggccatgtaaccctggatgagtcactgttcttaagtaaatggtggcaaggcaaagatgaacagcagcagaacacaatctggacactttaggcagttctcacttttgttttggagagaaatattagcaaacatcatagagaatttatgaaataaacatgaaataaggtaagcattgcgggtttatgagaaatggcaaggtacttctgtaaattttaagtgaagatttactgataactaaaatgctcaggtttgatgaaattagatttctgttctctttttcagactcccactggtttaactactcaaggatgagagggagtgcttgatgcaagtcttcctccccagatgtacacacttagctttcatttagttagtaggtcacagactgattcgacaatcctgaacaaaaaaattggtttcacaattctattttttatttttaaaatttttattgttttagactagtcatggtttcacaattctttataactattcatttgatctgaggcatacttggcacttcccaggatttgccaaatccattatgaaatgccccaaacagtgtattatgttgacaaatggagatagtgcagggcaattagaaacagagtgggttaactcattagtaaccaaactgggacccaaccctgggtgcagtctgtgcttacagtgagttcctctgggcctcagcttcttcaactttaaaacaaagggtctcagtccacagatgatcatgaagttctattttagctctataatatttgattctagtaagttataagaaaactttgagttttgtttctatttttgataaagatggattgcaaataagccatccacaaacaattttacaaacgagtttgcaccaatatttgtattgggttactacagagtggctccttctatcactgtgtcatataaaactggccatgggggattaaacctgtgaacttaacttcagtcaatcgtgcaaacaaaggttactggagtgtaactagttcatgaaataatcataaggaagtataatatgtatattgttcaccacttcctcccactacagaaatagagaaatgagggttttttgaggaggcagttgccacattgaccataactattgaatttcttcaatattctgtttaatttccccttttcctcccactgtagttggtgtcatgcaagaatctattcacactgactaaagatattggaagagtgaagatcagagaattttaagtctgaaatttggcatcactgccctgaacaatataaccttagttggcataaactactcatacaggtaagagtgattattattcatttttagcttaaaaattaaactctataaaaataaacaggacctaatggtttaaattttgaaagctgatcattaagaaaggcagtcagcatattaactatgtagacagtcattagtaactgaagttaagagttgtagaacttttttcatttgtcaaattagcagagacaaaatgtatgcatgagtgacttgagatagacattctcctgaggggaatatagacttagagacattttctggagaccagttttgcatctgtaacatgtaatttttatttgatttcttaatagtactttccaaattctggaaaatagttatctagtagttttatgatccaagtttatttttgaaggagatgtacatagtagatacaagtttgggaaggtaaagatggtgacctagttgttgactgctacactgagagtcctacagagactcaacttctgtctgataaagctagcctctgcagaagtctatgtcccttttgtttggaagcatttaatattcatacagaagcaccattacctttgcagtttttagtatactatgcattatctgcacaaggtaggagctactgcttttctttaacagcatcataaaaggaagctccaatccttatgtaaaatcaaaacctactgtgagcagataattttttcttaaataaactggctcatttcactgtctgactgatttttgaactggtgaagttacagattaggttttatatatttataccagggtctacactaactgaaaccagattataattcatcaggttgcactagattcagatacaaacttacaatgaagcatatggactgttttctaaataaaaatagcaaagaaataaaattataaagacagtggtaaaca

SEQ ID NO: 12400 - DNA, 6000 bp, Homo sapiens
cacataaagtactcattttctctctcctgccaccatgtgaagaaggtccttgcttccccttcatcttccaccacgcttgtaagtttcctgaggcctcccagccacgcagaactttacagggctttgacacttgggtacacgtatctcatctaaagaaggcactgacttctgccagtatctgacaccaagctcaagctaaccaaagcctcatctttaggcctgggcaaagtttatatcttccaggttacagcagttccatgtaaagatgatgatcatgcaaggattccagccaattcttgtctcggaatcggactcacctgctgatgcaccctggggacccttagaccaggcatccagagatttccaatccctggacaggcaaggccagcacccttaaattagcaagaagaagatacagatgactggcctcctccctcatcaacccttaagaataagggatggaaatctctgaagggtgaatgaattaggaagagcactgggtggttacaggaggatgaaaaaactcaaacaacagctaaaacaagaactaggcaaagaaacaatgggataacagaaaatctgaaataagggggagaaaatggccagaatcccagccagggtgacatgtccatgactcttctgggaaaacccaaataagggagaaaaggggtggtaaccagagtgggggagctgaaatcccctccttttctagaacatctaatgattattccaccccctaattaaagaaacacccataaaattagaaacccaaactcccttctgtgcaactcgttctcacaaacacgcccgcacttctctctcttaagtgtttacttttgccttgcaataaaagcttcttgcctttcccttcaaaagagaagagaaaagtacttgaagtcaggagcagtggctcatgcctgtaatcccagcactttgggaagcaggaggactgcttgagcccaggagttcaagaccagcctgagcaacatagtgggtctctgtctcaataaaaagaaacaaaataaaagaaaagcactcgagacatataaatgaacactctcgatgaactgttactaagccacctgagtaatcagctccaaaatcaagaaccagaacattcccagcactctaaaaagtctctttggcctggcgcggtggctcatgcctgtaatcccagcactttggaaggcagaggtgggcagatcacccgaggtcaggagttcgaatccagcctctactggccaacatggtgaaactccgcctctactaaaaatacaaaaattagccacacatggtggtggccgcctgtaatcccagctattcaggaggctgaggcaggagaattgcttgaatccggaaaacagaggttgcagtgagcccagatggtgcctctgcactccaccctgggcgacagagtgagactccatctcaaaaaaaaaaataataaaaataaagaaaagaaaaaagaaagaaagaatgtctctttaggcctcctactcagaccccaatggtaatcactattctgacttctatcacaatacattggttttgcctggttttgaactttatatgtatggaatcatacagtattcttttgtctggtttattctgctcagtgtaatgtttgtgggattcatccatattgtagttgtaagtcatttcttctcattgatgtatactattccaatgtgcaaatataccacaatttatttttcattctcctattgatggtatttgggttgtttccagtttgcactgttacaaatagtgcttttatgaacattaccacaatgtcttttggtaaacatatatatgcattttggatgggcacatacctaaaagtagaactgctgggttatgaagtatgcacgtggtcgccttagtagatattgctaaacagtttccaaagtggctatatcaatttatactctcatcaatactgtatgagagctcttatcactccacattctcaccaatattcggtattgtctttttctttttagtcaatctagtgagcatggtttcattttgtattttcttgactaccaatgaggtttagcacattttcctaagtttttggccagttggctatcctcttttgcaaggtccctgttcaagtatcttgtctgttattcttttgggttatctgtctttttcttattggttggtaaaagttatttgtatattctggatatgagccttttactggatatatactttgcaaatattttatctaattctatgacttatcttttcactattttaatggtatcttttgataaccagaagttttaaattttaatgctgttcaatgtatcactcctttcctttatggtaattacttcttgtcttgtttaattccttccttaccccaaagttataaagatattctcttacatcatattttagaagacttattgttttgccatttttttttttttgagacagagtcttgctctgtcgcccaggctggagtggagtggtacgatctcggctcactgcagcctcgacctcctgggcttaagcaatcctcctacctcagtctctggagtagctgggaccacaggtgcgcaccaccacgttctgccaatttttgtatttttagtagagacagggttttgtcatgttggccaggcttttctcaaactcctgagctcaagcaatctgcctgccttggcctcacaaagttctggcattacaggcgtgagcccgtgcccagcccgttttgcctttttttgtttgtttttcgagacagagtcttgctctgttgcccaggctggagtgcagtggtgagaacacagctcactgcagcatcctgggctcaagtgatcctcccacctcagcctcccaagtaactgggactacaggcgcacaccaccatgtccagataaggtttaaattttttataaagacggggtctcaatatgttgtcccgggtggtctcaaactcctgaactcaagcaatcctcctgccttggcctccgaaagtgctgggattacaggtatgatccactacacccggcctccaaaacattttctaattttccatggatttttctccctccccaaagcatgtgggcataaaaatgaccaccggagggccttgtcaaaaggcaggttttgaagccccatctgaaaacctcctagattagtatttctgggaggtaggcttgggtatctacactttacaagttctccaggggattcagatgcaagtgggttccaggtccacagtctggtagcagagcctgcatttcctaagggcagagagcataggtctgagtcacccggtactgttagtgcccagcactgggcctaacataaaaccatttgtcataaatgaaggaaccaatggatgaaggaagaaaggaaataaaacacaatttcttatatcaagataatttgaattcttgaatgctgtaacttaggggaaccactgaagcatcatttggtcccaatttaatcatatttgaaacaaatatttttttccttgtcttcatatctctgcctaccaagcgttctcctcacctctcctattctgttgtcctgggacatggctttaagtatgggttctgcctgtctgctggccccgagaaagtggggatggcacaggagatatcctgagaggggctgttcagagttgggcagcgctcctttcccaccccaaccccccagccaacctccaggccttgcagggaaaatgcccatagaaccccattctaaatcagtttatgaatcccacctctccgggccctaagcatgcctcccagcccaaagcttttgagaaactttcgccggacctttgtcccgacccagatcctagcgtcctctatgccctgcctcctctgcacttgtagcccatgtgagttgctctctcagcagcctcttggccatctctccccacctccactcatgcctctctcgagcatctcagaaaggcccgagcctgacttccccagccagctattgtcctggcagcacagccgccacgccagcgtccccacccagtcagccagccggctgctccctggcctcgccagcaccccccgcccccccccccgctccccgccccgccccagggaggaccaggctggcagctgggagtctccctgcctgctcagccttcctccttccctccctctccctccctgcctccctcctcctccgcccgcccctgaggcagggaccgtgcaaatcgaggagaggggggacggacaggcctgatggggtccagcttagggccccggactccccactgatgctctatccaggctgggtgtccccagcatcgtgggacctggatttgtgtgcaccggggtggttcccaggccaggagggtccctctggcaggcccttggtgccctcgttttgcatgaggacccccctcggatgctctgagccaccctcctcaacccggatctaaaacccgggacacggctatcaggccagcctctctctccaccccaccccctctttctggcgtccatcccctccccaacaccacctctgctgctgcctctggctgtggacctgcacctcttccccatccccgccaggcccggggagcggggtgagcctggatgagagcccccccaacctggggctctcccaggccatggcccgtgtgctcccagggaggagccccggaccctgagcatctgctggaggcttggcagaggccccgcggggaccgtgtcttctgaggacaaaaggcggcggccagcaggcagacggagggggggggtggggggtggggggggtagggggaccggcagccaggcaggcagacgggtagcaggggccagcactggcccccctcccagcttggcagtggcatgaagatgggagtgggagtgtatagtggaggaagcacctgccgggacccccacctgccagctagttggacaccccaaggctgtgtgctgcccacctggtgttccccaacacccccagccctacccagtgcacccctccggtgcctgctttccctgatgcctgcgatttagaccagcccggctgtatccacggcaacagaagcaggagtgtcactggccgccagatcactgagggtcccacaatgtggcccgggctgtgatttacctgggtgagacagcttgagccccatcgtggattccaagacatccctgctgagagagccaaggtaagcagtcagcatccctccaccaaggatggggggctgggacttctgttctgtctccccacacatacttcagagtctccatcactgccatgctctctgtctctgtctgactctgttagtctctttctgctccatcaaggggctccttggtacccaagcctggggactcctcatcttccccccatcttccccaatcccaaatgtcccatgagaaagggaaccaccacctgtttcccctcacagggtctgtttttatcatcatggttgcgtttgggcatgaggctgtgttaatctttccttgtgtgctggctgtggaagggatgcctgggagcccggcggccgtgttcccttcacaatgcctgcaccctgggcaggctcagcctcttgcggctgctcctctccctctccctcctcctccactctcctccaggatccctggcctgctggccgggtgtgtgtgtgtgtgtgtgtgtgtgtgtgtgtgtgtgtgtgcacctgggtagcaagcaggtgggtagacatgacagagaagctgctcccagcccagaccatcccccactccttctttcctcctttccttccttccttccttccaccctccccacctccccatctctccctacaggtagcagagttttgctcactcaccactgaagatgttgccgattcccagctagggggaggaagtcactgtagggctaaaggacagtgaagtggtggtggggagcacttccaggccctaggctgcctgatggttctgtgggggcaaagaccaatcccatgacaacctgcaggggccaggaacaacatggttgtccctacagtgtgggacccagcct

SEQ ID NO: 12401 - DNA, 6000 bp, Homo sapiens
cagccagtaaggccaccagcatggcactcattgaaggttgcttttctgtcagtcaagactgaagattaaaggagaagagaaactgagactcagaaatggactgtgacttgctctcacagagctcgtgatggggctggatgtgtctatatttaattaatatcagttataaaaacttctgggtatttgaacttcctaatttgcttggattttgaataaaaggttttttgtataatcgttatcaactgtgaaaggcataaaataatgttaatgcttctgttttcctttacgataaaccaataaaatggaataaaatattcatttcattccaggaagacagatttctggaggagtgtgaaaatcaactctccttaatattaaggtgatctcaatgtatcttaaattatctaatcattgtacttattttgtttttttagattatagaaaaatcatttcaggagagttgtaatactatttagaagtttgctttgttttaggctacctctgtttagaaaaggatgagatgtaacaatagtgtacgtttggagctaggggatgattctactttacagatggaagcactgtaatgggtaaattctaaatgcggttgctactcctaagaattccatcgcagagtatttctggttttatacaaatattttgtgcagagtttgaattggagatgttacagacatgctatattgggtaggcctaggacatcctggtaaaggtgcagtgattgtcagtcagtgtttgaattgaagccttgatcatatcactgtagttcagtggagagagaaattgtgtggggtgtaggtaaaaaacaagacagtggagtctccacctgttgttccagtcatctttcctcttccctcttcccttattaaggaccctgcccaatggtaacagttgttgccaagaaaagaaaaaaagaaaaaaaaaagacccaatgtaagttcatgccaaaacaaaattctcctttgttttggtatttttaatgtaatgcattaccttatggaagtggaggaaatatttttatgtcttttgtcactcattatctttaaattattataggttaccacatatggattttatgcactagtgtttagtcaatactactaaaaaaatatagcacagcagtgacaggttggaaaatacattgttatctgcaattctgtaataatgaaatccaatgcatgtaaataccattttaaaatttattgggtctcatttactctggtttatatcatataatactttttctgtcttatgatcttctataagatcattttattgaaaatatacattttattgaaaagctatcagctctctttatggcacactattatgactatttctatttcacagcacccattggaggaaatctctaactacagtgcctccaggaaactcattggttattccagtcttagataaaattggtgccaggatttggttcgaactaatgtggtgagtcctaccctcctgaaaattactgaaataataataataacctgaaaatgtgtagagaaactgcaaattcctaatttaattctccaacttttgttgtaacaaatagttccaactttttaaagattgtatcatccgaagatctagaatggatggaggaattgtaatttgttataatccaggcaattttgatgaagatgaatattgattctttagctcaacccctctctgccactgggatttacctttagatatgggagactctttttattgctattatcagtttcagtgtctaagtatatcacatgaattggtgtccaaattgataactgatttacctgttcaaatatatggaataatgtcaaaatcctggctggtatatatgacccttacagaaattggaaatgagttattttgggaacacccaaaaattgtccccaaagatctggggcttctgctgagatgagatattgagtctcaagactcaagacaattttataatattaggttgagcaatttacctgtagttttcttactctgtaactaagtactagggaaaattctactttagtagggctgatgcaatctttggccccatcatgttgagcaccagaccacattatttcccaaagattggactgtgttatcaagtgaagtgttaataagagactgaagtattttttttcttttttgatgaaaagaaaaaaaaatatcaagttaatcactgagaacaggattttatcaaattgaggcccatatcagtttcctgttttcctcaaataaaatggagagacaaagcagccttaataatcttagtgaaaaccagattaggtgtagataagccacttttaaaaggctatttcttgcatcaaaaataaaagaggttgatttagatcaatttcctagctccattcttgagtgaaacatttatctatggttccctccatatggaatgccataaagctaggttttgtttcaaaaactattatgaagcatcaaccaatgtataggaacactgatataaaacctgtatgagtgtgacctatgcctgtgacttgacctagagtcttatctgttagaaaccactaatttgagaagcaacagtctgaacatattccctatcgctccagcaggattgttttgagctgtatttttcacaacatttgtgtatttttaaatctgcttcactgctaagtatctatacataagaacacaatagatttcatcttcctctgaaaactattgtgtcaactttcataaactttgaccagagtagaacaaggaaatgctctggggatcagaagcactctgacctggcctgcgcttattaaaaatggagcaaagcaaaaataattttagtatactctgccttcaaggccttgtcttcctgagctctggactgtcctctgtagggagcaaaagcaagtcagcttttctagggtaccgggcatatttatgccagaagttggagctttgttttcaatgtatgatctgaaagtttagcacttcatgaagtgaagtgatttggttatttatccttatagggccaaaaggctaactttacttcttccaggagccttaaggaccccaaatatggtatacctgtattttactatcattagaaattttttaaaaaagaggaaacaattgtggccactctgaattagctccaggtgtagattgaagttaaaagttgagggtcagatttatttttggtcaacctccacgggacctgcttcctgtccattgtcaataaaaatgcagctacccaacactctctgacacccttaggtgattaattgtcagaataattgggagcagaggtttgcagaagacagtagtttaatgctccttgcagtggaaaatgtaattaactgcatcagcatatatttttccttcttcatttcatctgaagctcaagtgttggtcctttgcctctatttagtgcacaatatgttggctatttaggaagatctaatagttagaaatgctgtttcttttagtcaaaagaaaggaagccagtaagaaaagaggctaatattgattcttcttcagaatcatctcaagagccaaatgtctttctggttttttaatcatacctgtatgggaaatattaccttgagggcacactcctggattgtcctgtttgagtaaattgtgtagttaaggctgaaactcaaggggagctttctgaggcacaaggtatacatgacactagaaggatgtgttcctaatgtgaacttcagtataccaaaaaagacagaaatataaagttacagttgtttcaggaagggaggaagaaacaaacttacataatgtttctctgtagttaggtagggccgaatactagcaagctcataaagcaattcacaagccctattgaatcttcctagctttagctgtgaggcttagaggtaaagtttatacaaggaagagagagagtatagccaagttacagagtgaaccagtgtctgagtcagaaatagaactccttgcttctaatgctgtgttaagtcccagcgccacaccctcacttctagacggcaaaggtggttgtgtgttcaagcaatgggagctatgaatagggccacagtggcagttttcccatgccctctcttcaggattgagaatgtaatgttttcttgtctgtcctttctctcccacaaagtttgattactcagagcagcagagcagaagtgccaggcatttgcaggctgcttgctgtgggtgtaatatatatgttcctggaaacataaaactgaagtgaggggatggatgtgttaattagcttgacataatcacctcatgtagtatacatatattaaaacatcgcctcgtacttacataaatgtagttcaattatgatttgtcagttaaacataatgcaaataaaaaataaaatgattgaaatcataaaaaatctgaatggaaaactggggagatctatttgaaatgtatcaacttgagactcacaaaataatatatagccagtgagctagaatcatgctgtgtaaaaggatcactagtgggcagactggagggactctgggcagaagggaaaagccttccattataaaagcattttccaaataaaataattatactggcagtacttattgtagaagataagttcaagccgatcatagtgaataaagcctgactttaatgttagaggttttgcagtcccataaatgctgttttaactatcattttatatttttggactcttgagtgacctacaccttagttacatttgcaatgctatagtattgcacttattgtattgagtgtgagctttcctgctcctgcaacatactcttgtagtacctttaaatatataatagatgttcaaaaaatacttgtcaaaccaaatggaatgtgcatgttttcttccaatctgggtggacagaatatcttattacacagaaatcatggatggaaggcaaatttgattatttgttccatcttgtctctcataggaggaaaatatttcctaccggtccatagtgtcagagtggtgaacccctgcagccagcaggcctcctgaaaaaaaagtccatgggtgacagaagattcattgacttccaattccaagattcaaattcaagcctcagacccaggttgggcaatgctactgccaataatacttgcattgttgatgattccttcaagtataatctcaatggtgctgtctacagtgttgtattcatcttgggtctgataaccaacagtgtctctctgtttgtcttctgtttccgcatgaaaatgagaagtgagactgctatttttatcaccaatctagctgtctctgatttgctttttgtctgtacactaccttttaaaatattttacaacttcaaccgccactggccttttggtgacaccctctgcaagatctctggaactgcattccttaccaacatctatgggagcatgctctttctcacctgtattagtgtggatcgtttcctggccattgtctatccttttcgatctcgtactattaggactaggaggaattctgccattgtgtgtgctggtgtctggatcctagtcctcagtggcggtatttcagcctctttgttttccaccactaatgtcaacaatgcaaccaccacctgctttgaaggcttctccaaacgtgtctggaagacttatttatccaagatcacaatatttattgaagttgttgggtttatcattcctctaatattgaatgtctcttgctcttctgtggtgctgagaactcttcgcaagcctgctactctgtctcaaattgggaccaataagaaaaaagtactgaaaatgatcacagtacatatggcagtctttgtggtatgctttgtaccctacaactctgtcctcttcttgtatgccctggtgcgctcccaagctattactaattgctttttggaaagatttgcaaagatcatgtacccaatcaccttgtgccttgcaactctgaactgttgttttgaccctttcatctattacttcacccttgaatcctttcagaagtccttctacatcaat

SEQ ID NO: 12402 - DNA, 6000 bp, Homo sapiens
catgaatttttttaaaaattgacatctatgcctaatatagtaaatatcaatagatataacccacataaacaaaagctctctgagatcctaaataatttttaagagtgtaaattgctctgagaccaaaaagtttacttatttgaggaatgctgatttggacaatctttcattgcttgtcagtgcctaaaattgcagacagttagaatctaatcttctgtgtttgtagtgtcctcttcctaaatacttttttctattttagtatgaagagcctactctgatcactttattttgtaagaacgggaacccagagggtctggaagcataccatatccttgagaagaatgctgaacaaaaaggctagtcagggaagatagggtgcaaatacagtcttcacctattccactgttttcccaatgatcaatcctggtgacacatatgaaagttaataagtctcatagcacaatgcctgaagtgtgaaactgagacaagagatcccattctttgcctcattccttggcgtcttgctcattgtttatggctttgactaaatgggcatcaaagagatcacctagaatttattgaaatctcatttttctggttaatacacagcacattgacccaaatggccagttatttgactgaataaaatcttttcttatgaaaattttctgaaacagaattcattaaaaatttatattatgtgaatcattttccttgtcaagactatagattctgcacagggaccctcaagaactggccaagtggtaaacttgtctccaaaacgagcctctgggttcagaaaaaagaacctctcttccagctacaaagtatgtttttctcactgaaagaagatatacttcatcatatgactcaaaaaaagtcttaatggaaaatatgcaaaaaatgaaccccttgaaagatttatttattcctattcgtgaaaattcatttcctctttcattttactgattacagttttaagagctctttgagaaaaatattttttggaaactactctctatcttcattcttacagtcattgtcccaatctaggctctaattacctcaaatgtaatggtctattctctaaaagagatcttcacctcctgttttgccccctcctgcaatccattctgtatactattatctccgtgatcattcaaagaattgtagaaaggaagcaggctgttgagcaaggcacatatgaatttgaatcttgcctctcccacttccttgtttacaatctttgggaagttaattaatttctctgtgcttgaattcattaatgcagaaaatgggagataatattagtccctactccataggattgtttgatgaattaaattagatgatgtgggcgaattgcctagaatggtgataggacatggaaagtactcagtaactaataattttattttccctcctccgactctgtttatatcctttcaattacttcctgtattccatggcttctatactctaaggcatttttgtagaactccatcctccaagcttctttccctctgtttccagcatgccttatgggtcagacaaaatcttgccctcattctcacacaaacagtacatgtttattctacatgtttattctccattcatgtcctcagcaatattctttctctctcttggaatctcttgccttctctactctctttaaattttctaaactgcagacactcaaatgtttctccacagattttgttatttgcataccctctatagttttgtggggtttttgtgtagttttttgtgaataatcacagtatttaaaatttagttacctactttagcctcctcttaagaaatattatctaagaaatcataaatttgtatggataattttattatattttaaaggtttaaaataaatatatagctttaaatttttaagcttttctttgtaccacctaaaataaaaaaatcttggtatgtctccactaggacattttattctctgggaaacactgcttaaagcaaaacttgcccatcaagaaaggaccagaaaaccttctccaacaggttcagcccatggttaatttatcttcttaatttccatacaatttaacagtcaagtatgtactgtgcttcattttctaactattttatgaataattaacttgtcacataaactgtagactcttggaggataggaaacatattttttgtttcccaaactcagccttcctccacagctttggagagatttctcattgttgtagttcattaagtatttgttaaatgattagttttcaaaaatgcataggaatactctgcagatatataatcagacatggaaaactcttgaaggtattttacctaaagcaatttagcttcactagttctaatttaaaaagaattgaggttcacagttcactctgtcctttatttttcatttttggattccactatgttccagaaaggactgaaagttgtttcaaaggaagaatgttataagaagataatataagttaaagtggataaaaaataataatgacaaaattggcaaagacataaaaattgagatatgataaaaatgaatcccacaaagcacaccataaaaaatctccacacttgctaccagtagattctatgttggttcatgatttttaatcagactttgtaaaaagagacacatgaccaattacaaagtcagtattcataaaaataaaatttaaccatttgcttaggaaaaacctagcttctcctcatactaaatcatatagagctctagggttacctaggaaacacaatatatggtaatgaataacattctcaacaatagctatcactcctcatttattgatactgttagagagaatttaaagcctttgaagcaccaaatcataaactttccccagcctatggaagacataattcatcatttaaagtaaactttgatgacatacataagaataaggaaagaatttagaactattggtaaaatagtacaactgcactacttttaagaatcttataattagggtacttattactttgttttagtttataatgatttgtaaaccataagtcgtacctagtaacaaaaagactttcttttaaaagttaattggagatgactgttaggttatcagcttgctttgtttctccacagatttgttcattataattgtattagtttgttttcatgctgctgataaagacatacctgagactgggaagaaaaagaggtttaattggacttaacagtcccatatggctggggaggcctcagaatcatggtgggaggaaaaaggcacttgttacatggcagtggcaagagaaaatgagaaagatgcaaaagcagaaaccccttataaaaccatcagatttcatgagacttattaactaccaggagaatagtatggaggaaactggaggaaactgcccccatgattctaatgaactgccttcaagtccctcccacaacacgtgggaattatgggagtacaattcaagatgagatttgggaagggatacagagccaaaccatatcaataattaacactcaaaatttacctgagttaaaatttttcatttgaattgggacactgacttctggttttatttttcttccctttttagggtcagtgacagaagaagctgcttgcgtgcaagacagaaatgaagtaaactggtaggtttccttctcgcaatgtgaaggttttgtctgtgaaataaagttgggatgtggtgatcatagccagttgtaagaaaaggatttcttgtatttctggatcccagggtttgccttcaaagctcaacaggtctggaatttttttgtttgttcagagaagaatcttaccctaggaaaactggctcacactaaccatagggaggaacacaactgccaaatggactgagatgtgtgttggtctgtcagtgtattctcttttcagtagggatgccaattcagaaacctaaattaacaaaagataggagctgaataaacatttgaaatcaaaattaagaaggggattgaaaggctaaacttgtttcatttgacatacatcagccaggatgatgccagtcttcacaagttatgacatttccatcaatcatcccaagctcttagtttccaatactgtcagcttctctttcccttacacgccaacaggggtttgtgctgcattttaaacctcgtttctcaaaactactctcagacttagttgacactgtagtcctcaagtgtatgatcttcctgtattcacatagttttgaaggccccatatacactgtacataaaaaccagaattttagtacactggagggagaccccgtaatcaataatgttcatttacttattcatgcattctttgagcatttgtttatttattaattcccatatgtattcattcaataacaattcatgaaaatgccttgtgctggacaaattgggaatacagatatgaatcagacatgatctttaccctcaagcagtgtgcagtctagtaaagggataataaatatacaaaaataatgaaactatgtgttaaattgtgagcctcaagatgaaggggttgggagaggggcactccagatggagggaacaacttaagcaaaggtacttctactgtttctaattttgacttgtattttttaggtttcctcagcctttgcccctcaggcttgcacaagctgtagctttcttgttactaggtaaacactctttagattttcctgaaaatttcatcttaccatggaacctactggaatcagtgaaaatctagatatgtcggttgtcaaggaaggagatagggtgaggaaggctgttatatagccattgtgtgagtatgcatagcctctgactccctgctatttgaatttctctgcaccaatgaaataaaaagaaataaaatttgagtaacgtcatttgctcaagggacttacctttcatttgtgcaaataaggtttctgtggtgagacaccagataaactcaacttcctctttcaacaacaaatgtgtcagttatcagcaggatccatgccgccagagtaaagctttctaccctttactccctgcaaagaaacaagagtgcttatcccagctaagctccagggtaagttaatgcctagcacctggggattggtggtttcatgtgggaagattggtgtgatcataaaaatcagaacagaggtggatgtggggccagtgtctgtattaaaattgtcactggtttctcatctcagacatcttacaacaggagcaaagataattactgttgagtttgaccagagtccaaagttaacgttaatgccatcagtcctcttcattatgccaggagcatggagtctgtgatgcagctcactctttgatgagggctctttagagagtgggaccagagaagatggcacaaagtggtaagaagagtatattcagtgagactcattgggacaacttgacatattcggccaataaaagtcaatttaattttttatggtgtataatttatctagctgcatcgtgaaggaagatttttgggtataaaatccttgctttggaaaatttagctttcagagatactgagacaaatagtagaaagcagggtaatagattctgggggctgaaagggcccatagagatccaaatccctcacaatacagtcaggaaaactgagagccagtgaagtgaagacacttaggttcactcagcttgttagtggtataggtggatctaggacctgtgtctttaaactcatgtttgccttttcctacagcagtttgcatctcccagagaatactgtaaatttatttgtgaccctgccattttttaggataggaaaggagaaagtatcccagatgacttcagagtctggtcagagtggttccttgatcctttgaaagctaattttgaccgaagttcagccttactggatagcaaagcccatgagtgaggcactcattttttcagttattattgctattactctgaatactagcacctctctccttctgagctaagatgactaaatcaaaaggagactt

SEQ ID NO: 12403 - DNA, 6000 bp, Homo sapiens
agccaacgatgaccagtgtagactttctatgctgcttcaatctgacatggagtccctgccttccacatctaaagtacccttgcaattacattggccaagataacccagaataatcttaaattaaactcagctgaatagcaatcttaatgatcctttgtcaggtaatataaaatggtacatgttctggagaacaggacatggacatctttaggggaccgttacctgccaaacacaatgagggtagtgtctaaatgagttttcaaatggacaacagtaacaacatcaacttggtgtttaaccacattgctctgtctgtcccatgcaggaagcagggaaaggaggggctcaagagtagaggacggatgtgggggtgaaagaagaggattcaaatgagccaggttgctttgtctcggggaggggggtgcacggtgggatcctctcctgagaatgactgctgaaacaataggtagttgtggcaggtggcggagatccaagctggtttgataccagccacatttccacactgccaaatatcatggcaagagaagacttgacagggaaccgaagagaagccaggaccatccctacctggcggcatcaaagagagaggactgttatgacctcctgcgggtcctgacagggaaaggtcctcttttgggggcaactgtggggacggtgcaatgccaacgtgagccaccatttgaaatgagaaacagcggtgtggcagaaagaaatgagtctggtgcagaccagtggttggtttcctagggttagaggtctaggtctaccttcttttagaagaggggcagtggtgagtccttgatgggagccccctgccccggagttcacttaagagcaggtgtaccttcctcccctgcgtggctccacgaagctgggaaagaaacgcacaggacgaccaccctagaaccccgggcctgtctggactgaaatcgcctctcccctcccacactgcagtgctgacaccccctctcccattaacatccaggaaggagggtgagcagactagggagggggagagggcaaacacccagcagtccttataggggggcggttggggcgggggtgcagacacaccaagggacggtttggtatccatccgctgctccctccagcgcggctcttcgcgacctcgcgatcctgtcctccgcccggccccgcagccgcccgccggtgccatatattatagcagcgccagaaatgtggtggtcgtcgccacgttagggtccgcggggtcctcctgaggcagcctggtgccaacccgcaggccccggctggggctcgtcctggccccgcccacctctgggtcggaactatggtggttctgtgagggggggcgtcctgcactttcgcgccgtatccctccgccccccttcccgacaccctcgcggagagcggttcttgccgcatcctgcgcagcccctgcccagtttggtgcagaggcgtggggggcgggactcgtctttgccattcggatcgctgggaaagcggtgggaatccaactgaagagcagccagaggagagctgaagagaggagggggaggccgatgacctgggctctgggcctctgaaggcaagtaggggtgcgtgaggtggggggccgtggtgtgggggtggtccgccagggtggaccggctggcaacctgccccccggaccctgacagcctggcaacgaggagacgatccgttcggagccgggcgctagagagaggtgcgcagtgcccgagatccctggctatggggaggcggtgactggtgcgggccaggccggaccaagggctgaggggctggctccagaggcaccgtcagatcgtctggaggagaaccgcgctgaccgcttcccagccagctttgcaggcgcccgcgcgcagccctcgacggtttcggtaccgagagacggctgtgggggaggctcctgcgggagaaatggccaaacgggagccgtgttggggggcgcccgggaggcagttggggggcgcctgggggggccctcgtgggccagcgtcccagctctgtgcctagcccgtgggaggtgggtcgcgttcgctgctccgggccctgattccggaaaggggcctgtggggccccgtgtcctgggtgctgtcccttcccacagactccaggttgatgtcaaagtctgtctgcgcggtaggtctggcgtattctgacaggacacagtgagcatctgtagaggagaggcttgaaataaaggaggagcacgaatattccctggatttctggaggtgtgtggggatgtggggtgggtgccaaacactggagaaccgaatcggggtgggggactgcgaccagagcaggtcaggcatccaggagcacctcttaatcttcccctctctaatggtgttccaggcgcttcccccaccttccatccccatctgcctcccccaccgtcctaaactgggggcttgaaagggtgagctttggaggtaggggtgatgagggagacatactgacaagtaccaattcacgacctgttttctagaatatgtggcgcccttcccccattttctgctgcgcagagcaaggggatgtggcgcacctagtggtgaatcctcagaattggagaagggagtaatgagaagagtatgacgtcaagagaaggagttgttatctctagaaccttgaagcagggcctaaacaaaacgagaatattccaccagcaaaaccccgaatgttgaaagacagatatcaataatatggggattcttatccttagcgttggtctctctaccaagggctttactgccacccctcatttcctgtcttactttttcatctgtttgtccataggcctgctttaaggctggccagttctgcaagaaaggcaaggaggaggagactggctcacacctctggaggttggtgagaagggggagggggcaattcaggggacagttggagaaagagagcatggcaggtggctttgagaccagtgggtgcagacccacttctactctgctggatttgcacagtgccagcatcctttttatttcttgcaggggacatgagataggtgtaggttgtgttgtgactcagaaagacctgagagcagggaccaggacacaggaaaccatagatacattgaacccttgaatgggaagacagatatttgtcacaggagccagagtgcttgcctatctaccattctccattctctcctgtatgtttacttgtctgtaggacccccttctgtcagctgtggggcttgacactacttgaacaagaaaaggagggggaaactgcaccacataagtgaaggttggtatgagagtgggtatacttttgggcggggtagtggagaccagcatgggtccgggagtgcttagggtccaatctggggacttcttggcccctcccattgccgacacactttcccaccattgttggacctgtttaataggaggcagccggtccagagagactttctcaaagcccagctgtcccacctagcattcaacatcagtctcactgcatatgtctctgcatgggatgacataattggaagagactcaaagccccatttcattctctctccctagatccacctccagtggctgctctgctggtggtggggttgctgctgacaaccaccctcaacgggtctgcacccatccaggaaatctctgtcttcctcaagcttggttgtgcctgttctacactctatctgtattattgaattactgactgagactgtgtttgggaaggaggctgagtgactactggactggatattgactctaactcttgtttccaagcttatatcctcaatcacctaaagatcagagtgtgaagaaacaaacctgtgacagatctgtggttgaggtttagactgggggaggagtatagtactggactttctttgtaacttgtaccatgactggggcagagattgagtctggtgcccaggtcaagcctgaaaagaagcctggggaagaggttgtaggtggggctgagatagagaatgatgtccctctggtggtcagacccaaggttaggacccaggcccagataatgcctggggcaaggcccaagaataagtccaaggttatgcctggagcaagcaccaaagttgagacaagtgcagtgggtggggcacgccctaagagtaaggccaaggcaatacctgtttcacgatttaaggaagaagcccagatgtgggctcagcccaggtttggtgctgaaagattgtctaagacagagagaaactcccagaccaatatcatagcctctccacttgtcagtactgattctgtcttggttgctaaaacaaagtacctgtctgaggatagagaactggttaatacagacactgagagctttcctagaaggaaggcccattaccaagcaggattccagccttcttttaggtcaaaggaggagaccaatatggggtcctggtgctgtcctaggcctacatccaaacaagaagcctctcctaattctgatttcaaatgggtagacaaatctgtgagttccttgttctggagtggagatgaggtcactgcaaaatttcatcctgggaatagggtaaaagacagtaacagatccatgcacatggccaatcaagaggctaataccatgtctaggtcccaaactaaccaggagctctatattgcatctagttctggttctgaggatgagtctgttaagacaccctggttctgggccagagataaaaccaatacctggtctgggcccagggaagatcccaatagcaggtccaggtttaggtctaagaaagaagtctatgttgaatcaagttctggatctgagcatgaagaccatttggagtcctggtttggggctggaaaggaggccaaattcaggtccaaaatgagagctgggaaggaggccaataacagggccaggcacagggccaagcgagaagcttgcattgatttcatgcctgggtctatagatgtaattaaaaaagagtcctgtttctggcctgaagaaaatgctaataccttttcaaggcccatgatcaagaaagaggccagggccagagcaatgacaaaggaagaggccaaaaccaaggcccgagccagggccaagcaagaagccaggtcagaggaggaagccctcattgggacctggttctgggctacagacgagtccagcatggcagatgaagccagcatagagtccagtctacaagtggaggatgagtccataattgggagttggttctggactgaagaagaggccagtatggggactggggctagcagtaaatccagaccaaggactgatggggagcgtattggtgattccttatttggggctagggaaaagaccagtatgaaaactggggctgaggccacctctgaatctatactagcagctgatgatgaacaggtcattattggttcctggttctgggctggtgaagaggtcaaccaagaggctgaggaagagaccatttttgggtcgtggttctgggtcattgatgcggccagtgtggaatctggtgttggggtcagctgtgagtccaggacaaggtctgaggaagaagaggtcattggtccctggttttggtctggagaacaagttgatatagaggctggaatcggagaagaggccaggccaggagctgaagaagagacaatattcgggtcctggttttgggctgaaaaccagacctatatggattgtagggctgaaactagctgtgacaccatgcaaggggctgaggaggaggagcccattattgggtcctggttttggaccagagtagaagcttgtgtggagggtgatgtcaacagcaagtctagcctggaggacaaggaagaggccatgataccatgttttggagccaaagaagaggtcagtatgaagcatgggactggtgtcagatgcagatttatggcaggggctgaggagaccaataataagtcttgcttctgggcagaaaaagaaccctgtatgtatcctgccggtggaggaagttggaagtctaggcca

SEQ ID NO: 12404 - DNA, 6000 bp, Homo sapiens
ccagcaccttgggaggccgagacgggcagatcacttaaggtcaaaagttcgagaccagcctggccaatatggtgaaacccagtctctactaaatatacacagattaggcaggcgtagcgtgcatctttatttccagctacttgggaggctgaggcaggagaattgcttgaacccaggaggcggaggttgcagtgagctgagatcgtgccactgcactccagcctgggctagagagagggactccatctcaaaattaaaataaaataaaataagttgtatcaattggatagagaatacatttcttgattttgataataaaaaagtaaattccaaagactcaacaacgacaaaagacccagtaactaacaaacatttatggcaatgttgcaaaatggaaggttaagatgtaaaagtcaattttttcttatatcccaggaataaaaattataatttgaaataaaaaatacagtaccctttacattggcaccaaaaatgaaatacttaggtatagatatacaaaaataactacaagttctctctgaggaaactacaaaacattgatgaaagaaacaagatctaaataaatggaaaaatattcctttttttttttatcataacataatatcatgaagatgtcagttcatctgcacttgatctatagactcaatgcactcccaatcaaaatccctgcaagttatgttgtggatattggcaaactgattataaagtttatgtggagaagcaaaagacacagaatagccaacacaatattcaagaagaaggacaaggtcagaggactgacactacccaactttaagacctactataaagcttaagtaagagggtttgatattggtgaaaaacagacaagtagatcagggcaacagaagacagagcccagaagtagacccacagaaatacggtcaactaatctttgacaaaggagcaaaggtaatttaatggggaaaggatagttgtttcaacaaatagtgctagattcacatgcaaaaaaaaatagacaaagaccttacccctttcacagatactaacctaagtttaaaaggcaaaactatgaaacttctagaagataacataatagaacatctaggtaactttgggtttgtcaacaactttttagatacaacaaaagcatgatccatgaaagaacaaattgataagttgggtctcattaaagattattctcctctacaaaataaactgttaagagattgaaaaagagaagccacagagaaactatttgcaaaacagacatctgataaaagattgctatccaaaatatacataagaattcttaaacttaacaataagaaaacaatcaacccattttaaaattgggtaaatgatgggaacagacacttggccaaaaaacatattcagatggcaaatgagcatatgaatacatactaaatatcacatgtctggggaattgcaaatgaaaatgacagtagaaagtccaaagttaagctaaaagggttaaaacaggtccttgtccacagtgagtaagagggacaaaaggaagtaatgcaagctgctgcacaggcaagggatatacgagtgtgcaagttcacaagcgtgcatgtgggagatggggtggggttggggacagagaggtgggtatcatgagtcagtacagctgcctctttgtcctgggcttaatgcttgtgagttatttgttttggaaatttagattttaggagccagtcagggttacacaggtgctggtggaggcactgaggagtaaaaccatggctgatgcaatctattagactggaacacattttaagaggaaataaatagcttgtaccagtcagacaggcataggtcagcatcttcttttaactttttatttactctccactttaaaaatgacaaactatccgagctggtttcctcatctggtataaggaggtagttataatacattctggtaatagtctataatgtctttacacacaaagaggttagaacagggcctttctcagttcagtaaatgtctatcatagtccctgttttctaaacgaattgacatcaaattgcccaacacgtttcaaattctcacagtaaaattgatcagcttttggtagaaccacccctctataggtaaatatcttgagagcaagatcccagcgcctccagaattaccacagtaacttgtgctggcatagttttcgatacatctgcaaactttcagaatagggaattgaacaggaaaccacaggtgaatgtaagcaccacaagaaaggggattcatttctctttggtttatactgtatgcccactgcctaggagaaagtaggagctcaatatatatttgttgaataaatgaaaggcatcagtaacgttatgaaaggggaagaacagctcaggaaggcaaagagatgtacacgcgccaacaaattccagcagacccaggctctgttctcccaagcctgtaattcattcatgagagtatgctgtggaacagagaaaatccaccattcagttaaggccatgaaaaaggcagagttaacgtggtcttcctctaatacataacattcatctccagatgtggtacagaatcatcctcacatgttttcttcatatcagcaaaatattgtacagttatagtaaatatctggtaacaaaagctgtatggaaatatatgaaaattcatcataagaatagggctcctggccaggcacggtggctcacgcctgtaatcccagcactttgggaggccgaggcaggcagatcacctgaagtcaggagttccagacaagcctgaccaacataaagaaaccccatctctactaaaaatacaaaaaataagccaggcgtcttggggcatacctgtaatcccagctactcaggaggctgaggcaggagaatcacttgaacccaggaggcggaggttgcagtgagccaagatggcaccattgcactccagccagcctgggcaacaacaccgatagtccctctcaaaaccagcaacaacaacaacaaaagaatagggttcccttttgtacctgggaaatatcagtggtttcagcaaaaaggaactttctccaagattacctataagggacataaaaaaaatcactgtcctttaggaagcaaagaagaggcaattgatgtttgtagtggtgaggcatgagctccaaaatagatcttccccagagactgatccacgggtaaagaaagtcaaggggaatagacttcatcaggatggtgagtgtattaggttcatactgctgctttaaccaattaccacacatagaagggcttaaaataatacaaatttattattatcttacagtcctagaggctggaaatctgcaaagggtttcattacactaaaatcaagatgttgccagaggagctatccctctggcatttctagggaagaatctgtttctttgtcttttccaggttctggagacagcctgtatttcttggatcttggcttccttccatcttcaaagccaacaatggccagtgtagaccttctcatgatgcttcaatctgatattgagtcactgcctccctcttccacatttaaagtacccttgcaattacattggccaagataatccagcataatcttaaattaaattcagctgattagcaatcttaatgatcctttgccaggaaatataaaatggtacatgttctggagaacaggacatggacatctttaggggaccgttacttgccaaacacaataagggtagcacctaaatgagttttcaaatggacagcagtaacaacaacatcaacttcgtatttaaccacattgctctgtctgtcccatgcaggaagcagggaaaggaggggctcaagagtagaggacggatgttggggtgaaagaagaggattcaaaaggagccaggttgctttgtctcggggaggggggtgcacggtgggatcctctcctgagaatgactgctgaaacagcaggtagttgtggcaggtggctgagatccaagctggttcgaataccagccacatttccacactgccaaatgtcatggcaagagaagacttgacagggaaccgaagaggagccaggaccatccctacctggcggcatcaaagagagaggactgttatgacctcctgcgggtcctgacagggaaaggtcctcttctgggggcaactgtggcgacggcgcaatgccaacgtgagccaccatttgaaatgagaaagagcagtgtggcagaaaggaatgagtttggtgcagaccagtggttggtttcctagggttagaggtctaggtctaccttcttttagaagaggggcagtggtgagtccttgatgggagccccctgccccggagttcacttaagagcaggtgtaccttcctcccctgcgtggctccacgaagctgggaaagaaacgcacaagaggaccaccctagagccccgggcctgtatggcctgaaatcgcctctcccctcccacactgcagtgctgacaccccctttcccatcagcttccagaaaggagggttaggggactggggagagggagggggcagacacccagcagtccctgtgaggggggcggttggggcgggggtgcagacacatcacggggcggtttggtatccatccgctgttctctccagcgcggctcttcccgacctcgcgatcctgtcccctgcccgggcccccagccgcccgctggtcccatatattacagcagcgacagaaatatggtagtggtcgccacgttagggtccgtgggggcctcctgaggcagcctggtgccaacccgcacgcccaggctggggctcatcctggccctgcccacctcggggtcggaactacggtgggcctgggatgggggcgtcaagcactttcgcgccgtatccctccgccccccttcccgacaccctcgcggcgagcggttcttgccgcatcctgcgcagcccctgcctactttggtgcagaggcgtggggggcgggacgcgtctttcccgttcggatcgcggggaaagcagtggctccaagtgagccagaggagagctgaggagaggagggggaggccgacgacctgggccctgggcctctgaaggcaagtgcgggtgcatgaggtgggggtccgggttgcgggggtggtctggcagggtggaccagcaggcagcctgccccgcggaccctgacagcctggcaacgaggagacgatccggtcggagccaggcgcttgagagaggtgcgcagtgcccgagacccctggcgatggggaggcggtgaccggagcgggcctggccaagggctgaggggctggctcgggaggcaccgccagatcgtttggaggagaaccgcgctgaccgcttcccagccagctttgcaggcgcccgcgccccgccctcgacggtgtctgtgcccggagagggctgtgggggaggctcctgcgggagaaatggcggagcgggagccgctgtgggggcgcccgggaaggccgttggggggcgcccggcgaggccggcgggggtcggcgtcccggctctgtacccagtccgccggaggtgagccgcgtttgctactccgggtcccgattcccgaaaggggcctgtggggccccatgtcctcggtgccttcccttcccacaggctccaggttgatgtcaaagtcttgtgtctgtgcggtaggtctggcgtattctgacaggacacagtgagcgtctgtagaggagaggcttgaaataaaggagcacgaatattgcctggatttctggaggtgtgtggggatgggggttgggcgctaaacactgattggggacccgaatcggggtaggggactgtgaccagagcaagtcaggcatccaggagcacctcctaatcttcacctctctaatggcgctccccccaccttccatccccacctgtctcccccaccgtcctaaactgggggcatgaaagggtgggctttggaggtgggggtgatgagggagacatactgacaagtactaattcacaacctgttttctagaatatgcg

SEQ ID NO: 12405 - DNA, 6000 bp, Homo sapiens; identical to SEQ ID NO: 1365

SEQ ID NO: 12406 - DNA, 6000 bp, Homo sapiens
tctcaagattcttgggatctttttcttggattgtgaagatccagtccccagaatcgctgccccactgagtcttggccatctgtttccgagttggaatcctcggagctcgagtcttcttggctctgctttgccctccatctcttatacctgtcgatgagctcggtcaagtaggaagttttctttgtatcgcgtagtataaacttgtgcttcaataactccttagcagtgggtctaaagctcagctctttattcaaacaggcctccacaaactccttgaggggtttactgtagttttcttccaacgttggtgggttgttctttggaataaggaataaaactttcatgggatgcagcttggaataaggtggttctccttttgcaagttaaatagttgttatgcccagggaccagatgtctgcctttgagtcataggccgactgtttgatgacctcgggtgctatccagaacggggtgcccacaaaagtgttccttttggtctgggtgtctgccagttggccagccatgccaaagtccaccagcttcacctcgcagtgctcagacagcaggacgttggccgctttaacacctctatggattttcttctccgaatggaggtaatcaagtcctttcagtatttctcttaatatagtaatgatctgggtttcatctaacgggccaggttctaacagatctagtgtggagcctccatcaggatattccattattatccatacttttgtatccttcatacatccttcatgtatccataatatttggttacgtatggactgtcacactgactcaacactgtgatttcttgttgaatgtcctctatctcatcttcagcttcttccagatcaatgatttttatggcaaccactttctgagtccaactgtcaatgccttagaacacctcgccaaaggagcccttcccaatgttctctagttttgtaaaaagactttctggctctctgcttggctgttattggtgtataagaatgcttatgatttttgcacattgattttgtatcctgagactttgctgaagttgcttatcagcttaaggagattttgggctgagatgatggggttttctagatatacaatcatgtcctctgcaaacagggacaatttgacttcctcttttcctaattgaataccctttatttctttctcctgcctgattgccctggccagaacttccaacactatgttgaataggagtggtgagagagggcatccctgtcttgtgccagttttcaaagggaatgcttccagtttttgcccattcagtatgatattggctgtgggtttgtcataaatagctcttattattttgagatacgtcccatcaatacctaatttattgagagtttttagcatgaaggggtgttgaattttgtcgaaggccttttctgcatctattgagataatcatgtggtttttgtcgttggttctatttatatgctggattacatttattgatttgcatatgttgaaccagccttgcatcccagggatgaagcccacttgatcatggtggataagctttttgatgtgctgctggattctgtttgctagtattttattgaggatttttgcatcgatgttcatcagggatattggtctaaaattctcttttttttgttgtgtctctgccaggctttggtatcaggatgatgctggcctcataaaatgagttagggaggattccctctttttatgttgattggaatagtttcagaaggaatggtaccagctcctccttgtacctctggtagaatgcggctgtgaatctgtatggtcctggactttttttggttggtaagctattaattattgcctcaatttcagagcctgttattggtctattcagagattcaacttcttcctggtttagtcttgggagagtgtatgtgtcgaggaatttatccgtttcttccaatcatgagtgaactcccactcacaattgcttcaaagagaatagaatacctaggaatccaacttacaaggaatgtgaaggacctcttcaaggagaactacaaaccactgctcaatgaaataaaagaggatacaaacaaatggaagaacattccatgctcataggtaggaagaatcaatatcgtgaaaatggccatactccccaaggtaatttacagattcaatgtcatcctcatcaagctaccagtaactttcttcacagaattggaaaaaactactttaaagttcatacggaaccaaaaaagagcccacattgccaagtcaatcctaagccaaaagatcaaagctggaggcatcatgctacctgacttaaaactatactacaaggatacagtaaccaaaacagcatggtactggtaccaaaacagagatatacaccaatggaacagaacagggccctcagagataatgccacatatctacaactatctgatctttgacaaacctaacaaaaacaagaaatggggaaaggattccctatttaataaatggtgctgggaaaactggctagccatatggagaaagctgaaatgggatcccttccttacaccttatacaaaaatcaattcaagatggattaaagacttaaatgttagacctaaaaccataaaaaccctagaagaaaacctaggcaataccattcaggacataggcatgggtaaggacttcatgtctaaaacaccaaaagcagtggcaacaaaagccaaaattgacaaatgggatctaattaaactaaggggttctgcacagcaaaagaaactaccatcagagtgcacaggcaacttacagaatgagagaaaatttttgcaatctactcatctgacaaaagggctaatatccagaatctacaataaactccaacaaatttacaagaaaaaaacaacctcttgccaacaagtgggcaaaggatataaacagacacttctcaaaagaagacatttatgcagccaaaagacacatgaaaaaatgctcatcatcactggccatcagagaaatgcaaatcaaaaccacaatgagataccatctcacaccagttagaatggcgatcattaaaaagtcaggaaacaacaggtgctggagaggatgtggagaaataggaacacttttacactgttggtgggactgtaaactagttcaaccattgtggaagtcagtgtggcaattcctcaaggatctagaattagaaataccatttgacccagccatcccatttcttggtatatacccaaaggattataaatcatgctgctataaagacacatgcacacatatgtttattgcagcattattcacaatagcaaagacttggaaccaacccaaatgtccatcaatgatagactggattaagaaactgtggcacatatacaccatggaatactatgcagccataaaaaatgatgagttcatgtcctttgtagggacatggatgaagctggaaaccatcattctcagcaaactgtcgcaaggacaaaaaaccaaacaccgcatgttctcactcacaggtgggaattgaacaatgagaacacatggacacaggaaggggaacatcacacaccgggtcctgttgtggggtggggggagtgtggagggatagcattaggagatatacctaatgttaaatgacgagttaatgggtgcagcacaccaacatggcacgtgtatatatatgtaacaaacctgcacgttgtgcacatgtaccctaaaacttaaagtataataataaaaaacaaaaaagaaaaaacaccacaaagcagaattcataatataactatggttatatatatatattttagggctcttccttgaaataattaagaaagtattgatacaatcttttgaagagagttttaaatttcatttattggatatatcttcctctaggtaataataaaaatacatgaaagaaaaattcatgtattttggtcactactgcaagaattaaagaaagaggaaagaaacatgaaaggtggcttgccagttaagacaggtttattttaaagaaaacaaacccgagaggagccttttggctgagttaggttagaggcacacttttttacagactaagagtttttaaggattcagggtgggagagtttattagaggcttggactgcttctgtgtttctttgttgtgtttatttgggagggatagttgtgtgtttgttcccatacatatttttttgcagctgcaagcatacaccccaagtctgcttttagcttccctatcttagtgcacctgaagggagagggaaaaaacaaaaaaaacaaaaaaaacctttctggatctgcctttaggttctgcatgccaggcaggcccgactgcacagggagtgagccgtggcgctcaggacgtccacttcctgggacaggacggccgggtcacggatccgcgggagccgggaggcccgcgggccgcgcacagccctcgggcggccgggcaggccagagcccgaggccactccgggctcagcgtcgagcggctggtcgggtctccatgcatcacgccggggaggggctgcggcgggcgccgggcctccagcgaactgccgccaccgctgccctgccactgctgctgggctggagctgctatgcctggccccgcctagagccttttcttttctttcttttttttttattattatactttaagttctacggtacatgtgcacaacgtgcaggtttgttacatatgtatacatgtgccatgttggtgtgctgcacccattacctcgttatttacattaggtatatctcctaatgctatccctccacactccccccaccccacaacagaccccggtgtgtgatgttccccttcctgtgtccaagcgttctccttgttcaattcccacctatgagtgagaacatgtggtgtttggttttatgtccctgcgatagtttgctgagagtgatggtttccagcttcatccatgtccctacaaaggacatgaactcatcattttttacggctgcatagtattccatggtgtatatgtgccacagtttcttaatccagtctatcactgatggacatttgggttggttccaagtctttgctattgtgaataatgctgcaataaacatatgtgtgcatgtgtctttatagcagcatgatttataatcctttgggtatatacccagtaatggggtggctgggtcaaatggtatttctagttctagatccttgaggaattgccacactgtcttccacaatggtttaaccagtttacagtcccaccaacagtgtaaaagtgttcctatttctccacatcctctccagcacctgttgtttcctgactttttaatgatcgccattctaactggtgtgagatggtatctcattgtggttttgatttgcatttctctgatggccagtgatgatgaacattttttcatgtgtcttttggctgcataaatgtcttcttttgagaagtgtctgttcatgtccttcacccactttttgatggggttgtttgtttttttcttgcaaatttgttggagttctttgtagattctggatattagccctttgtcagatgggtagattgtaaaaattttctctcattctgtaagttgcctgtttactctgatggtagtttcttttgctgtgcagaagccctttaatttaattagatcccatttgtcaattttggcttttgttgccattgctgttttagacatgaagtccttacccatgcctatgtcctgaatggtattgcctaggttttcttctagggtttttatggttttaggtctaacatttaagtctttaatccatcttgaattgatttttgtataaggtgtaaggaagggatcccgtttcagctttctccatatggctagccagttttcccagcaccgtttattaaatagggaatcctttccccattgcttgtttttctcaggtttgtcaaagatcagatagttgcagatatgtggcattatttctgagggccctgttctgttccattggtgtatatctctgttttggtaccagcac

SEQ ID NO: 12407 - DNA, 6000 bp, Homo sapiens
tccatcctgtgcacaggtgagacttgctagaaaatgtcccactcatccctatccctcaatggcatctggccctgggcttacttttattctccccatttttcagcttcattgaggcataacttatataccataaatgcacctattctaagtgtaaaggttgagttttaataaatgtatacaatcatgcatccatcatcatcacaccacatagttttggaatacttccatctttcctaaatattccctgtactgcttagcagtcatccctgccccaaccttcagacccaggcaactatttgtgagttgtctataatttatggttttgtcttttctagcaatttcatattaaggaatcatatagtatatctggtgtctttcattgcatacgtttaagattcgtccatgttgtaataagtatcaattgtccttttttattgctgtgtagtattccattgcctgggtaagccacattttgttaacccacttgctaacataacagacagacatttgggttatttctcatttgattttacaaaaaatgcttcaatgttcatttttcttactagtctttgtgtagatgtatgttttcatttattttgggtagaagcctagaagtgaaattgtggagctatatggtaaatgtacaattttcattgatttgaggcacctgaacaggattaagaagtaggaagctgaaagtaagccatatgggaatggtacacatggttgaggatatagcagagaattccaggaaaaggaagattactgagaagaaagatagaaatgcattaagagaaaaattcatctacttaatagtttgtacttcaatatatgcaggaagcctaaacattttatgtaatcacaaaattgtctcaatctattataatagtagaatttcacctggatcatagcatacaccattaggcatgtgtggatggacaagtacagtgataagggcatctataaaggtacctaagtctgccaacagcctacatggttgtccacttttacagagccattaagtttaatcatgacaagaatttgcctttaacaaaaaattccatttcaaagattcaattggaatttctactctttgcttctacctcttggctttctactctaccatgtagagtagaatagtacaactgttccatggcacagttgtatttattttacctggtctctgcagaggccattctgaacagtaagctccccttggaatatgaaactgtaccaatcaggttttaggaccagaagtaatgaaagagaactttgtgacaacagaaataattattacatagctccaaacacacccacatgtcgaattatattatcctataattgatctaacccaattaatctataacaaagaaatccatccaacttcctagtgcaaaagtataaaagaagaaagcttgatcattagagacttaaagattgagagttctagtcattcaattttcagttcttaaatatacaaacagattttgaaattgagtaagaggcaaaaagtttatgcacttcatctttctcccattggagagatcaccccaagcaccctggatgatttgggcatagatgcccaagagttcagtgaatctggcttaccagggattaagatatatagggaggacagccagctccaggaaggtttttgacatatctatcacagcagagagtacctttttcattaatgaagacccacagaaatatctgttgcacctcagtatcaggaaaaaaaaaacccatgatcctcttggaagaactgaattatttttatcctaagtggttctcgagtgtggtcccaaccagcagcatcctcatcacctgggaccttgttcaaaatgcacatactcaggtcccacgccagacctaccaaatcagaagctctggaggtgggacccagcaatctgtgttttgataagccttcctgatgattctggggcaagccaaaatttgagaaccactgtcctgtttactgatggccgagaatcttagaaccaaattggcagcttctctctggcagctgttttctaacccctctccccaccacctgagaggtagagaaggcttcttcagcacccttagatgcccagctccttagagacttaaaaaaacatttttacaacaccaactaaattgggctgtgaaccagaaaacacaacttcagaaaattggtaacttattcattcaacttctaatacttttctgagtcaaaaagctgcattaggattgtattacaattccttatctaaaaccaagtagttgttttgaaaatcttggatgataatattgaccacttatgtactaaaaacaaaaaaggatttcatcattttgtataggccaagtgcctagctaaaaatgattaacaagacatggttatcttttgctagtgaattataaggttgtaaaagagatacaaaagcaaatgcatttaaattatctatcatgaatcactggttagcctggaaatctcttgttctttggttaatagaacacgcagaaaacctaagcctacaatgccaaatgagcaaatatggctcattgtcaggaactgagtgtttttcagctcttgtcactgatttttaacctttcagaagccaaagagaatctgtgtttcatcttagttctgttgagaacttgtgagaccttgggtgagatactttccctactctggacctcatttctgcctctgcaaaatgagagcatttgatttgatcatgtctagggtcacttccatctctgatattctgggattctggaattctagagatctaagacccccactgctccagtactactccaatacaactactctctcttgaccgctcttgatcagaaggaagagggagaagaaaaagtattccagtggctgcagcctgctgaaagcatgagtgagatctgggaattcagataatctcagaaatcacatgcaagcattacagaacttacaaaacagtgccatgtggagatcggctgtggtgtgaattggaagacatggtttgctccttggtaaatgatacacaggagtcccagggagattttatcattagtttgctgagaacaagatgtgaaccctttaaggagcccttttctgtagagacaatcttaaagaaccagcccagtgtatgaaattactagagtgtatatatctgaaagcttaggaacttgggtttatgcaaacactcccccgcacccccattcccatcaaaggcagttatttagctgagtgattcaagctgtggcaataacttataaagggtgggggataggtgtggtttgggggacttaaaccacatctgtcttccacccttcatgaaattaaggaggtaattgattcaattcatccacttcactttctctgaagaactgattgcccctactaagtataaagaacaacctttgttgttccccctgttcattagctagccaaatactttgctctttttcacttcgctccccagactactttctaatatggttatatttatgaacacctcactacatggtttctagctgagagattatgcattgcatttgataatttcagagaatatttcttagcagcttcaattagtaactacactccaactgctagcttcctgctcccaaacagtgcccccaccacaaacacatacatataaagcacatggttatgttttctgtaaaaagtagcttctctggctggtactgaggtggttgccttaaatgtgtacttctttcagttgatgtaaacatcatctacatgcccatcatccctggagtcacctatttcatttcttcatctgcaaatgatgattttcattcttaaaagttcttttgtgtcaggagcttgagcagtgatgttctgtattgttttgttttggaataaggcaggttaggttccctttaaccatttctagagagaaaaatcctaaacagccccttaaaagaaaacatggcattaaaacagacagtcaaacagtaaaaagtggttttattaggacatttagagacaaagcaactggtgctgtgcctggatttttcatctcttaaaaggttgttttggctgggtgtggtggctcatgcctgtaatcccagcactttgggaggctgaggcaggcggattgcctgaggtcaggagttcaagaccagcctggccaacatggtgaaaccctgtctctactaaaaatacaaaaattagccaggcatggtggcgggcgcctgtaatcccagctactcgggagactgaggcaggagaattgcttgaacccaggaggtggaggttgcagtgagccaagatcgagccactgcactccagcctgggtgacagagtgagactccatctcaaaaaaaaaaaaaaaattaaaaaggttgttttgatagtgtacagcacagcctggataactgcaaagttggggtttaccacgtgacagagctaggtattaagcccaagtgacctgaatgatcactccttggaggtgacataaaccctgtcgaagtgtaaatgatctgttgcttcaccatctctctgatattaaattttgaggagtgggttcaaggttgtgcttcaggggacacctacacttatttatcatgtaaaacaaaatgcactagactaccatgtgattgcagggggataaatggtttttttcttaaaaaaaattgacaaaacctatatagaccatcctgggtagatatgaaaacagggtgattctaataataaataagacgatttaatagggtctagttggtcccaagattccccaacagggaagaataagcaactgcagagcatttccccagccccctccctctccttatgacaggacacgccaataaaactccacctcctactcttcagtgccagatgggtaagcatttagccaagcatgctgggagacacacagaactgaagcaaaggagtatctggatgtcttggattttcttcccattctgttctgttctgttctcctaataccatctcgttactagacgtaggcattggacgtgacaatcaactgcatttgaactgagaagaagaaatattaaagacacagtcttcagaagaaatggctcaaaggcagcctcactcacctaatcagactttaatttcaatcacaaatgacacagaatcatcaagctctgtggtttctaacgataacacaaataaaggatggagcggggacaactctccaggaatagaagcattgtgtgccatctatattacttatgctgtgatcatttcagtgggcatccttggaaatgctattctcatcaaagtctttttcaagaccaaatccatgcaaacagttccaaatattttcatcaccagcctggcttttggagatcttttacttctgctaacttgtgtgccagtggatgcaactcactaccttgcagaaggatggctgttcggaagaattggttgtaaggtgctctctttcatccggctcacttctgttggtgtgtcagtgttcacattaacaattctcagcgctgacaggtgagtttcttttctccattatatttgccaggatgtgaaattgggcaaaaagaaaggaaagcttgtacttagcatttactggctactattctgcttttctcacactctgtaacgtggatgtgagattggaaaatctggtggcatttaaaataaaagttagtgtaagaatgttaaaatttctgtgttagcacggaggagaagttgaaattgcatgctttatggataatttattcttattgtttgctcggaagtatactgaacggggtttttatttttctccagtttattaagtaaagcaaattgttccaggtgtaaaggaaaaaaattcatgctttatacattagtgcagcctagtggtgcaatatagtcaacatgaaaaccaggataggtgtgaaattgaccacatatgtataactgtatattggaagagtggtaaaaagacacaggcatctaatttatttgaaattcatcaaattagctaatggcagaaaaacggtgaggttttcaactccctg

SEQ ID NO: 12408 - DNA, 6000 bp, Homo sapiens
cgctaagtaacttgcccaaggtcacatatctgactagtagtaaagctgggttctgggcttgtttttactttcaagaattgagtcaaatgtagtcccacttcattaagctgctgggatgggaggagcaggaggggcagggcctggatgggtgaagcagccaagaggctcctatgtaacttcctatgaagaggtagttgtctccaaacatgtggaaacaaattgagaatgttctgcttgtattcaagctgaaagacattttcattcttattgggtttgcatcaaattctcattttgctagtcttatacattagagtatcaaccaatggtcccatgtagctttaacaaatgatctaataaattgagagaagcattggccagagaaagttggagtgcttggaacaggccttggctggctgtccagctccacctgggggagacgggaggtgtgagctggcactaagaggccctctgcctgtctaacttggaccagggttgcttggggctaaaagagagcccaaaatgttcatagcagcattattcacaatagtcaaaagtggaaagaactcaagcatccaccaatgaatgagtaaatgaaatgtggtgtatctatacaatggaatattattcagccataaaaaggaatgaagtgttgacctatgctactacattgatgaacctgaaaacattatgctaagggaaaaaagccagatgcaaaggccacatattgtgagattctgttttggtgaaatgtccagaataggcaagtccatagaaagtgaaagcagatttatggtttctaggagctggaaggtggcggggagtctggagtgactactaattggtatgagggttctttttggggtgttgaaaatgttctgaaattagatagtgatgatgattgcacaactttgtgtatatacaaaaaactactgaattctacactttaaagggtgaatattatggtatatgaggtatatgaattacatctcaataaaaacaggcaaacaaacaaaaaccagaacaacagcaacaaaaaagagaacacaaagtccacactattaagacccagagcaaaacaccgtcttggccggacgcggtggctcacacctgtaatcccagcactttgaggggcggagacgggcggatcacaagatcaggagatcgagaccatcctggctaacattgtgaaaccccgcctctactaaaaatacaaaaaattagctgggcgtgttggcaggtgcctgtagtcccagagctactcgggaggctgaggcaggagaatggcgtgaacccaggaggcagagcttgcagtgagccgagatcgcgccactgcactccagcctgggcgacagagcaagactccatctcaaaaaaacaaaaacaaaaacaacaacaaaaaaacaaaaacaagcgaacaaacaaaacaaacaaacaaacaaaaaccactgtctgatgaagctgggttgtgggagaaagaccttgagctgagagggaatccagcctggatttaagccttggcatgaccttggacaagttctttcacctctctggggcctcagttttcttatctatttaatgacattgtgagaaaacattttcccaatgaacttttgaaaactataatatgcttatttaaaactgtactcactagttacaagcaaggcattattatagtgctggagggttaaacagagagcttagaacgtttgataaaaggtaaccttccatcattgccgatgtaaatcagggaactgaagatgcaggcagtaccctcatgtgctcagaaggattacccattcctgagcagaaactgctcacttgccctctcattcctctgggaatattccaggtttcctctatttggattggatatcttaatagctttaaaatctcaaataaagggtttatgtccactccagttatttagggcttcctaacaagccttttagaaagagacttaattaaaaatccagtggaatcttaaaccatgcacattacactctatccaataaaggactcccccttaactcttccaaagcaattgaacttactgcacgagacttgttttgcctttgcaaacagggaccgattttctccctcatatgtatccttataactgattcaatatctgattttcttttttctttttttttttgagacggggtcttgctttgtcgcccaggctggagtgcagtggcgggatctcggctcactataagctccacctcccgggttcacgccattctcctgcttcagcctccctagtagctgggactacaggcgcccgccaccacgcccggctaatttttttgtcaatatctgattttcttagtactggggccatgttcagaatctttattaagacgagttcataaaaataagaaaattattttaaccggatacataattctgtccccctagatcattaaaatattcaccttttccacttgtctagtattgaaaaaccaagtcccaccaggtcacagtcaagtagtgtccaagcaggggtaggggccagggagtcagctcacccttgctctcctgcctgctcctcaatcccagggatgttcaggccacatccgcggggaattcccgggggctctagccacctcatctcagaagtgcagtacactggagtgtagcaatgcctgcaaggtttgcaagctctccttacaggtttgtttggggcagggggagtctagtgtcttaagtcactagaaggtgtgtttcgttttttccttcaaatgtattttgtttacttatttgaattcaaaatcgccccttcccacaagtgaagggatccaaactctcggggaaccagcaagaacagcctgatgtgcatcctacaaaatactccactgcgcggacgggcttttgactgacagcctctttacagggcgcacagctgtgtggggaggacagcggagccccttcactgtctgcacttacggaaaaaaatgcgagcgcgcgcggccgggagttccagccagcgaggggcagtgagataatgaatgtgaaaagcctccaggcgggagattgtaattcgcgccggattcagttcacagacgcgaaagccgcaggattggggtgggggcttcattttcaaacaaggagacacatttccagtttaggctttatagctagagacagtgtgtgcaatcttggttttcaacagtgtctgtttttttcgttaaaggtatctgaatgttgaagttcgtcgcgtaacaggcccctactacctaccccgccttgtccgtccccccacccaccccggggcaagagggctgctgtgtccagacgatggcgctcccggccagtgcaacccctctcccctactgtggcaagaagactagtctggaacaagtttcaaggtgtttactgagattttgaaaggcttctcgacaggagccgtaacttttagtagccggcagaaatccattcccgtgaccaaggttattgagggaacgagtgtccgaatcacgcccctttagttttgcccgaatattcgaattttccgtggtccccgcggagcgagatcctgggcgcaccgcaggggaactgtgacgcacggggacagagatccgcggtgtggagggcgaggggggaggcctgagagggatggggtcgaaacgagaaccccagaagggcatgggaaaggagaaagaccgagaggaatcctgactgaggcagggatcgccggtcagccagaggcttcttggtttagccgcgtgacacctccgcacctttcccgcggctgcggcgcagctccttcagccttcctgactgccccgtgccgctcagtagagaatgccgagcatcccgagagggagaggcgtcagagcctctcgtcctgagtttccttgagaagcggggacccaagagaagagctttattgcctgttttactttttcccaaagcgtcccttggcttccgccgcctggctgccggcagctggaaaggagacgagctcccgctcccgttcgcccccaaactgaggaccgagtggccaccaatgccttccctaggtcccagggtgcagacccgctccccacttccagagtcgggcgcagggtacatctctttatggagagtgcaagacctggaccggactgagcggctactcgcagctgccgctaagggagccaagaggctcctggcgagaaagggagcggggttaagttccctagggattagggacccagattgggggtgggagctcccagcagtagtcccctgttccccgcgggacacagaaggctctagacaggcaagggcatggggcgtgggatggacctcacaaggatacttgcagaggcaagcatctagcgttcaaggggccaccggctatcccctataccctgctgggggctgtggactggcttggtctagcactggatcctatgaaagactctgtgctccggctctgcaatctacatctctttgccaggtgtttgcactggaggagagagggagaagaacttgctagaaacgaatgcacaggggctggtggagggggtgtggggtggactccgagctagtcatgatgcttgcaaggtacctgggagattgagaggcagggcaggctggctagagaggaagtacatacaaggcagtcggaagcaagatgacacctcaatgtggatttgtccaataagagggggtagccaaggggggggtattcagggaggtctgattggtcggggggagggatttggggtggggctagccgcctcttgaggctttaaaagctcatcggagaggggcgggatgctgtcatttgctctctgactctcagagagggaggcacgctttcctggagctcctggtgacagaacaggtgtttgctgtctggacctggctgctgatcctgagcctgctgggagatcttaacgatccccaggagcaacatggggcccaccctagcggttcccaccccctatggctgtattggctgtaagctaccccagccagaatacccaccggctctaatcatctttatgttctgcgcgatggttatcaccatcgttgtagacctaatcggcaactccatggtcattttggctgtgacgaagaacaagaagctccggaattctggtaagccaccccttcttctccctacccagtgtgcagagacttgcaacccctagggcgttagtttttgagctccccgaatagagaatctatggacagtgccctcatattgaacatccctgctcccaaattccccgcaagcctgggggtggtagtattctgtcccggccctctaaacgtggaggttctcaaggccgagagagcacagagaattagctttgggcatccaagtacaaagcgttcccgtggtgcgcggcagcccgaggatccctgtcccgtcggggcctgatgcggagggagccggcacccgagcgggagagtcaggcgattcgcccggggacagcaagccgagccggacgccgcaagggcggccgcgctgaggcagcgcggaccgaactgacgcggagggagcagcggggctgcgacctgctctgtgaaagttaagttcgcggcggccgcggcggcccttaccagagcgcaacgcagtggcctctccctagccgggccaagagcccgctcgccgcggccctggggctccaggacggctcccgggcagatcccgggcggcggagcacagacccccgcgcccgagaatcgagcagggaggtctgagcccgccggagccgagctccgtccgcccgtcccagggcgaacggcagagagaggcaagcggcgggtcgggcacagcaggcggtggcagcgacggcggcggcagcggagatcccaaggtccgtaagcggggaactggggggtcgcagggcgggccggccaagaggcttgggagctgggcgttgctgggggtggagggatagaaggcagcaaaaccgagtagggattggcgggagggcgacgggagagctcagaggcggcgatgggggactcagagaggctgcaaagggctggggtctg

SEQ ID NO: 12409 - DNA, 6000 bp, Homo sapiens
cactttgttgcccaggctggagtgcagtggcggggtctcagctcactgcaacctccgcctcccgggttcaagccattctcctgcctcagcctcccgagtagctgggattacaggcgcacgccagcacacccagctaatttttgtgtttttcagtagagacagggtttcaccatgttggtcaggctggtctctatctcctgacctcttgatccacccacctcagcctcccaaagtgttgggattacacgtgtgagttactgtgcctggcctcagagccattttctgtggtccttccatgatggctgaattgggcttccttatagcatcagggaagttggaatgcttacatggtggctaaaggcttgaagagtgagtgtccctgttaacaaggcagaagctgcattaccttttctgcactagcctcagaaatcaatcagcaccacttttaccatattatcttgagtacaagaaagtcacaagcctgcccagattataggggggagggttaaattccacctcttgatggggaagtggcaaggttccaggagagcatgtgggatgggagatattgttggggctacctttgaaaaacacaatctgccacacacaccagttaaaaggcagagactgttgggctagataaaatagctatatgttatttacaagaagcacatttgaagcataaagacacagacatgttgagagtagaagtatggaaaaagatataccaagcaaccactgagcataagaaagctgccatggcatcatactaatatcaggtagagcagaattcaagacaaagagtttactagagatcaagagagacatgtcataatgaaaaaagaacacataatcaagaaaacacaaccatttcaaatatataagcacctaatctaccaaatatatgaaacaaaatttataggactaaagggttctagatacagataaatctccaaacatactggccaactttaacattcctttctcagtaaatgataaaacaaataggaaaaaaatcagaagaatatagatttgaacaacactatcaacctaattgactcaattgatatgtacggaacactacatccaacaacagcagaacacatattcttctcaagtgcagatggaaccccaaccaacacagacaacttctgggcaatcgagcaagcctcaataaattacaaagggtcaaaatcatacaaagtacgatttctgaccaaaatgatgttgaattagaaatcaacaacaaaaagacatctaggaattttctaaatattttgaaatgaaaaaatatctacttccaaataacccaagaaccaaagaagaaaccacaagtaaaattattggtagaacatatctttcactgaatagaaatgcaaataaaatatgaaaatttgggaattcaacaaaacaactgattagaggaaaaggaactacttatattagaaaagcagaaaggtcccaaaataattatttaaatttctactttaagaaactagagccggtcacggtggctcacacctgtaatcccagcactttgggaggccgaggcaggcagatcatgaggtcaagagatcgagatgatcctgaccaacatggtgaaaccccatctctactaaaaaatacaaaaattagctgggcgtggtggtgtgcacctgtaatcccagctactcaggaggctgaggcagaagaattgcttgaatctgggaggcagaagttgcagtgagccaagatcacaccactgcactccagcctgggcaacaagagcaaaacttcgtttcaaaacaaaacaaaacaaaaagatcaatgaaattgataagcctctagccagactgatcagaaaaaaaaaatggagagaagatacaaattaccaatatggagaataagagagagggggcattattacagatcctacaaacataaaaaagtgataagaggatgttgtgaaaaacttattccaatacatccaacaacttagatgaaatggacaaattccttgaaagatacaaatggtcaacgctcatttaggaaaaaatagataacctgattagccctgtatctgtcagaagagttgaatttataactgaaaaaattctcacaaagaaaactccaggtttgtgtaaataataccaattctatactaactcttccagaaaacagaaaaagagagaacacttcccaactcgttttataaagtcagcattatactcatccccaaaccaaagatattacagaaagggaaaacgtagaccagcatctctcattaatacagatgtaaaaatggtaaacaacagccaggcacagtggctcacacctgtcatcccagcactttgggaggccaaggtgggtggatcagaggtcaagagatcgagaccatcctggttaacatgatgaaaccctgtctctactaaaaacacaaaaattggccgggtgtggtggctcatgcctgtaatcccagcactttgggaggccgaggcaggtggatcacctgaggtcgggaattcgagaccagcctgaccaacatgaagaaaccccgtctctactaaaagtacaaaattagctgggcatggtggcgcttgcctgtaatcccagctacttgggaggctgaggcaagagaatctcttgaacctgggaggcgaaggttgcagtgagccaagatctcgccattgcactgcagcctgggcaacaagagtgaaactccgactcaaaaaaaaaaagaaaaaaaagaaaaaaattcaatactcacttgtgataaaagctttcagtataccgggtgacagagtgagagactatgcctcctccccaccaaaaaaaatataaaaaaaaaaaagaagttacacaaaatactatgtactcttttatttatttatttatttttattattatttttttttgagacggagtcttgctgtgtcacccaggctggagtgcaatggcaagatctcggctcactgaaacctccgcctcccgggttcaagcgattctccagcctcagcctctgagtagctgggattacaggcttgcgccaccacgcccggctaatttttgaaaatactacatactctatgattctatttatataaaattctagaaaaggaaaatctatagtgatagatcagtggttgctaggctttcaggtaggggaagaagcttgactgcaaaaggccacgagggaactttctggaatgtcgaaaatatttattctatgtcatgattgtggttgtggttacacgactgtatacatttgtcaaatcttactgaacagtacaattacaattaatgaattttactgtatgctaatcatacctcaataaagccgaaaaaaaaaaaagtcattctggaggagagaaatcattgcctgcggagggccattccagggtggtgagtgcatgagcactgaagacacccggagcagctgctgcaataatctgggggaggaacgtgcaggcagagagagcaagaggaagtcagactgggaaaccccgaggcagttacccaaacagcccactaacagcaactgcagtcggccgcctctggggaggaaagcgggaggggccactgcctttaaaaaagaaaaaaaaaaaaaatctctgcagttttgccagggagccgcctcctgcctgactctcacatgatgacctggaggccatctatgggtacggccctcaagccctcaacgctcaccctccttctaccccccgcccctcaccccagcacctgctggagaccctggccctcccttccactccgcgaggctcttaatctatccagttccatgggctgcctttccgcagctataaacaggctctgtccagctttcccagttattattcacttaggtgaatggacacaattagatgatcatccgcaggctgtcttcctgtcatcattggcacacgcacacaccctcacacacgcacacaccctcacacacgcacacaccctcacacacgcgcacaccctcacacacaacccccccaacgccacacacacacacaccacacaccctcacacacaaccacccacgccacacacacaccacacaccctcacatgcacaccctcacacaccacacaccacacacaccccacacacacgcccaccctcacatacgcacactctcacacacaccctcacacactctcacaccctcacacacgcacaccctcacacacaccctcacattcacacaagtacacttgagtttttattaaatttgtttttgtccccttcaatcccatcctccaacccgttgttcctccctatctcctgggctctaggtattctccttcgggtcacagtccctgtgagggccgttcctgttgacaggcacttggctccgtccttcccactgcccacaggctccaccatctgcacatgcacccctcccacacaatcgggggcctctttctcctcgtccttggctgcctcctctttgtcttccaccccttacaaatccttcagggccctttaaatgccttttccacctgcctgctccctctagccccgctgcccagtgttaagtgggtcgcaccatttctctcctgggtgacaggcacagcttccaccagcctccctgcctccactcttctctgcagaagcccatgtgctcctggggcagagcccaggtccttccatctctgcagccacagtgctaggccagcggcacttgcagtttggtgaatggaaggttctgatcatggggaaccggtagatagagagggacaaacagtgtccccccaatctgcctcctgtcctcttctgcccagacactaggctggaagatcaggagccacaccttggcactcacagagccctttctgcaagtcttagagggaccagtgggaggtgtgcacacaggggctgcgctggcaggagtgggggcctggcacacccccaggtagatgccctgcccgttaacgcccaagggcaggggcttgagtgactcatgtgggcctagcgtgaatcagcacagtctgcccttcttcccatgggagctgctgcccagccccatctttcttggcccccgaggggtggctgcccagggcctctctcctggcacagttccatgtagtgcctgcccatgtggctcccagttcctccccggggtcctggctgagcagaatggcactggatcctgatctggcttcttgcatcccagaggagaccgccatgcgggcccttcctccagattcttccctagtttaacaacaggaagcgaggagtccaggggggcagagattgccacgggcctggccacattgctaggggaggtcccaacctgctgctgagatccggcactgcacagcctcgttcaggcagagaaactgataaggagatggttgtctgctcaccccaaaaggttagcatggattcctcgccctagccggctttagacggagggaacaaaggctttcccaaggccctgccagtccccacccctgcccatcttaccaccgtagtctccctcaatcatcaagtcccattgcacagaaggggaagctgaggtgccaagagctggcgtggcctgttcaaggtcacactactgggcaggggccaagcaggggctggagccttgctttcctattccccagccagggtccccaaattctctgccagttgagggaagccatctcctattccactgatctgggtggcattaggaaggccttttctatgctcctagattagtgacagcatgcggttattggggacagcatgaggatgtgcatgcgctgaggagatgcagctgaagcgtcaggcctggggtgccagcactctgcagcctgcccccaaggggctctgcaaaaacatggcaaagatgcggggtgtgatgtgcacctgtgtgtgctgcgggtgtgtgcgtgtgtggtgttggctgtgcgtatgtggtgtgtatggctgtgtggtgggtacatgtgtgggtgtgtggcgtatgggagtgtgtgatgtgtgcatgtgtgtggtgtgtaatatatgtgtgcatggtgtggtgtgtgt

SEQ ID NO: 12410 - DNA, 6000 bp, Homo sapiens
tcacatgtccccttctcagaggggctcaccctggtgcccttcgaaagtgggcatccactcccttcccaccctggcacccgcaccctcctgtcttcctttttctgttctccatcctactcatctcccccaactagaaaggcagctgcagctgcggagcacgggatctccatctgcagctgcatcccgggacctagaacaggtacaaaagtacctaataagtacccactgaatgaataattggctgagttttctgtaccaaagactgagctaagactctttaaaaggatgatcttatttaagccttacagcaagtaaatgttatccccatcttcctgatgaggacacagtgaccaccacgctcaaggacacagagggtggacgtgccacattcacactctgtgacttagagcggctggacgggcagggacttaggaggcctacagcagccagggtgagattatgaggctgagctgagaatatcaagactgtaccgagtagggggccttggcaagtgtggagagcccggcagctggggcagagggcggagtacggtgtgcgtttacggacctcttcaaacgaggtaggaaggtcagaagtcaaaaagggaacaaatgatgtttaaccacacaaaaatgaaaatccaatggttggatatccattccaaatacacaaaggcaacggataagtgatccgggccaggcacagaaggccatgcacccgtaggattgcactcagagctcccaaatgcataggaatagaagggtgggtgcaggaggctgaggggtggggaaagggcatgggtgtttcatgaggacagagcttccgtttcatgcaatgaaaagagtttggagacggatggtggtgactggactatacacttacacacggtagcgatggtacactttgtattatgtatattttaccacgatctttttaaagtgtcaaaggcaaatggccaaatggttccttgtcctatagctgtagcagccatcggctgttagtgacaaagcccctgagtcaagatgacagcagcccccataactcctaatcggctctcccgcgtggagtcatttaggagtagtcgcattagagacaagtccaacatctaatcttccaccctggccagggccccagctggcagcgagggtgggagactccgggcagagcagagggcgctgacattggggcccggcctggcttgggtccctctggcctttccccaggggccctctttccttggggctttcttgggccgccactgctcccgctcctctccccccatcccaccccctcaccccctcgttcttcatatccttctctagtgctccctccactttcatccacccttctgcaagagtgtgggaccacaaatgagttttcacctggcctggggacacacgtgcccccacaggtgctgagtgactttctaggacagtaatctgctttaggctaaaatgggacttgatcttctgttagccctaatcatcaattagcagagccggtgaaggtgcagaacctaccgcctttccaggcctcctcccacctctgccacctccactctccttcctgggatgtgggggctggcacacgtgtggcccagggcattggtgggattgcactgagctgggtcattagcgtaatcctggacaagggcagacagggcgagcggagggccagctccggggctcaggcaaggctgggggcttcccccagacaccccactcctcctctgctggacccccacttcatagggcacttcgtgttctcaaagggcttccaaatagcatggtggccttggatgcccagggaagcctcagagttgcttatctccctctagacagaaggggaatctcggtcaagagggagaggtcgccctgttcaaggccacccagccagctcatggcggtaatgggacaaggctggccagccatcccaccctcagaagggacccggtggggcaggtgatctcagaggaggctcacttctgggtctcacattcttggatcctcggatcctctgactctggtggggacaggcagaccaagctctcttggacccgggaagagggacccttggaagtcacttgggattgagttctagagtcttgacactgtttcagcagatctatactttgaacccacctcaggcatctcatccacagaacagggacagtgaccattccatcttgccaaggagtgcggggcacacaccatgctgctggcagccagggtggaaagtcaaggggtcccagctgaagcactgccacagaggcaggatgcagtccgagaggggacttcagagcaggggcccaaggccaaggccatcagggaggtctttctgcaggagggacctctttaggagttaggccctaaaaacaaataagaggaagaaaggcacttggtggtttttagtctattcacggtgctgtgcagccatcaccaccatccagccgcagaacttgttcatcttcccaaactgaagctctggccccgttcaaccccaactccccaccccccagcccctggcacccacccttccactgtctgtctctatggatttgaccactctaggcccttcatataagtggaattttacagtatttaccctcctgtgactggctcatttcactgagcaatgtcctcaagggtcatccatgttggagcatgtgtcaaacttcatttctttttaagggtgaatcatattccatcgtctgtatagaccacaatttgtgtagctaatcatccgttgatgtttgttgatttgtttgtttgttttgagacagtcttgccatcagagctcactgcaggctcaacctcccaggctcaagaaatcctcccgcctctctacctcccaagtagctgtgactacaggcacctgcgactgtgccctgctaatttttgtattttttgtagagacagggtctcactatgttgcccaggctagtctcgaactcctgggctcaagtgatcctctcacctcggcctcccaaagaactgggattacaggcatgagctaccatgtccagcccaattgcccattgatgggcacgggttgcttccatgtttcagctgttgtgaatcacgctgctgtgaacatgcgtgtgcaaacagcccttccagaccctgccttccattcctctgggcctatacccagcagtgcggttgctgggtcctatgggaattctacgtttaacttttggaggagctgccaaactgttttccacagtggctgcgccatcacaatccaattttaggacatttttatcacccataaagcactccctgtacccattaagaagtcatcctccatttccctccctcccctgtcctggcacccattcctctgctttgtgtgtctctggattgccctatctaagcatttcacagagatggagccatgcgctccgtggtcttttgtgtctggcttcgctcactgagcatgctgttctccaggtccatccacgttgtagcgtaggtcagcccttcattccctgttatggccaaatgatactccattgtacagacaggccactttttacccactcatctgcttctggacttttgggttgcttctaccatgtggcctgttgggaacagtgctctgtttgtattcatgtacgggtttttgtgtggacacacattttcaagtctcttgggtacacaggtgtagaagtgccagagttggggaaaaagctcacctttctaggctgtgaatgggccctggcaagtctgtggccaggactcgtcttctcttccacatggggcccctagcttggcacctagcacgtggcaggcagcgacagatgttaaaagccattcttgctatgggtagccaggctggggctccatgcagccctggccttcagcttggcagccagggcccccttgtgcctgcagcagaagccatgctgccaggagtgtaagtgtgagccaggaatgctggagaatcgtggctctgagaacagggacaagaggccacaagctcacgccttggctttcctaagcttaaggaataaacccaaaaggaggtacctggaaggagctggatttggggactgaggagctgggagctgatggaagccgtgaaaggggatgtgctcctggggaggcgctggggcgggtgggccgtggaggggacagggcccgttggttggaaactgaggcgaggctacggagttgggcactaacaggtcatccgtgcccctgcgaagcgtggggacacagggacagcagagatggcctgtctggacactctgtcgacggggggcctgtggttggtgaagcccaaggcaaggctgtgaactcagggcaagggagacgtgagcaggcgctgccgtgggctgatgtgggcactgcatgtgcaccctggcggccaaaggacctacagctcatggggggcaagggggaggagggaagccaacagcaggatgtgcgcagtcagtctgccccccctacactggaggaggagccccccggcacaaatctcgcccgtttgggcccacggacatggctggcctcgcaaggaggatccggttccaggcctcggccctaaatagtctccctgggctttcaagagaaccacatgagaaaggaggattcgggctctgagcagtttcaccacccaccccccagtctgcaaatcctgacccgtgggtccacctgccccaaaggcggacgcaggacagtagaagggaacagagaacacataaacacagagagggccacagcggctcccacagtcaccgccaccttcctggcggggatgggtggggcgtctgagtttggttcccagcaaatccctctgagccgcccttgcgggctcgcctcaggagcaggggagcaagaggtgggaggaggaggtctaagtcccaggcccaattaagagatcaggtagtgtagggtttgggagcttttaaggtgaagaggcccgggctgatcccacaggccagtataaagcgccgtgaccctcaggtgatgcgccagggccggctgccgtcggggacagggctttccatagccatggcccagcagtggagcctccaaaggctcgcaggccgccatccgcaggacagctatgaggacagcacccagtccagcatcttcacctacaccaacagcaactccaccagaggtgagccagcaggcccgtggaggctgggtggctgcactgggggccaccggccacccacctgccccgcccaagggaatctctcttctgcacgtccccaccagcagagaaggctttctcccatagcttttctgatgacatgaattggggggtcctctccaaatctagaaggacaccataatatcgaatatgcattctcaagccacacaggcttcccagcccctttgagaatccgaggccggggaagagtttatgtgctctttctttgtggcccgtagatgagtgtgttcactgctagcgaatgacctctcattccacggagtccctcagcttcctggggaagagctgggtctgtctttacatttgaagccgaaagaggcaacatactgacacacccaagggaggcgggagggtggggaagacagcagcagagggcaagaaacttctagaacttcagggtcggcaaagcctgtagcagtcattttgtcaaactccatgatggggccacttggcttttggctgcacacctctgggggaagaggctgcattggcgcccagggccatctttccattcggagccgtcctgggagagagggctcaggcccaacagaaagctgaaagctctcatcagggcagcccgagtcctgccattgggagttgcccaatccgaaagttttgcacgcaggccctcaaagaagctgaggacaccagtgaccgccccactcctggccctctccccaggtccctcctccaaaccaaattcctttggtgccttcaagaacatcgtgcaggccgggcacagtggctcacgcctgtaatcccagcactttgggaggcagaggcgggcagatgacgaggtcaacagatagagat

SEQ ID NO: 12411 - DNA, 6000 bp, Homo sapiens
atccagcaactgcattcataggcgatattcccaggaggcaagtacactgatgttctcaatatccaacaactagcaacaaaccacctgcccagaaagtgtaagtaaactgtaatatatgcaacaacatactactgtacagcaatgagaatgaactacagccttgaaaaacatgaatgcatttcacaagcataatgttgaacaaaagaaaccagacagaaaatccatactatatatggttccatttacataaattccaagagcaggcaaaactaaacaatattgtgtagggatgactacacaggcaggaaagctaaagagcagcatggatgttggcaacagaaaccccaggatggtggttcccactagagcgggagaaggggattatgactggggtgactgtggaggctggggtgcctggcctgagtagtggttaaatgtgtgttcaccttatcgttacttcttaaaacatacatcaatgttttctgcacctttatatacatatgccagatttcacagttttcaaactatttaaatgttcaatataggccaggtgtggtggctcatgcctgtaatcccagcactttgggaggctgaggcgggcggaggtcaggaggtcaagaccagtctggccaacatggtgaaaccccgtctatacaaaatacaaaaaaaaaaaaaaaaatgcctggcacagtggttcacacctgtacttccagcactttgggaggccgaggcgggcggatcacctgaggtcgggagttcaagaccagcctgaccaacacagagaaaccccatctctactagaaatacaaaattagccaggcgtggtggcacacgcctgtagtcccagctactcgggaggctgaggcaggagaaccgcttgaacccggggtgcagaagttgcagtgagctgagatcgtgccactgcactccagcctgggtggtagagtgagactccgtctcaaaaaataaataaataataaataataatatgttcaattgatggatttaatggcagatttgatatggctggagagactgttggtaaattgtacagaggagctaaagaaagtatccaggccgggcgcggtggctcacacgcctgtaatcccagcattttgggaggccaaggcgggtggatcacctgacgtcaggagtttgaggctaacctgaccaacatggtgaaaccctgtctctactaaaaaatacaaaaaattaactgggcatggtggtgggcacctgtaatcccagctacttgggaggctgaggcaggagaatggcttgaacccaggaggcagaggttgcagtgagccgagatcacgccactgcactccaacctgggcaacaagagcaaaactccatcccaagaaagaaagagagagagagagagagagagagagagagaaagagaaaagaaagaaagaaaaaaaagtatccagaatgcagcacagaggcacaaaaaaatagaaaacttgaaaaatagaagacatggaaggtagcatgagtaggtctaacaaaaatccaattgtcacaccagagagagaagacagacagaatgaagcagcagcaatatatacatatttttcttcttttttttttaaattgaaatggagtcacactctgttgcataggcggagtgccgtggcacaatctcggctcacggccgacctctgctgcccgggttcaagcacttctcgtgcctcagcctcccgagtagctgggactacaggcgcgtgccatcacagctagctaattcttttgtatttttagtagagatggggtttcatcatgttggcaagactgttctcgaactctcaacatcaggtgacccacccacctcggcctcccaaagtgctgggattacaggcatgagccactacgaccggccacagcagcaacattttaagagataactccctaagaactttccagaactgaagaaagacacaaattcacaaattcaagaagcccaataaatcctaagcagggaagacagaaataggtccacacctagacacgagattttttttttttttttttttttgaaacagtgtttcgctcttgtcgcccaggctggagtacagtggcgtgatctcggctcactgcaacctctgcctcccgggttcaagcgattctcctgcgtcagcctcccaagtagctggtactacaggcgcccgccaccatgcccagctaatttttgtatttttagtagagacagtgtttcaccatgttggccaggctggtctggaactcctgacctcaaatgatccgcccacctgggcctcccaaagtgctgggattacaagcatgagccaccgcccgcggccgacacaagatgttaaaagcagccagaggaaaaaaagctgattacctttaaaaccatgacttttagacggcaggctgccttctcaatagcatcaatgcaatccagaagatagttgactgatatcttcgatacactgagagaataactgtcagagagaaaaaaataggtcacattcaaagaatcagaagtcagaatggcttcagacttcagcaacagcatggggaactagaagacaatgaagtgctggccgggcacggtggctcacacctgtaatctcagcactctgggaagcccaggcaggcggatcacttgaagtcaagagtttgagaccaggctggccaacatgaggaaactctgtctctactaaaaatacaaaaattagccagcattgtggtgggcgcctgtaatcccagctactcgggaggctgaggcaagagaatcgcttgaacccaagaggttgcagtgagccgaggatcactcccctgtactccagcctgggcgacagagcaagactctgtcccaaaaaaaaaaaaaaaaaaaaaaaaaaaagacaatgaagtgctgctttcgaaattctgagggaaaaatgatttcccagcctaaaattctacaccccaactgtcaactgtggggttagactaaagacatttttagacatgaaggagttcagtacaccactgacaaatgtaagaattcaacaactgtttaaaaagcaagtcttgccagggcagtggtgtgcacctgtggtcccagctactcaggatgctgaggcaggaggattacttgtgcccagcaagtagaggctgcagtgacctgtgactgtgctactgccctccaacctgggtgacagagtgagaccttgtctcaaaaaaaaaagagcgggggggggggggccgggccgggcgtggtggctcacagctgtaatcccagcactttgggaagccaaggcgggtggatcacttgaggtcaggagtttgagaccatcatggtcaacactgcgaaacactgtccctactaaaaatacaaaaattagccgggcatggtggcacacacctgtaatcccagctactggggaggctgaggcaggagaattgcttgagccggggagacggaggttgcagtgagccgagactgcgccactgcactccagcctgactgacaagagtgagattgtctcaaaaaaaaaaaaaaagtaatcactagaaaagaagctacatatgtacataacatccaaataaccaagaggagaaaaaaatgggacttgattaatcaaaacaaaaacaaaaaagaaagaaagaaagggggagaaaataaaacaagggctgggtgtgctggctcatgcctgtaatcccagcactttggaagccaaggtgggtggatctcttgagctcaggaggtcaagaccagcctgggcaacatggcgaaaccccgtctctattaaaaaaaaaattaatacaacaattatcctggagtggtggtacacacctgtagtcccagctacccaggacgctgagacgggaggatcgcttgatcccggggatgtcgaggctgccgtgatcgcaccactgccctccagccagggtggcagactgagaccccatctcaaaaaataaataaataaaagcaaacaagaaaaaaaaaggcttgaaacatatctgatagataaagggctaatcaacacaatatataaagaactgcaaatcagtaaactaagagcaaataacccaatataaagacattaaagggtagccacggacatctcagacgacgaaaaacaaaagacagtaaacgtataataaaacatgtaattgcaaggtgatccgggaatagtaagcgaaaagcaacaattaaatactattttctcatccaccagaacgccaaaaattaaaaagcctaacaatgtccagggctggcgagaatgtggcagaaggtgatgtcacataccctgcaagtgggaatctaaacagattcagggttttggtttttttttaatcgcaattaggtggcctgttaaattttttttcttgagacagagttttgctcttgttgcccaggctggagtgcaatggctcgatcttggctcaccgcaacctcgacctcccaggtacaagcgattctcctgtctcagcctcccaagtagctgggagtacaggtatttgccactaagcccagctaattgttttttatttagtagaaacggggtttcaccatgttagtcaggctggtcgggaactcctgacctcaggagatctacccgccttggcctcccaaagtgctgggattacaggcgtgtgccactgtgcccagccacttttttttagacagagtcttggtctgttgcccaggctagagttcagtggcgccatctcagctcactgcaacctccgcctcccagattcaagcgattctcctgcctcgacctcccagtagctgggattacaggtttccagcaaatccctctgagccgcccccgggggctcgcctcaggagcaaggaagcaaggggtgggaggaggaggtctaagtcccaggcccaattaagagatcagatggtgtaggatttgggagcttttaaggtgaagaggcccgggctgatcccactggccggtataaagcaccgtgaccctcaggtgacgcaccagggccggctgccgtcggggacagggctttccatagccatggcccagcagtggagcctccaaaggctcgcaggccgccatccgcaggacagctatgaggacagcacccagtccagcatcttcacctacaccaacagcaactccaccagaggtgagccagcaggcccgtggaggctgggtggctgcactgggggccaccggccacccacctgccccgcccaagggaatctctcttctgcacgtccccaccagcagagaaggctttctcccatagcttttctgatgacatgaattggggggtcctctccaaatctagaaggacaccataatatcgaatatgcattctcaagccacacaggcttcccagcccctttgagaatccgaggccggggaagagtttatgtgctctttctttgtggcccgtagatgagtgtgttcactgctagcgaatgacctctcattccacggagtccctcagcttcctggggaagagctgggtctgtctttacatttgaagccgaaaggaggcaacatactgacacacccaagggaggcgggagggtggggaagacagcagcagagggcaagaaacttctagaacttcagggtcggcaaagcctgtagcagtcattttgtcaaactccatgatggggccacttggcttttggctgcacacctctgggggaagaggctgcattggcgcccagggccatctttccattcggagccgtcctgggagagagggctcaggcccaacagaaagctgaaagctctcatcagggcagcccgagtcctgccattgggagttgcccaatccgaaagttttgcacgcaggccctcaaagaagctgaagacaccagtgaccgccccactcctggccctctccccaggtccctcctccaaaccaaattcctttggtgccttcaagaacatcgtgcaggccgggcacagtggctcacgcctgtaatcccagcactttgggaggcagaggcgggcagatgacgaggtcaacagatagagatcatcctggccaacatac

SEQ ID NO: 12412 - DNA, 6000 bp, Homo sapiens
tgatccagcaactgcattcataggcgatattcccaggaggcaagtacactgatgttctcaatatccaacaactagcaacaaaccacctgcccagaaagtgtaagtaaactgtaatatatgcaacaacatactactgtacagcaatgagaatgaactacagccttgaaaaacatgaatgcatttcacaagcataatgttgaacaaaagaaaccagacagaaaatccatactatatatggttccatttacataaattccaagagcaggcaaaactaaacaatattgtgtagggatgactacacaggcaggaaagctaaagagcagcatggatgttggcaacagaaaccccaggatggtggttcccactagagcgggagaaggggattatgactggggtgactgtggaggctggggtgcctggcctgagtagtggttaaatgtgtgttcaccttatcgttacttcttaaaacatacatcaatgttttctgcacctttatatacatatgccagatttcacagttttcaaactatttaaatgttcaatataggccaggtgtggtggctcatgcctgtaatcccagcactttgggaggccgaggcgggcggaggtcaggaggtcaagaccagtctggccaacatggtgaaaccccgtctatacaaaatacaaaaaaaaaaaaaaaaatgcctggcacagtggttcacacctgtacttccagcactttgggaggccgaggcgggcggatcacctgaggtcgggagttcaagaccagcctgaccaacacagagaaaccccatctctactagaaatacaaaattagccaggcgtggtggcacacgcctgtagtcccagctactcgggaggctgaggcaggagaaccgcttgaacccggggtgcagaagttgcagtgagctgagatcgtgccactgcactccagcctgggtggtagagtgagactccgtctcaaaaaataaataaataataaataataatatgttcaattgatggatttaatggcagatttgatatggctggagagactgttggtaaattgtacagaggagctaaagaaagtatccaggccgggcgcggtggctcacacgcctgtaatcccagcattttgggaggccaaggcgggtggatcacctgacgtcaggagtttgaggctaacctgaccaacatggtgaaaccctgtctctactaaaaaatacaaaaaattaactgggcatggtggtgggcacctgtaatcccagctacttgggaggctgaggcaggagaatggcttgaacccaggaggcagaggttgcagtgagccgagatcacgccactgcactccaacctgggcaacaagagcaaaactccatcccaagaaagaaagagagagagagagagagagagagagagagaaagagaaaagaaagaaagaaaaaaaagtatccagaatgcagcacagaggcacaaaaaaatagaaaacttgaaaaatagaagacatggaaggtagcatgagtaggtctaacaaaaatccaattgtcacaccagagagagaagacagacagaatgaagcagcagcaatatatacatatttttcttttttttttttaaattgaaatggagtcacactctgttgcctaggcggagtgccgtggcacaatctcggctcacggccgacctctgctgcccgggttcaagcacttctcgtgcctcagcctcccgagtagctgggactacaggcgcgtgccatcacagctagctaattcttttgtatttttagtagagatggggtttcatcatgttggcaagactgttctcgaactctcaacatcaggtgacccacccacctcggcctcccaaagtgctgggattacaggcatgagccactacgaccggccacagcagcaacattttaagagataactccctaagaactttccagaactgaagaaagacacaaattcacaaattcaagaagcccaataaatcctaagcagggaagacagaaataggtccacacctagacacgagattttttttttttttttttttttttgaaacagtgtttcgctcttgtcgcccaggctggagtacagtggcgtgatctcggctcactgcaacctctgcctcccgggttcaagcgattctcctgcgtcagcctcccaagtagctggtaatacaggcgcccgccaccatgcccagctaatttttgtatttttagtagagacagtgtttcaccatgttggccaggctggtctggaactcctgacctcaaatgatccgcccacctgggcctcccaaagtgctgggattacaagcatgagccaccgcccgcggccgacacaagatgttaaaagcagccagaggaaaaaaagctgattacctttaaaaccatgacttttagactgcaggctgccttctcaatagcatcaatgcaatccagaagatagttgactgatatcttcgatacactgagagaataactgtcagagagaaaaaaataggtcacattcaaagaatcagaagtcagaatggcttcagacttcagcaacagcatggggaactagaagacaatgaagtgctggccgggcacggtggctcacacctgtaatctcagcactctgggaagcccaggcaggcggatcacttgaagtcaagagtttgagaccaggctggccaacatgaggaaactctgtctctactaaaaatacaaaaattagccagcattgtggtgggcgcctgtaatcccagctactcgggaggctgaggcaagagaatcgcttgaacccaagaggttgcagtgagccgaggatcactcccctgtactccagcctgggcgacagagcaagactctgtcccaaaaaaaaaaaaaaaaaaaaaaaaaaagacaatgaagtgctgctttcgaaattctgagggaaaaatgatttcccagcctaaaattctacaccccaactgtcaactgtggggttagactaaagacatttttagacatgaaggagttcagtacaccactgacaaatgtaagaattcaacaactgtttaaaaagcaagtcttgccagggcagtggtgtgcacctgtggtcccagctactcaggatgctgaggcaggaggattacttgtgcccagcaagtagaggctgcagtgacctgtgactgtgctactgccctccaacctgggtgacagagtgagaccttgtctcaaaaaaaaaagagcggggggtgggggggccgggcgtggtggctcacagctgtaatcccagcactttgggaagccaaggcgggtggatcacttgaggtcaggagtttgagaccatcatggtcaacactgcgaaacactgtccctactaaaaatacaaaaattagccgggcatggtggcacacacctgtaatcccagctactggggaggctgaggcaggagaattgcttgagccggggagacggaggttgcagtgagccgagactgcgccactgcactccagcctgactgacaagagtgagattgtctcaaaaaaaaaaaaaaaagtaatcactagaaaagaagctacatatgtacataacatccaaataaccaagaggagaaaaaaatgggacttgattaatcaaaacaaaaacaaaaaagaaagaaagaaagggggagaaaaaaaaaaaaacaagggctgggtgtgctggctcatgcctgtaatcccagcactttggaagccaaggtgggtggatctcttgagcccaggaggtcaagaccagcctgggcaacatggcgaaaccccgtctctattaaaaaaaaattaatacaacaattatcctggagtggtggtgcacacctgtagtcccagctacccaggacgctgagacgggaggatcgcttgatcccggggatgtcgaggctgccgtgatcgcaccactgccctccagccagggtggcagactgagaccccatctcaaaaaataaataaataaaagcaaacaagaaaaaaaaaggcttgaaacatatctgatagataaagggctaatcaacacaatatataaagaactgcaaatcagtaaactaagagcaaataacccaatataaagacattaaagggtagccacggacatctcagacgacgaaaaacaaaagacagtaacgtataataaaacatgtaattgcaaggtgatccgggaatagtaagcgaaaagcaacaattaaatactattttctcatccaccagaacgccaaaaattaaaaagcctaacaatgtccagggctggcgagaatgtggcagaaggtgatgtcacataccctgcaagtgggaatctaaacagattcagggttttgtttttttttaatcgcaattaggtggcctgttaaattttttttcttgagacagagttttgctcttgttgcccaggctggagtgcaatggctcgatcttggctcaccgcaacctcgacctcccaggtacaagcgattctcctgtctcagcctcccaagtagctgggagtacaggtatttgccactaagcccagctaattgttttttatttagtagaaacggggtttcaccatgttagtcaggctggtcgggaactcctgacctcaggagatctacccgccttggcctcccaaagtgctgggattacaggcgtgtgccactgtgcccagccacttttttttagacagagtcttggtctgttgcccaggctagagttcagtggcgccatctcagctcactgcaacctccgcctcccagattcaagcgattctcctgcctcgacctcccagtagctgggattacaggtttccagcaaatccctctgagccgcccccgggggctcgcctcaggagcaaggaagcaaggggtgggaggaggaggtctaagtcccaggcccaattaagagatcagatggtgtaggatttgggagcttttaaggtgaagaggcccgggctgatcccactggccggtataaagcaccgtgaccctcaggtgacgcaccagggccggctgccgtcggggacagggctttccatagccatggcccagcagtggagcctccaaaggctcgcaggccgccatccgcaggacagctatgaggacagcacccagtccagcatcttcacctacaccaacagcaactccaccagaggtgagccagcaggcccgtggaggctgggtggctgcactgggggccaccggccacccacctgccccgcccaagggaatctctcttctgcacgtccccaccagcagagaaggctttctcccatagcttttctgatgacatgaattggggggtcctctccaaatctagaaggacaccataatatcgaatatgcattctcaagccacacaggcttcccagcccctttgagaatccgaggccggggaagagtttatgtgctctttctttgtggcccgtagatgagtgtgttcactgctagcgaatgacctctcattccacggagtccctcagcttcctggggaagagctgggtctgtctttacatttgaagccgaaaggaggcaacatactgacacacccaagggaggcgggagggtggggaagacagcagcagagggcaagaaacttctagaacttcagggtcggcaaagcctgtagcagtcattttgtcaaactccatgatggggccacttggcttttggctgcacacctctgggggaagaggctgcattggcgcccagggccatctttccattcggagccgtcctgggagagagggctcaggcccaacagaaagctgaaagctctcatcagggcagcccgagtcctgccattgggagttgcccaatccgaaagttttgcacgcaggccctcaaagaagctgaggacaccagtgaccgccccactcctggccctctccccaggtccctcctccaaaccaaattcctttggtgccttcaagaacatcgtgcaggccgggcacagtggctcacgcctgtaatcccagcactttgggaggcagaggcgggcagatgacgaggtcaacagatagagatcatcctggccaacatac

SEQ ID NO: 12413 - DNA, 6000 bp, Homo sapiens
cacattttaaagtctcacacagtaaaatttgtcagcttttggtagaaccattcctctgtcagtaaatatcttggaataaagatcctagcacctgcagaattaccacagaagcttgtgcaaatgtgattttggacataattataaaacagtaaaggggattggtggctgtattggtgagatgagccctaaaatatttctcagagactgaagcacaggtaaagaaaggcaatgggaatagaattcatcaggatggtgagtgtattctgttcctactcctgctattgttaccaaccaacacagtgggtgggttcagtcgtttgacatcaaccccatgatcacagcaaggatttagtaaggggatttattacttgtaacgaagtaatgagaccaccagggatacttcccaaaataatgtctccctgagatgggggctgggtcaggttttcataagcattgggtattaagggtatatcctgatggctttggatcttacaatgaggtgatgctgagaggcatgatctgactggatcctgccatccagtgtccacttcttaattcagccctggtcctaattcaaaacacttacattctccctctgattgcatgcttggttcatctgaggatgctcaggtaacatgatctgagggtccccggcaactgaaagacaatgcacaactttgttatataaaagttaaaccagataggtctggtgctgctaccctgtaaccagttaccatacatggaatggcttaaaataataccaatttattattatcttacagtcctggaaggttggaaatcttcaaagggcttcaccacactaaaatcaagatgttgccagaggagctatccctctggcatttctagggaagaatctgtttctttgtcttttccaggttctggagacagcctgtatttcttggatcttggcttccttccatcttcaaagccaacgatgaccagtgtagactttctatgctgcttcaatctgacatggagtccctgccttccacatctaaagtacccttgcaattacattggccaagataacccagaataatcttaaattaaactcagctgaatagcaatcttaatgatcctttgtcaggtaatataaaatggtacatgttctggagaacaggacatggacatctttaggggaccgttacctgccaaacacaatgagggtagtgtctaaatgagttttcaaatggacaacagtaacaacatcaacttggtgtttaaccacattgctctgtctgtcccatgcaggaagcagggaaaggaggggctcaagagtagaggacggatgtgggggtgaaagaagaggattcaaatgagccaggttgctttgtctcggggaggggggtgcacggtgggatcctctcctgagaatgactgctgaaacaataggtagttgtggcaggtggcggagatccaagctggtttgataccagccacatttccacactgccaaatatcatggcaagagaagacttgacagggaaccgaagagaagccaggaccatccctacctggcggcatcaaagagagaggactgttatgacctcctgcgggtcctgacagggaaaggtcctcttttgggggcaactgtggggacggtgcaatgccaacgtgagccaccatttgaaatgagaaacagcggtgtggcagaaagaaatgagtctggtgcagaccagtggttggtttcctagggttagaggtctaggtctaccttcttttagaagaggggcagtggtgagtccttgatgggagccccctgccccggagttcacttaagagcaggtgtaccttcctcccctgcgtggctccacgaagctgggaaagaaacgcacaggacgaccaccctagaaccccgggcctgtctggactgaaatcgcctctcccctcccacactgcagtgctgacaccccctctcccattaacatccaggaaggagggtgagcagactagggagggggagagggcaaacacccagcagtccttataggggggcggttggggcgggggtgcagacacaccaagggacggtttggtatccatccgctgctccctccagcgcggctcttcgcgacctcgcgatcctgtcctccgcccggccccgcagccgcccgccggtgccatatattatagcagcgccagaaatgtggtggtcgtcgccacgttagggtccgcggggtcctcctgaggcagcctggtgccaacccgcaggccccggctggggctcgtcctggccccgcccacctctgggtcggaactatggtggttctgtgagggggggcgtcctgcactttcgcgccgtatccctccgccccccttcccgacaccctcgcggagagcggttcttgccgcatcctgcgcagcccctgcccagtttggtgcagaggcgtggggggcgggactcgtctttgccattcggatcgctgggaaagcggtgggaatccaactgaagagcagccagaggagagctgaagagaggagggggaggccgatgacctgggctctgggcctctgaaggcaagtaggggtgcgtgaggtggggggccgtggtgtgggggtggtccgccagggtggaccggctggcaacctgccccccggaccctgacagcctggcaacgaggagacgatccgttcggagccgggcgctagagagaggtgcgcagtgcccgagatccctggctatggggaggcggtgactggtgcgggccaggccggaccaagggctgaggggctggctccagaggcaccgtcagatcgtctggaggagaaccgcgctgaccgcttcccagccagctttgcaggcgcccgcgcgcagccctcgacggtttcggtaccgagagacggctgtgggggaggctcctgcgggagaaatggccaaacgggagccgtgttggggggcgcccgggaggcagttggggggcgcctgggggggccctcgtgggccagcgtcccagctctgtgcctagcccgtgggaggtgggtcgcgttcgctgctccgggccctgattccggaaaggggcctgtggggccccgtgtcctgggtgctgtcccttcccacagactccaggttgatgtcaaagtctgtctgcgcggtaggtctggcgtattctgacaggacacagtgagcatctgtagaggagaggcttgaaataaaggaggagcacgaatattccctggatttctggaggtgtgtggggatgtggggtgggtgccaaacactggagaaccgaatcggggtgggggactgcgaccagagcaggtcaggcatccaggagcacctcttaatcttcccctctctaatggtgttccaggcgcttcccccaccttccatccccatctgcctcccccaccgtcctaaactgggggcttgaaagggtgagctttggaggtaggggtgatgagggagacatactgacaagtaccaattcacgacctgttttctagaatatgtggcgcccttcccccattttctgctgcgcagagcaaggggatgtggcgcacctagtggtgaatcctcagaattggagaagggagtaatgagaagagtatgacgtcaagagaaggagttgttatctctagaaccttgaagcagggcctaaacaaaacgagaatattccaccagcaaaaccccgaatgttgaaagacagatatcaataatatggggattcttatccttagcgttggtctctctaccaagggctttactgccacccctcatttcctgtcttactttttcatctgtttgtccataggcctgctttaaggctggccagttctgcaagaaaggcaaggaggaggagactggctcacacctctggaggttggtgagaagggggagggggcaattcaggggacagttggagaaagagagcatggcaggtggctttgagaccagtgggtgcagacccacttctactctgctggatttgcacagtgccagcatcctttttatttcttgcaggggacatgagataggtgtaggttgtgttgtgactcagaaagacctgagagcagggaccaggacacaggaaaccatagatacattgaacccttgaatgggaagacagatatttgtcacaggagccagagtgcttgcctatctaccattctccattctctcctgtatgtttacttgtctgtaggacccccttctgtcagctgtggggcttgacactacttgaacaagaaaaggagggggaaactgcaccacataagtgaaggttggtatgagagtgggtatacttttgggcggggtagtggagaccagcatgggtccgggagtgcttagggtccaatctggggacttcttggcccctcccattgccgacacactttcccaccattgttggacctgtttaataggaggcagccggtccagagagactttctcaaagcccagctgtcccacctagcattcaacatcagtctcactgcatatgtctctgcatgggatgacataattggaagagactcaaagccccatttcattctctctccctagatccacctccagtggctgctctgctggtggtggggttgctgctgacaaccaccctcaacgggtctgcacccatccaggaaatctctgtcttcctcaagcttggttgtgcctgttctacactctatctgtattattgaattactgactgagactgtgtttgggaaggaggctgagtgactactggactggatattgactctaactcttgtttccaagcttatatcctcaatcacctaaagatcagagtgtgaagaaacaaacctgtgacagatctgtggttgaggtttagactgggggaggagtatagtactggactttctttgtaacttgtaccatgactggggcagagattgagtctggtgcccaggtcaagcctgaaaagaagcctggggaagaggttgtaggtggggctgagatagagaatgatgtccctctggtggtcagacccaaggttaggacccaggcccagataatgcctggggcaaggcccaagaataagtccaaggttatgcctggagcaagcaccaaagttgagacaagtgcagtgggtggggcacgccctaagagtaaggccaaggcaatacctgtttcacgatttaaggaagaagcccagatgtgggctcagcccaggtttggtgctgaaagattgtctaagacagagagaaactcccagaccaatatcatagcctctccacttgtcagtactgattctgtcttggttgctaaaacaaagtacctgtctgaggatagagaactggttaatacagacactgagagctttcctagaaggaaggcccattaccaagcaggattccagccttcttttaggtcaaaggaggagaccaatatggggtcctggtgctgtcctaggcctacatccaaacaagaagcctctcctaattctgatttcaaatgggtagacaaatctgtgagttccttgttctggagtggagatgaggtcactgcaaaatttcatcctgggaatagggtaaaagacagtaacagatccatgcacatggccaatcaagaggctaataccatgtctaggtcccaaactaaccaggagctctatattgcatctagttctggttctgaggatgagtctgttaagacaccctggttctgggccagagataaaaccaatacctggtctgggcccagggaagatcccaatagcaggtccaggtttaggtctaagaaagaagtctatgttgaatcaagttctggatctgagcatgaagaccatttggagtcctggtttggggctggaaaggaggccaaattcaggtccaaaatgagagctgggaaggaggccaataacagggccaggcacagggccaagcgagaagcttgcattgatttcatgcctgggtctatagatgtaattaaaaaagagtcctgtttctggcctgaagaaaatgctaataccttttcaaggcccatgatcaagaaagaggccagggccagagcaatgacaa

SEQ ID NO: 12414 - DNA, 6000 bp, Homo sapiens
actttcagaatagggaattgaacaggaaaccacaggtgaatgtaagcaccacaagaaaggggattcatttctctttggtttatactgtatgcccactgcctaggagaaagtaggagctcaatatatatttgttgaataaatgaaaggcatcagtaacgttatgaaaggggaagaacagctcaggaaggcaaagagatgtacacgcgccaacaaattccagcagacccaggctctgttctcccaagcctgtaattcattcatgagagtatgctgtggaacagagaaaatccaccattcagttaaggccatgaaaaaggcagagttaacgtggtcttcctctaatacataacattcatctccagatgtggtacagaatcatcctcacatgttttcttcatatcagcaaaatattgtacagttatagtaaatatctggtaacaaaagctgtatggaaatatatgaaaattcatcataagaatagggctcctggccaggcacggtggctcacgcctgtaatcccagcactttgggaggccgaggcaggcagatcacctgaagtcaggagttccagacaagcctgaccaacataaagaaaccccatctctactaaaaatacaaaaaataagccaggcgtcttggggcatacctgtaatcccagctactcaggaggctgaggcaggagaatcacttgaacccaggaggcggaggttgcagtgagccaagatggcaccattgcactccagccagcctgggcaacaacaccgatagtccctctcaaaaccagcaacaacaacaacaaaagaatagggttcccttttgtacctgggaaatatcagtggtttcagcaaaaaggaactttctccaagattacctataagggacataaaaaaaatcactgtcctttaggaagcaaagaagaggcaattgatgtttgtagtggtgaggcatgagctccaaaatagatcttccccagagactgatccacgggtaaagaaagtcaaggggaatagacttcatcaggatggtgagtgtattaggttcatactgctgctttaaccaattaccacacatagaagggcttaaaataatacaaatttattattatcttacagtcctagaggctggaaatctgcaaagggtttcattacactaaaatcaagatgttgccagaggagctatccctctggcatttctagggaagaatctgtttctttgtcttttccaggttctggagacagcctgtatttcttggatcttggcttccttccatcttcaaagccaacaatggccagtgtagaccttctcatgatgcttcaatctgatattgagtcactgcctccctcttccacatttaaagtacccttgcaattacattggccaagataatccagcataatcttaaattaaattcagctgattagcaatcttaatgatcctttgccaggaaatataaaatggtacatgttctggagaacaggacatggacatctttaggggaccgttacttgccaaacacaataagggtagcacctaaatgagttttcaaatggacagcagtaacaacaacatcaacttcgtatttaaccacattgctctgtctgtcccatgcaggaagcagggaaaggaggggctcaagagtagaggacggatgttggggtgaaagaagaggattcaaaaggagccaggttgctttgtctcggggaggggggtgcacggtgggatcctctcctgagaatgactgctgaaacagcaggtagttgtggcaggtggctgagatccaagctggttcgaataccagccacatttccacactgccaaatgtcatggcaagagaagacttgacagggaaccgaagaggagccaggaccatccctacctggcggcatcaaagagagaggactgttatgacctcctgcgggtcctgacagggaaaggtcctcttctgggggcaactgtggcgacggcgcaatgccaacgtgagccaccatttgaaatgagaaagagcagtgtggcagaaaggaatgagtttggtgcagaccagtggttggtttcctagggttagaggtctaggtctaccttcttttagaagaggggcagtggtgagtccttgatgggagccccctgccccggagttcacttaagagcaggtgtaccttcctcccctgcgtggctccacgaagctgggaaagaaacgcacaagaggaccaccctagagccccgggcctgtatggcctgaaatcgcctctcccctcccacactgcagtgctgacaccccctttcccatcagcttccagaaaggagggttaggggactggggagagggagggggcagacacccagcagtccctgtgaggggggcggttggggcgggggtgcagacacatcacggggcggtttggtatccatccgctgttctctccagcgcggctcttcccgacctcgcgatcctgtcccctgcccgggcccccagccgcccgctggtcccatatattacagcagcgacagaaatatggtagtggtcgccacgttagggtccgtgggggcctcctgaggcagcctggtgccaacccgcacgcccaggctggggctcatcctggccctgcccacctcggggtcggaactacggtgggcctgggatgggggcgtcaagcactttcgcgccgtatccctccgccccccttcccgacaccctcgcggcgagcggttcttgccgcatcctgcgcagcccctgcctactttggtgcagaggcgtggggggcgggacgcgtctttcccgttcggatcgcggggaaagcagtggctccaagtgagccagaggagagctgaggagaggagggggaggccgacgacctgggccctgggcctctgaaggcaagtgcgggtgcatgaggtgggggtccgggttgcgggggtggtctggcagggtggaccagcaggcagcctgccccgcggaccctgacagcctggcaacgaggagacgatccggtcggagccaggcgcttgagagaggtgcgcagtgcccgagacccctggcgatggggaggcggtgaccggagcgggcctggccaagggctgaggggctggctcgggaggcaccgccagatcgtttggaggagaaccgcgctgaccgcttcccagccagctttgcaggcgcccgcgccccgccctcgacggtgtctgtgcccggagagggctgtgggggaggctcctgcgggagaaatggcggagcgggagccgctgtgggggcgcccgggaaggccgttggggggcgcccggcgaggccggcgggggtcggcgtcccggctctgtacccagtccgccggaggtgagccgcgtttgctactccgggtcccgattcccgaaaggggcctgtggggccccatgtcctcggtgccttcccttcccacaggctccaggttgatgtcaaagtcttgtgtctgtgcggtaggtctggcgtattctgacaggacacagtgagcgtctgtagaggagaggcttgaaataaaggagcacgaatattgcctggatttctggaggtgtgtggggatgggggttgggcgctaaacactgattggggacccgaatcggggtaggggactgtgaccagagcaagtcaggcatccaggagcacctcctaatcttcacctctctaatggcgctccccccaccttccatccccacctgtctcccccaccgtcctaaactgggggcatgaaagggtgggctttggaggtgggggtgatgagggagacatactgacaagtactaattcacaacctgttttctagaatatgcggcgcccttcccccattttatgctgcgcagagcaaggggatgtggcgcacctagtggtgaatcctcagaattggagaagggagtaatgggaagaatatgacgtcaagagaaggagttgttatctctggaaccttgaagcagggcccaaataaaacgagaatattccaccagcaaaaccccgaatgttgaaagacagataccaataatatggggactcttatccttggcgttggcctgtctaccaagtgctcttctgccaccactcatatcctgactgtcttactttttcatgtgtttgtccataggcctactttaaggctggccaattctgcaagaaaggcaaggaggaggagactggctcacagctctggaggttagtgagaagggggagaggacaatgcaggggacagttggagagagcatggcaggtggcagatccacttccacctgtagtagaagtggcagacccacttctattctgccggatttgcacagtgccagcatcctttttatttcttgcaggagacacgagataggtgtaggttgggttgtgactcagaaaagacctgagagcagggactaggacacaggaaaccatagatacattgaactcttgaatgggaagacagatatttgtcacaggggccagagtgcccacctacctaccaagcactcacactccattctctcctgtatgttcacttgtctgtaggacccccttctgtcagctgtggggcttgacaccacttgaacaagaaaaggagggggaaactgcaccacatcagtgaaggttggtatgagagcgggtatacttttgggcggggtagtggagaccagcatgggtccgggagtgattagggtccaatctgggggcttcttggcccctcccattgccgacacactttcccaccattgttggacctgttttgtaggaggcagccggtccagagagactttctcaaagcccagctgtcccacctagcattcaacatcagtcgcactgcatacgtctcatacaattggaagagactcaaagcctcatttcattctctctccctagatccacctccagtggctgctctgctggtggtggagttgctgctgacaaccaccctcaacgggtctgcacccatccaggaaatatctgtcttcctttagcttggttgtacctgttctcactctatctgtattattgaattattgactgagactgtgtttgggaaggaggctgagtgactactggactggatattgactctaactcttattcccaagcttatatccttaatcacctaaagatcagagtgtgaagaaacaaacctgtgacagatctgtggttgaggtttagactacgggaggagtatattacctgactttctttgtaacttgtaccatgactggggcagagattgagcctagtgcccaggccaagcctgaaaagaaggctggggaagaggttatcgctgggcctgagagagagaatgatgtccctctggtggtcagacccaaggttaggacccaggcaactactggggcaaggcccaaaactgagaccaagtctgtgcctgcggcaaggcccaaaactgaggcccaagcaatgtctggggcaaggcccaaaactgaggtccaagtaatgggtggtgcaagacccaaaacggaggctcaaggaatcacaggggccaggcccaaaaccgatgccagggcagtaggtggcgctcgttctaaaactgatgccaaggcaatccctggagcaaggcccaaggatgaggcccaggcatgggcccagagtgaatttgggactgaagcagtgtcacaggcagaaggagtgtcccagactaatgccgttgcttggccactggccactgctgagtctggatcagttactaaatctaagggcctgtctatggatagagaactagtcaatgtggatgctgaaacctttcctggcacccagggtcagaaaggaatccagccctggtttggaccaggggaggagactaatatggggtcttggtgctattccaggcccagggccagagaggaggcctctaatgagtctgggttctggtcagcagatgagacctctacagcgtcttctttctggactggagaagagacaagtgtcagatcatggcccagggaagagtccaataccaggtccaggcacagggctaaacatcagactaatcccaggtccaggcccag

SEQ ID NO: 12415 - DNA, 6000 bp, Homo sapiens
gaatctcttgaacctgggaggcgaaggttgcagtgagccaagatctcgccattgcactgcagcctgggcaacaagagtgaaactccgactcaaaaaaaaaaagaaaaaaaagaaaaaaattcaatactcacttgtgataaaagctttcagtataccgggtgacagagtgagagactatgcctcctccccaccaaaaaaaatataaaaaaaaaaaagaagttacacaaaatactatgtactcttttatttatttatttatttttattattatttttttttgagacggagtcttgctgtgtcacccaggctggagtgcaatggcaagatctcggctcactgaaacctccgcctcccgggttcaagcgattctccagcctcagcctctgagtagctgggattacaggcttgcgccaccacgcccggctaatttttgaaaatactacatactctatgattctatttatataaaattctagaaaaggaaaatctatagtgatagatcagtggttgctaggctttcaggtaggggaagaagcttgactgcaaaaggccacgagggaactttctggaatgtcgaaaatatttattctatgtcatgattgtggttgtggttacacgactgtatacatttgtcaaatcttactgaacagtacaattacaattaatgaattttactgtatgctaatcatacctcaataaagccgaaaaaaaaaaaagtcattctggaggagagaaatcattgcctgcggagggccattccagggtggtgagtgcatgagcactgaagacacccggagcagctgctgcaataatctgggggaggaacgtgcaggcagagagagcaagaggaagtcagactgggaaaccccgaggcagttacccaaacagcccactaacagcaactgcagtcggccgcctctggggaggaaagcgggaggggccactgcctttaaaaaagaaaaaaaaaaaaaatctctgcagttttgccagggagccgcctcctgcctgactctcacatgatgacctggaggccatctatgggtacggccctcaagccctcaacgctcaccctccttctaccccccgcccctcaccccagcacctgctggagaccctggccctcccttccactccgcgaggctcttaatctatccagttccatgggctgcctttccgcagctataaacaggctctgtccagctttcccagttattattcacttaggtgaatggacacaattagatgatcatccgcaggctgtcttcctgtcatcattggcacacgcacacaccctcacacacgcacacaccctcacacacgcacacaccctcacacacgcgcacaccctcacacacaacccccccaacgccacacacacacacaccacacaccctcacacacaaccacccacgccacacacacaccacacaccctcacatgcacaccctcacacaccacacaccacacacaccccacacacacgcccaccctcacatacgcacactctcacacacaccctcacacactctcacaccctcacacacgcacaccctcacacacaccctcacattcacacaagtacacttgagtttttattaaatttgtttttgtccccttcaatcccatcctccaacccgttgttcctccctatctcctgggctctaggtattctccttcgggtcacagtccctgtgagggccgttcctgttgacaggcacttggctccgtccttcccactgcccacaggctccaccatctgcacatgcacccctcccacacaatcgggggcctctttctcctcgtccttggctgcctcctctttgtcttccaccccttacaaatccttcagggccctttaaatgccttttccacctgcctgctccctctagccccgctgcccagtgttaagtgggtcgcaccatttctctcctgggtgacaggcacagcttccaccagcctccctgcctccactcttctctgcagaagcccatgtgctcctggggcagagcccaggtccttccatctctgcagccacagtgctaggccagcggcacttgcagtttggtgaatggaaggttctgatcatggggaaccggtagatagagagggacaaacagtgtccccccaatctgcctcctgtcctcttctgcccagacactaggctggaagatcaggagccacaccttggcactcacagagccctttctgcaagtcttagagggaccagtgggaggtgtgcacacaggggctgcgctggcaggagtgggggcctggcacacccccaggtagatgccctgcccgttaacgcccaagggcaggggcttgagtgactcatgtgggcctagcgtgaatcagcacagtctgcccttcttcccatgggagctgctgcccagccccatctttcttggcccccgaggggtggctgcccagggcctctctcctggcacagttccatgtagtgcctgcccatgtggctcccagttcctccccggggtcctggctgagcagaatggcactggatcctgatctggcttcttgcatcccagaggagaccgccatgcgggcccttcctccagattcttccctagtttaacaacaggaagcgaggagtccaggggggcagagattgccacgggcctggccacattgctaggggaggtcccaacctgctgctgagatccggcactgcacagcctcgttcaggcagagaaactgataaggagatggttgtctgctcaccccaaaaggttagcatggattcctcgccctagccggctttagacggagggaacaaaggctttcccaaggccctgccagtccccacccctgcccatcttaccaccgtagtctccctcaatcatcaagtcccattgcacagaaggggaagctgaggtgccaagagctggcgtggcctgttcaaggtcacactactgggcaggggccaagcaggggctggagccttgctttcctattccccagccagggtccccaaattctctgccagttgagggaagccatctcctattccactgatctgggtggcattaggaaggccttttctatgctcctagattagtgacagcatgcggttattggggacagcatgaggatgtgcatgcgctgaggagatgcagctgaagcgtcaggcctggggtgccagcactctgcagcctgcccccaaggggctctgcaaaaacatggcaaagatgcggggtgtgatgtgcacctgtgtgtgctgcgggtgtgtgcgtgtgtggtgttggctgtgcgtatgtggtgtgtatggctgtgtggtgggtacatgtgtgggtgtgtggcgtatgggagtgtgtgatgtgtgcatgtgtgtggtgtgtaatatatgtgtgcatggtgtggtgtgtgtgtggtgtggcgtatgggtgtgtggtgggtgcatgtgtgtgtggcgtgtggctgtgtgcatgtatgtatgtggtgtggtgtgtgcgctgtctctggaaaatgcccaccctgtgttcccaccaccctaacagggccgggaggggccagggtgctgccaggctctctgggcaggaagaggaggccttggccgcgggccggacttgggcctggtccgtgaggctgttttggtctctggcttcacaggcaacagagaagacagacaaacaggaagaaagcagctgccttgggctgggctgggctgggctggcctcggctgagccaagccaggcctgggtgcggggggagtggaaagagaactactgggatgggggctggagggggtgtggggacaggggaaggagagaggtgttgggggagggaggaggagggctcaggtacagggaaggtgcgtccatactcatggtatgttcaagaacatgagcgagcgtctctgtgttgtgtgtttgtggctgtgtggctgtatcatgtgaggttgtgtgtggtgggagggagcccgtgagcacacggaggtccccagcccctcttcctaggacaggtagttgcaggtggggcaggaggaagagggtgggggtgtccctggatctcacaggggttcgtgaagcctggcttggcccctgccccactcctccctttcctgtccctcgtctccggccaactgggccctaactggggaggaggaggggcctgcgtgggcctgggaggggcccagcgaaagtgttttcaccccttccttgcctgggcccagcgaggagcaggaggaccccaacttgggaagggggcgtgaagctcccatgaaaaagcagcgcagtcctgggccagacccaccgctctctggcctcagtttccccacttataaaatgggaatgctgaactaagtgacctcccagagcactgccaacccagacaatccaaccaggggggcgtggtagggtgagggtgggcgtggaggctatggcagtgggaggagggagtcctgggccgggaccagggaggccctggggaaaggaagggaaacaggaggccaggggaggcctgggggaaagggggagggggaggaagtcccctcctggccaggtcactcccagaggctgggctgggccagggcagggcagccgatggagagcagatctgagcacccagccaccttcacgccaccgcccagctgcccaggagcccagccaggtaaggggctgcgcctgcctgcccccctgcccagtccccagccctcggatggtggcctctctcggcctcggttggggcaggggagttctgcgtgtctgtctggggtgcccactcccaaacccgggactcatgggctgcctgggggatcctgggttctgtgcatccgtctgtctgaccatccctctcaatcttccctgcccaggactggccatactgccaccgacacgtgcacacacgccaacaggcatctgccatgctggcatctctataagggctccagtccagagaccctgggccattgaacttgctcctcaggcagaggctgagtccgcacatcacctccaggccctcagaacacctgccccagccccaccatgctcatggcgtccaccacttccggtaaggcttgcccctccatgagtccggtgggcagagtgggtttgacgattcagggaagcccctctttctaaagacctccttcaccctcacctctgggtgtgtctctccaggctgccaatgagtggggaggggagcacagccccacttccccgccagggctggggctggggctggggctggggctgcccttccttctggactgcatgagcctggggtgtgtatccctcataacatggctttcctggagtcccctctgctaggagccaggaagtgggtgtccggatgggggcacgggaggcaggcctgagtccccctgcacagcaccctctctaaccaggccctcttcccgactccttcccagctgtgcctgggcatccctctctgcccagcctgcccagcaacagcagccaggagaggccactggacacccgggacccgctgctagcccgggcggagctggcgctgctctccatagtctttgtggctgtggccctgagcaatggcctggtgctggcggccctagctcggcggggccggcggggccactgggcacccatacacgtcttcattggccacttgtgcctggccgacctggccgtggctctgttccaagtgctgccccagctggcctggaaggccaccgaccgcttccgtgggccagatgccctgtgtcgggccgtgaagtatctgcagatggtgggcatgtatgcctcctcctacatgatcctggccatgacgctggaccgccaccgtgccatctgccgtcccatgctggcgtaccgccatggaagtggggctcactggaaccggccggtgctagtggcttgggccttctcgctccttctcagcctgccccagctcttcatcttcgcccagcgcaacgtggaaggtggcagcggggtcactgactgctgggcctgctttgcggagccctggggccgtcgcacctatgtcacctggattgccctgatggtg

SEQ ID NO: 12416 - DNA, 6000 bp, Homo sapiens
taccaagagttaaacttgtgttattattatatttgtaacatttgtttttggcaaaagctcttcaaatttgtaaaaaaaaaaaaaaaattgaaatagaatttctgtaactcactttgaagtaaaattcatatgcatctttcagataggattgccacaactgtaaaccatcttatccaattatagtctataaaagaatgtgattagattgtgaaagcaaatcagtaatccatatactacatttaaatcttataagatcaaaaaataaacttaaaaaaaaacccaaattgggaaaagcaaggaacatacaactgtcactgatattttaaatttaattataaatgtaatgagttttattatagtctgtcttctgagaagacataaaaataataaaggatgatacttgtcatttgaatttacattgagttaaaaatgaaaggatattcacctacactcatgctcagatctctactcctctacaccatacatactatagaaaagagtttcctacaaaggaggcatgtaatcattcacaggcacagttgagcacgagtcctactcagcatctcagtttgttcagaatagaagagacactgtgtggtgaccttttaagggaaaataaaaacagtgttgtctcagagctatgcagaagatggatcttgcctacctctacggaataacatggcctaaaactaatcattagtgtaataaatattttcttcattttcatattagtaaatagattctacatgtccttggacaacactagagattcagcattagccttgacattgaaataggaggtgattgtgaaaggccatggagtaagtttcaggtgcataaggagaacctctcaaaacctagtaagagttggcttttgtgagggaaggtgcaactcagcaggctgctggcgttgaagtcgttcattcgatagagttcagtgtgtggtagaatctgaatgaggcactttgtcaaaattctggtcaagatcagacacttctcaaaggcatgctcactcccacctctgatccatctgatgagagccttgaaatgtatgccttatttctgaactaaccctactaggacagattgaccggagcagaacctggctttttctctaatgaagtaagcaaagtatttagagtgagagccacgacatcatacattccatctccaggcagggtgaaccacatggttgaaattggttgggttggtataattttgaagctcattcttggctcttagaatctcttacaggtgttgtaatctctcctgctccagactcttaaaaacaaatcacattttcaagtgtctggcatactagaacttctccagagaacttgttcttagattaagcatggaagctcagagttgaaaaggttgaaggtgcattcagatttagtgttcttatgctcctcaggctggtggtttgaacccattccacagtcttatcatccttgtggtgtattgatgccatactcacttcatactatgacatgcagagagctataacaattgggaacaggagttacaggccatattagctcctgcacacataacctttcatactgtgagtccatatccaatcccatgtggctgaagcaaaacatatattctgcgtgattgaattccacagaagaaagggcctcgaaagactgctgtgagaaaaatgtaagtgagaggtcattggtatatgccagggttagacatcttcatggttgctcaacagaaagaatcgagaaaggcagccaacacagcttttccttgaagattgttatctactgtacagttcctgagccataggttcattgaaatttctgtgagaaagtttagttctatgtctctcttagcaaaggatcagtccactgctacaaacagactagctgaagagcccttcctaattgttgaagttattatgagtaggcgaccttttttattttttctgggaacttgatgccaaatctcccttccactcattcaaagaaagaacatggataaaatagagcatgttcctgggaacaccgtgattccagtaacagacaaagactgtaattttccctttgggaacacattcaatatgatacagtttcttacaaacagtagctagaatgagctcatcacaagtaatctctgtaatgtacagcccttcttttaaaccaactggactctaacatgattttcagcaacagctgtaagaattgctttaataatagccaacatcctgtcttaggcttccggtggaaaatacacagattgattttcagtctgtttttatgtaggacagatttaaatccttccagaatcctggccatcttattcttttcattgtcattttctgttggaactagtagtagaattagtagaagaccaacagaactggccttcaaggtacatgtaagagataagctgtcaccctgaatatacaaaaactatctttgctcatagcatgtataacatctgaagctaagacagagctcatcaaaatatctttatctctaagatacaagattggctcacaacaatgccagctggatggattttccttcaggcaaattaagccttagacttctcaattcttgaacaagttgtttggcctgcctggctttctaaagagagattgcaatccttaaagacttgcccaggtaataactataatgagatttcaaaagtggatccagcattcttgattctgtgtcagaacttctcaaaatctcaaactctttggtcttcttagaaacagtagcttgaaaacactccagaaaatctttctcattgctgatctaatgcatggtttctgcaatttaagttttccagaaggcaacctactcttaatgacaaaatctcaagctcattttcacattgtctattttgagctgctaagctatccacaacagaaaaaagcctttcattttcaccagttaatttattttcttttcttcgaacctcgcattcctctttgcaaaataatactttcttctcaagttcagatttaatttagaaatctcttgctgataccctaaagtggcaattttcctagcttcatcgtataaggacctcaaagctcacttctattcgtttggagaagtgctatgtgcattcacaaagtgtgtgttgctttgaagccttatcaatggtatcctcaagctaagttttcatctctttgctgaacatctaaggtttggagatttactattccatggagtcacttttctgcatggccactttcatcttttcctatttgtcactaaatgttcaggaaattttctgtttctgtattccaaacatgctttaatctctgagaattcttgcagggctggcttttattactgatgggaaactctgtatttttggcctacaattttgtcctctctgaagtttcaaccagttgcttataaaaatctttattttcctgactcatgatgcagcactggttttctagtcctctcaagtctgggtgtggaatcatcattcttttagtaaagtatcaatgtatcaagttatcacttgagtatatttgaatgagatatttactattgaaatgcacactttcttcattcaaatgtttgatttctttatgttggtttcaatttttatggcacaaagagaaaaatgaagggactgtagaatttgtgtgctttcttgtaacttcctactcagttccagtttctcttgtacttgtcttcacacccgtctttcataaaattcaatttgcaagtgaagtaaatcaaaatattttacctcaaggggaagatagttctttgacatattttaagatggttgtcagagagccagtaaactgaagtggccttgaaaagctaactttagtgggggaaatttgcatctatagagaatgttccctgaatcctgctgcacatcatcacctatggttaatgcatttattattaaacagcttcaagataatcagaaatccccaattagaagaataattttccactgtaaatgtaaacccaatgaattgcaaatgtaattctgaaaagcctgtataagaacaaagaggtaatatttcagtatttcttaggatattatcatccacaaaactaaagttatgttagaaggatctctgacatacaaaatataaggtgcttctaggttttgtatattttttaatttagctgagcactgagtgagcctaacaggtgtccacgactttgtaacagtgacaagtaaggtcagccacaggcatttcataccaccaaaaacctgggttcctaatatgtcttggctgtttgctccagtgaatcttcttggtctacaagcaggcatttttgtcttttcttcctccctcacttactccttccttgactcattttcttgttttcacactttctctcttcttatttccttccctcctttgctttctccctctctccttcccttcctcctttcttttctttttcccttcctccttccctctatctctcctttccttcttttcttctttccttcctttctacctttcttccttccttatttcccttttttcttctgtctttaattagcgattgctataggcctggctttttttgtaagcaatgaagtcagatcagtaaacaaggtagagaaggccttgccctcttggagcttttatttcagtggtaaagacagagaaaacagcagcaaacatatagataagtgatgttataaagggaaaataaatgagtttaaagaagaaagagagtaagagtggtatgtgacaaacagataagtcattgtgagcatctaatatttgagtagttgattattgtgagaacttaacaagaaattctttcaaagtacttacaacagtccctgacaagcaataataactgggtaaatacactagcattgtcgttagcattagaatcagtactccgaatttttttttcaaaacaatcccagtagctattatagaggcatgagttttctactattaggagtgttgttgaattcttctagagtataagagaagtcgccatggacatagagttttgggcaggagaaaagaaggggcaagaggtagcaatgcaattttcatggaggttgaagagtgctttggagactctccagattatttacttcgtgtttcagaattggtatttattgttatgtttgaagatgtgtctgatctgggaaatgcacagagataacatggtttaagaggtaccagaatgctgaaatcccatcttgtataccatagtttccatttcagattttagagaggaaacattacattctggaaaaaaaaatttaataatgtcaatgaagtctccttgctttcttctaacttagaataagttagctgtcagactggtactttacctagatcttgcgaaggattaaagcaatgctctgagagattatgttcactggaattctaaaaatgccaaaaagagattaataattttttacgattaacctccaaacctagactatttacttttggaaaggcaagaattgatttcaattgtatatttcaggcagccatcatggtaacctgaattaggagtggccctgtgctaaaacacaagcacaatccaaaggttcatacatagcaatgaggagaatgtcagaaccctgaagtcctcaattcattattttctttattccacaaatttttaaggcatacccattgtattaaaacatgattatatgtttcccatgttttagtacccaggttgagattaaacaactttagagcaaaagaaaaaaaatgaacacttttataagataattaaaatgagatattgaaatattgaaaaataaaatttaagccaaatgataaaattataaattacttgactagataatatgaaacagggttatttaaatacatataggatggttgttaaaatattagcgtttttgttttctagaagagtggttctaaactgtggatggatattaaaaacacatgggaggttttacaaactacagatgtcttcttggtatcgaggaatactgacataatttgtctggagggtgacccaggagctgaaagtttca

SEQ ID NO: 12417 - DNA, 6000 bp, Homo sapiens
acactcacttgctctcatgcacactcacaccccacacacacccactctctcacacacactcactcccactcacacacactctcacacacccacacacgtgctcacatacactcatgcccacatccactcactcacacccactcacacactcacactcacacccccacacactcacacacacacactctgcatcgccagccagctttccagaaccaccaggcgtggatgtactcaagccaagcagcccaagaagcctcagttgtgctgtggacagggctctgccgagctggagctcctcggtggcccagctggggcttggatgagtggcccgaggccactgtcatggataaccacaaaccgggtggctcaccacagaggacatggaccctctcccagtcctggaggccagaagtccaaatccaggtgtctcagggccacactccccccagaagctctagggaaggcttcttcctgcctctcccagccccggaaggctccaggcgtcctggacttgtggccacctcactccactttgcctctgcaatcacatggcttcttgtgggggggggggtacatgtgtgtgtatatgtgcaatgtgtgtgtatgtgtgtgtttctgtgagtgtatgtgtgggtatgcgtgtgcatatgtgtgtgggtgtgtatgagcatgttcgtgtgtatgtatgtgtgggtgactgtgtatgtgtggggtgtctgcatgtgtatgtgtgcaatgtgtgtgtatatgtttctgtgtgtgtatgagtgtgtcttgtgtgtgcatgtgtatgactgtgtgcatatgtgaatgtgtgtctgtgacgatgtgtgtgtatgtgggggtgtgcgtatgtgtgcatgtgtgtgtttctgtgtgtgtctctgtgcatggatgtgagtgtgggcatgtgtgtgtgtttctgtgtgtgtgtctgtgcatggatgtgagtgtgagcgtgtgtgtgtttctgtgtgtgtgtgtctccgtgcatggatgtgagtgtgagcatgtgtgtgtgtgcatggatgtgtgagcgtgtgtgtgtttctgtgtgtgtgtgtctctgtgcatggatgtgagtgtgagcatgtgtgtgtctctgtgcatggatgtgagtgtgagcgtgtgtgtgtgtttctgtgtgtgtgtgtctgtgcatggatgagagtgtgagcgtgtgtgtgtgtttctgtgtgtgtgtgtctccgtgcatggatgtgagtgtgagcatgtgtgtgtgtggcggggggggataacccaggataacccacatctcaagattcttcacttgatggcatctgcaaagaccctatttccaaataaggctgcattccggttccgggggttgggacatggacacatcggtggggacatttttagcctgcccctgggctgcaagtggacacgggctttgcccctgaggccttggggaaggggctgggacctcagccagggagacagtgggcatgagaagacgggatgggggccccaggcccagccaaaggggtcctcacttcagagctggccaaggagctgctgtcccaacagtggcaggagggaacctgggcaaggagggggcatggcccagaggcctgggagaggacggacctggtgactgggtaggggccaaggagccaggagagaaagcagttgtgggaggggagcgggactgaaggggctggaggcaggtggagagagagaggggtgagagtggggatgaggcggccaggtggggcggtgggcagccgctgagagcagggtgctctctgtggcttttgtttcccaggcagtcgtcggcaatgtgggagagtggggtggggacggaggcctggcgtgccctaaggaggcaggtccagggcatggtgggacaggctggcttgggacctgggagggagctgggaagcagagtggtctgggcctccctgggtttggctccctaagtactcccagtgcagaggacaggacttggtgtatgggagaactttctagcaaagctcccacctctttactgatggaggacccaagaggggctggccggtgagcaaggatcaccagtgacactggcagcatttgcctggcactcaggtgtcctcattcccaggcctgggccctccctctcagcctcagggctctgggctgggaaccaacagacacaaaccaaggagaaaggaccatccccttacctggccattagctgtttaggggccacaatttgctgaggactagggacttccatgacactttgttccttggccatctgaccttggcctcagtgggactcatcacaaaggtaggcaccatggccaactcttggctggattagccatgagcagtgccctgggggcccgggggaggaggcaaagtggtggggcaggtagcccctgcctcagattttctcccctgaacttgcttcttccccctggccagacagggcctgtgcagagtctggggtcagagaatagggaggggagatgcataaacacgcaacccaggcagcagctgctccaagctcagggagattcccccatgtggatagcagccatcagttaaatgaacagcctccatccctcagcatgttccctggtccccgagggaagacagtgacgcagcccaaagggactcttctctttgcttgtcagctctcacagccactcctaagcctttaagtgtgggtctccccagccccacacctgccctcccagagctgcccacacatgtctgctaagaggtgcttgtcttcagccgggacccaacccttgcccaagggatgctcctgctgggggccacgaaaggaggccagctcagcagcctgcttctgcctttgctcactccagagcagggcccttgggcctgggatggaaggacatgaccccagggagcctgccacagtgtgggaggccaagaaggaacgtggcctgaatgcgctggggaaaggagctcctctgccctcctgtggtgcctgagggcatgggggcagctggcctcccggccaggggccaaagtccagcttacaacctgctccgggtgggatccagtgccctctgggcctccacttccccatctggaatgtgggctagtaagaggaacgactccaagatggcagggctctggcgaaatggccagaacttagctcatgataagtttccagcatcattggggcttgcttcagtcttgatttttcccattcggggccatgggaagtcacaggctgtgtgtgtgtgagaagggggtgtccccatggcggctctgggcccggaggagcacacgccccaggctcaggaaaagctgcctcagagttggagtggaaggggactgcgggagtgtgcaaatgaatatgtgtgagagtgtgagtggggagtgtgtgtgtgagtgtgactgtgagtaactgtgtgtgagtgtgtgtgtatgtatgtgcccatgtgtgtgctcactgggtaagtgtgtgagttgtgtaggtgtgagagcatgtaaatatgtgtgaaccattgtgtaactgtgtgggccaccgagcttgtgtgggtgagggtgagtgagcacatatgactgtgaggatgtgtctgcgtgagattgtgagtgtgtgcatgagtgtgtgagtgtgtgtttgtgtaagtaggtgagtgagcatgagttcatgcatatgagcaggtgtgagtatgtgtgcgtgcatgtgagtgggtgtgagtaagcatgtgtgagcgcacacatgaccaggtgtatgagtgtgtgtgtgcgtgcgtgcgcgaacctcagctttccacggcaccagctgcttcctgtggaagggaggggcagtctgtgggggttgtgacggttccctggtctcaggggcagcagaagctttctgtccttttggtccctagcacagtggtgcctcctcaaagaggccttccctgagccgccagcagcctctttcatggctccccatcaatggggttccatagctccgaccccagcggcgtgagcacatttgccatccgacggccactccctgctttgtggtccctgctgtgtccccagtattcagctctggtctggcacacagcatgtccagggccctctttgtccaaggcaagaaagaatttgaggctgcgtccaggcctcttgcacctgcctcaggctcccgcccagagcctctacctgtgccccagcgagcattctctgctcgctgctcagaatgctcgcaaaggccggccctggggtcagaggcctccacagcccctggagctgggaagcctgggggtccaccggcaggcacgggggtctctttccaggtaggtgggaacgcgtgcttgtgggtgtggacaggtgtctgcactggggtttgtctgtgtgtctgtctccactcacaccggggatgtatgtgcccctgcgtgtctgtctctggtgcccacctgtgtgcagtctctgtgttctgcctaacggtggtgttcccgtgataaccgacggtgaggatctccggtaagcgccgcttcctctgggaagacgcatttggacgcccgtactctcaacaggtaatggagtttgcaggagaccaccaatgccttggagtccactgaggcaagacccaaggaccccacgctacacatcagccacccggctctgtgccccattttactgttggggagacgcacctagagggcagggtctggagaggtagtggcagcctcagtcgcaagctcagggtgctctctctgcactcacaggtgccatggtcccccagtttccatccccacccacccccactcggccagtgccctttgggggcaatgccaggccaggaagggcgggcaccctcgcgcgtcctggggacagaagggcgcgcaccgggcgcgtagctcctgagccccgaggcccctgcgccgcgcaccgccccccgcgcccgctccctcctccctccctcctcctcacccagctccctcccctcccccctccctccctccgcgctcagagctgcggttggagccgagcgcgccgcgtcgcccgccgccggtgcagagcgtggggagcactcggccgcagccctcgcccgccgcagagggtcgcgtcccgcgccgccggccaggccgccccgtgcccaggcctttccatccttggagcggatcgttgcccgcctgacgcccgcccgcagcgacagcgcccgccggagccgaggccgcggcggcggccgtgcccatgcccgggtaagtggtgctctgggcgcgcgggcgccgccggggtgggcgcgggcgcggcgcgggcacaaggcgcgggtggggatgggaggatgacccggcaggtggtgcggcggcaggtagggggacacgggtccccgcccgaggcacctgagccccgcgccgggcctgcgtgtccttgcggcactgcggccgcgcgtcaccccggggccccaggccggcgggcagcgccccgcaccctgcaccctgcgccccgcatcgcgcgcgcacgcgcatccgtgtctgaggaacaaggcccttgggggctgcgggccggggctcagggtgggcgcagccgggggcgcgggatctgggccgggagcccgccagtgcgcacgcaccttcccggagcctcgggcaccccctcccccccgcgccctcacactgtatcatccttcccctctcgccttcccgcaccgttccccgcacgcccacgcggctgcccagcagaccccaccgcggtcatgggcagtgcccacgagaagccgcccggggccgcacttaggtaacttctccatccctccaggaacggctgtctccccctcctcgcctgtgtgaccttggccagccagcttttcctgtggccgcctgcgttttctcacgggtgaaagctctggctttaagattctggaatttggaatggcaggtgcggcatctcccagagcctgagacgatgggcttctctctctgtgacctggtgtccttccttctgctggcccttctgggggttggtggctcagccagccggctgaggaggggtgggaggcagggcaggggcatggcgccg

SEQ ID NO: 12418 - DNA, 6000 bp, Homo sapiens
acagaatgagagaaaatttttgcaacctactcatctgacaaagggctaatatccagaatctacaatgaactcaaacaaatttacaagaaaaaaacaaacaaccccatcaaaaagtgggcgaaggatatgaacagacacttctcaaaagaagacatttatgcagccaaaagacacatgaaaaaatgctcatcatcactggccatcagagaaatgaaatgcaaatcaaaaccacaatgagatacataccagttagaatggcgatcattaaaaagtcaggaaacaacaggtgctggacaggatgtggagaaataggaacacttttacactgttggtgggactgtaaactagttcaaccattgtggaagtcggtgtggtgattcctcagggatctagaactagaaataccatttgacccagccatcccattactgggtatatacccaaaggattataaatcatgctgctataaagacacatgcacacgtatgtttattgtggcactattcacaatagcaaagacttggaaccaacccaaatgtcaatcaataatagactggattaagaaaatgtggcacatatacaccatggaatactatacagccataaaaattgatgagttcatgtcctttgtagggacatggatgaagctggaaaccatcattctcagcaaactattgcaaggacgaaaaaccaaacactgcatgttctcactcataggtgggaattgaacaatgagaacacatggacacaagaaggggaacatcacacaccggggactgttgtggggtggggggaggggggagggatagcattgggagatatacctaatgctaaatgacaagttaatgggtgcagcacaccagcatggcacatgtctacatatgtaacaaacctgcacattgtgcacatgtaccctaaaacttaaagtataataataataaaataaaattaaaaaaaaaaaagaagagtgaaaggcagttcttccccaaccccagccccattccactcttcagagttaataactgcgggcagtctgctggatatctttctggtcttttgaatgcaaatattaatatgtagctgtatattttgcataaatgggattgtatcatatatacggccttgcacacaacttttttgcatagaatatttgcagccttttttccttgttgaaacacgtgtatcttatcccttttactcgctaaacaatatataccattgtataatatacataattcatttaaaaaaaaaagaagtgcagggataataatagtttaatttttagctcaactgatagaaatgttgttaaaaatctcagaagtcttgttttctaaaattctgggaatgggccctttggatccctaattattgtattacctagattgataccactttttttctccttcgttccttccttcctttcttttttttttttttttttgtctttaaggtagtgtcttgctcttttgcccaggctggaatgcagtggtgtgatcatagctcactgcagtcttgacttcctgggatcaagcgatcctaccacctcagtctcccaaatagctgggaccacaggcgtgtgccaccaagcccggctaattttttttttttttttttggaggcagaaattccctgtgttacccaggttggtctctaactcctgggctcaagcaatccccctgcctcagcctcccaaagttctggaattacaggcatgagccaccatgcctgccaagatgccactttctaaatataatgttccagctaactgtggtcaggtttaatagctatgtggttcatatcacacttttctatttcattgatggttgtgtcagcaggatagagttgacagcctcaaaaaagttccttcttcagtctatctggtctactgcagaaagagataaatttattctgataggatttggttttcacaagcctattacttaatttctttttccattcaaatggcctgcatatagatttggggcaatttttccaaacttgttttatataagaaaagaaggtaagcttagatgtctattatttctagaatcattttcctcttggggaaaatagataaatataaatgtataaatataccctcactgtagccctacaaaaactttgaccttatttttatagaattttggaataaaaatcatcaggatcttcagattttaatactatttttataactgaaaattatcacacagtcagcacagtcttttgtttcctctgacaattaatagaattctacaacatgatttttttgtagaaaatgaatacaatacagtcatgtatcccttaatgatgggtgtgttagtctgttctcacactgctataaagagcacctgagactggataatttatgaagaaaagagatttaattgactcacagtttctcaggcttaacaagaagcgtgacggggagacctcaggaaatttacaatcatggctgaaagcgaaggggaagcaagcacatcttaccatggtggagcaggagagaacgtgagtgaagggggaagtgctacatacttttaaaccatcagataccacatgcagccttgtcaaatgtgaaaaaccatttgtcagtctgttttgctgtgtctcaatgacccagttccagaaaaggcagaaaccaaaacattaacttgtatgtttatcttcatatctcatggcaggttacaattattatgtgttctatacaggtttgactctcccttatacagccagaaacaaaagaaggcaggttacatggaaagacagtataaagcatctgagaactacggctttataattacaggaacctgggtttgcctcctttctcttccatcttctaactgaacaactttagcgtgtgaaagccataacatctgtagttttctgaggcttgatcacacaacaaacattaccaactcatcttttgtcacagtttactactacaacaggaacagaggcaaaagagtggggacatagacagatctagggtaatttctaggctatgcatgaaaggagtcctttagtttgttatatgagctttgactcagatatatcgcttccctctgattgagttgcactagggaaaagccaactgaaaatactaggaattaattattaagtcatgtttatatatttatatctttcatacatattcatctatttatttaatatttagtgctttaattattaaactgtttttgaacattgtttatgggagaatatttttggcagccaaaatatattttcaagtataaacagctgagtaagaatcagagcgtcatagaaacaagatagagcctccatttcctgagtccgttatggtgtttttgaagtcaaaacacttaaaacaggtaaaaggatagactacttttccctatttaaaaatatcagcatgcaatccattccctgagaagtttaggaggtgactctatacaagaaagttctttattttagaattgtaagaaaaaatagcaaaagtgctcctgttgtttggaaaggtacagagaaggtatcaaaagttttcggtattttaggttaattttatatgaagagtaaaatgaagaactagaagaattaaaatgatttgagactcaaaacttttagaaaatattgttattgaactgccagcaaacgtaaggatattcagcaggtttagtgcttgattgcacgatgaagggggtaagaagtaattattgtcaaattaaaatggattgactttggtctcatgtcatttcttatctaatgatttaatataacatatagttgtaaaggaaagcagcattatgtcattcacattttgcaaaattgaactgtccctaggctactttggaagggacaactgcctaaagtttccttttttcacacaagatagtccaccaccccatcagcaaattattttaaattaatttgttcagcatgaaaggaaataagaagacatggaaaccactcaaggaatatgaaattcaatccaatttcccattttgtgagcacctatgatgctgcatctataagcacctatgagctgttatggtggaaatgtattgagaatccaaagagaagaagacataattcctgcccacaaaaatcttataatctcaaactgaaaggagaaaggagaactacagagtacacaatatttaaaatactcatatttaactagataagcagtgggggagggggagagaaagagagagacagaaaatgtagcctttccactatttagtgtgcaatgccctatgattagcatgataatggaggataggaaactgaaattccatagtcacagtccccacttaactgttacagggtgaacaaccctctgtgctgagtgtgattcttgggtttaaggtttatattttttgtacaatctggttcctacatgcaagttaattactttatctactgttcaacctaagggataaacttcctgagacatttcttttcaaaattaatttgaaactatatgagttttttattttcttcttatatctttagaaccttactctcaagtgaggtttgattctgctgtttaactaactaggaatatgatcataatggagtacaagagggattaaattctttccagaggtgggaaagtgaaggtttcaaaaaggatgtggcctatgaagagtaagatttcaagagacagatttaaaaaaatgctattataggcaaagtgagtagtcaacccctatgcaaatgtataaagcatccaatgtgtgacaagtatggacaatgtaagtagactggagtaggtagtgaataaggcatttgagggcagtcatgagaggtaaggctaaaaagctaggtagagttaggtagtgatagttctaagaaatacagcctttgctctgtaggtggtggcagtcagcgaaggttgttagtgaagtgatatcatacttgtgttttagaaaggtaattcttagctgctacctcatgcctctggcctggcagaagtttcttcttgttttccagaaaaccacaagaagagagtatagacagccattgcagtacattgagctccatagagatagcagtgaggcaagcaagagagagctagatgggcaatgggtgactctgtgtcttgctgagcaaaaataactaaatgtgggcaaaggagttcctaagaagctgagaggcacactgtcatcatatgcattctttgcagacttgttgggaggagcacgagaaggagtacccagatagttcagtcaacttttcagttttcttttttttttttttgccttctgttttttgagagacggatatcactctgtcaccgaggctggagtgcaatggcgtgctctcggtccactgcaacttctccgagtttccaaagaagtgctctgagaagtggaagaccatgtctgtgaaagagaaaggaaaatttgatgacagaaaagacagacaaggccctttatgaaagagaagtaaaaacatatattcatcctaaaggggaaccaaaaagaagcacaaggatcccaatgtactcaagaagcatccttcagcctttttcttgttctcttctgaatatttgcacaaaatcaaaagagaacaccccagcctatctgttggtgatgttgcaacaaaactggaagaggtgtggaatgacactgctgcagatgacaagctcccttatgaaaagaaggccatgaagctgaagaaaaaatactaaaggaaaaatgctaaagaaaagcctgattcagcaaaaaagggagtcatcaaggctgaaaaaaagcaagaaaaacaaggaagaggaggatgataaagaagatgaagatgataatcaataagttggttcaggcagattttttcttctctataaagcattttacctccctgaacataatttactccttgtaaagaaaaaatggaaatttccagctgtctaggatttgtttttaaactgtacagtgtcttttgtgtatagttaacacactgccaaatgtgtctttagatagccctgtcctggtggtattttcaatagccaccaacctttcctgg

SEQ ID NO: 12419 - DNA, 6000 bp, Homo sapiens
cttctgggctttcctttccactgggccctctcacatctcttatatacacgtgcatagtcccagggcagtccaggagagcgtgagtagcatgggacccctccagtctctggtcagctagaaatatactgccgcaagcacatccatagcctcagttgagtagagctgatctgtttgcccttcccaacccgcccacctccaagaagtcacttccaccgatgacaccactgggcacaggtgttgcccaccaatccaaatgagcgagcgcccttcaagcctatggggagaagctgctggtcttcatggccttccccgccttggcatagcctccatgtccagcaagccaggagggatgggagcagccctgggccagaatgccacagactcccgctgttcttactcaaaatccagccacttggattatgagtcatcttccgttgacttccagatcaaaaagcttgtttttgtcagtttggtccagctttatagttacttttttggggaggttgtttgctgttatccacgtttggccatagctggaggttctgccctttctttttcttttcttctctttttttttttttttcagacagggtctcactcagtcacccaggctggagtacagtggcaaaatcacagctcactgcagcctcaacctcccggttcaagtgatcctcctgcctcagcctcccaagtagttgggaccacaggttcgcaccaccacacccaactaatttttttatttttttgtcgagacgggggtctcactatgttgcctaaactggtctcaaactcctgggctcaagtgatcttcccgccttggcctccccaagtgctgggatttcaggcgtgagccactactgtgcccagccagtcctgccctttcagccttttttggccctattctttagatatatctcttataaacagcttatagctggattttttaaaaatcctaactggataatttaatctatttattttgcttaatgttttttggatctatttttaacatattatgttatactttctgcttattccaacgttttggtttcttttttttttttttttttttttttttgagacggagtctcgctctgtggcccaggctggagtggcacgatctcggctcactgcaagctctgcctcctgggttcatgccattctcctgcttcagcctcccaattagctgggactacaggtgcccgccaccacgtgtgactaattttttgtatttttagtagagatggggtttcaccgtgttagccaggatggtctccatcgcctgacctcgtgatccacccgcctcggcctcccaaagtgctgggattacaggcgtgagccaccgcgcccagccccgtttccatttctttatttcccttacttgacctttttgtgattagctgaattttccttcattatttgctattttcttctactagtttggaagtagtacatcctatttatattctagttactctaaaaaatttaacatgtatatttgtcttaacaaaacataaagtctctcaatatcaatacggccatgagggaataagagggtccagaattactgtctcaccataaacagctagaaattgggcaaaatatatgaaaatccattgttttcagatgggggacagcaatcagtgaaggactgtggtccctgagagaaaggagacagactaggagagctctacatcccggctttctgactcagatagaagagacataaaaatgtggcccatatggattgcttgagcccaggacttcaagaccactctgggaagtatggcacaaccccatctctacaaaaaaatacaaaaaattagccaggcgtggtggtgcacacctatagtcccagctactcagaaggctgcagcaggaggattgcttgagctcaggaggtggaggttgcagtgagccgtgatcacaccagtgcactccagcctgggtgacagagaggaatttcagtttctggtccagcatgtaaggagcctgcaagtcatcagtgtctcctaagaagaagtaaaaccagaacagacttaaaactgaacacatattttgatatgtgtaattggaggctctgaggaagaggagaaagagaaaggggcagaataaatatttgaataaataatggctaaacaccagcatttggtgaaaagcattcatcagatccaagaagttcgaataaccccaagtgagataaacacaaagagagccactcatagacatttcatggtaaattatcgaaagccaaagacagacaattttgaaagtattatagcagaagaaataaatgacccatatagaagggaaccacaataaaattaacatctgacttctcatcagaaacaatggaggccacaagggagtggaacaacaaactgaaagcactgaaagaaaaaaatactatcaaccaaaaaaaatttgttttgagacagagtctcagtctgtcacccaggctggagtgcagtggtgtgatctcagctcatcgcagcctcaacctcctgggctcaaatgatctgcctgcctcagcctaccaaagtgctcagattacaggtgtgaaccactgcacccagcccccaaattttatatctagcaaaactatgctttaaaaattgaagctgggtgcatagctgggtgcggtggctcacgcctgtaatctcaacactttgggaggccaaggcaggcggatcacctgaggtcaggagttcgagaccaacctgaccaacatggtgaaaccccgtctctactaaaaatacaataattagccagacatggtggcatgcacctgtaatcccagctacttgggaggctgaggcatgagaatcgcttgaacctgggaggcagaggttgcagtgagccgagatcacatcactgcactccagcctgggtgacagagagaggctccatctcaaaaaaaaaaaaaaaaaaaaaaaaaaaattgaaggtttaaaaaaagacattcccagataaacaaaggctaacatagttcattgctagcctgcctccttacaagaaatactcaaggaagtccttcaggctgaaaggaaatgacaccagttagtaactggaattcaaagtaagaaatggagagcagaaaaaatggttaataagtgagctaatataaaagcctctcaacatatttttattcatttcttctcttttaaaaacataagattgcattaaaaaataggtattacactgtatttcagggcttataacctatatagatgtaataaacatggcattactagcacaaaagaagtgggaaagaatgtagccatactgaggcaaagtctccatatttcaccaaaattaagtgagtattcatctgaggtggattgtgattagttaagactcataatgtaatagctagagaaaaccctaagaaaataactcaaacttggagtgaatgaagcatgtttatgtctaaatttctgcttcaatgtaattaaaaatcaacagaggaaaattggccagcacggtggctcacgcctgtaatcccagcactttgcgaggccgaggcgggcagatcacttgaggtcaggagttcaagaccagcctggccgacatggggaaaccctgtctctactaaaaatacaaaagaaaattcaaatataacagatggacatttcaatgctctattttcaatagttgatggaactagacagaagatcagcaaggatatataaaatctgaacaacactatcaacaaatttgacctaactgatacctatagaacacaccattcaacaattgccaaatacacatttttttcaagtgcacatgaaacattctccaggatagaccataaaacaagtctcaatatatttaaaggaatttaaataatttaaataatataaaatatttctctgactgcaacagaattaaattataaatctaaaaagatagaaacctaggaagtccaaaatacttggaaattatacaacactcttctaaataactggcacgtcaaataaaaaacaaaggaaattagaaagaatgaaatgagaatgaaaatgaaaacaaaacatatcaaaatttatggaatgcagctaaagcagtacttagaaggaaacttacagctttaaaggcctataccagcaaaaaaagaaagatctcaaattaataacctacgtctctaccttgacaaattagaaaaagaagagcatgctaaacccaaagcaagcagaaggaaggaaataaagattagcacagaaactaatggaattgaaaacaggaaaacaatagagaaaaatcaatgaaaagaaaagtcagctctttgaaaaatcagcaaaattgtcttgggtagagtgaccaaaaagaaaagagaatcaaattaccaatatcaagaagagaaaaggggggcattactactgacctatagaaatttaaaggattataagagaatgctttgaccactttatgccaaaaacactggacaactcagatgaaatggagaaattcctagaaagacacatgaccaaaactgactttaaaataaattaaaaatctgaatagacctataccaagaaaataaattgaattagtacttgaaaatattcccacaaaaaaaatccaagccccgatggcttcactggtgaattctatcaaataactaaagaatgattaatgccaatccttcacagactctttcagaaaatagaggagtaagaacactttccatctcattctatcagcccagtattacccttgcaccaagtatatcacaaggaaaaaagctacatatcaatatccttcatgaactcctggatgcaaacatctgtaacacaatatttaaaaactaaatctagcagcacctaaggattgggcaccatcatcaagtgggatttataccaagaacccaagcttgatttgacatctgaaactcagtgtcatccaccacatgaacagaaaaggacaaaaaccgtatgatcctctcaataggtgcataaaaagattcgacagaatctaacatccattcatgatttaaaacagtccttttgcgggtggcggcgagcgcagaggacgccatgaaggccccgggcacacgactagagtaccaggtggtgggtcgctgcctgcccgcccccaaatgccacacaccgcccctctaccgcatgcgaatctttgctcctaatcatgtcgtcgctaagtcccacttctggtacttcgtatctcagttaaagaagctgaagaagtcttcaggggagattgtctactgtgggcaggtgtttgagaagcgccccctgcgggtgaagaacttcggcatctggctgcgctatgactcccggcgcggcacccacaacatataccgggaataccgggacctgaccaccgcgggcgctgtcaccaagtgctatcgagacatgggcgcccggcaccgcgcccgggcccactccatccagatcaggaaggtggaggacatcgcagccagcaagtgccgccggccgaccgtcaagcagttccacgactccaagatcaagttcccgctgccccacagggtcctgcgccgtcagcacaaaccacgcttcaccaccaagaggcccgataccttcttctaagggcagggccctcgcccgggtgtgccccaaataaactcaggaacgccccccaccccccccccaaaaaaaaaaacctttctacaaactaggaacagaatggaagttactcacgataaagggcatctatgaaaaatccacagctaacatcatacttgatgatgaaagactaaacgttttccctctaagattaggaacaaggaaaggattcttttaccacttgtatttaatgtagtattggaggttcttggtagtgcaataagctggagaaacaaaaagaaaaaaagagaaaaggaagggaacaaggaaattataagcatcccaattggaaaggaataagtaaaaattttctttacttgcagatgacacgtgctgtgtgtagaaaatcacaaagaatccacacaaataaaacctactagaactaataaaaagggccagg

SEQ ID NO: 12420 - DNA, 6000 bp, Homo sapiens
aatgggaagacatgaagtgattaataactttctcagtctctttttctccactgtcccgcacatctcttgtgtttcttggaaaaggcaggcatcggggccatggtgaacaattttagcacttaagaaacactttctctactttgtttatctgctacagctccctgctgttaatgttatcctctgtcacagggtaggaaaaggggtggagtttgagaggaagagagggaaaagtgtgagggacctcaaaggtttttcttggcctctgtcctagtcttcttggtgttccagaagggttagaaacagcatccaggataaccccacccctgcccagcaggtccacatccctgattgctgctgttgatgcctttccttatactgtctgggacagtggcgggggaggcaggaagggagggaaggactatctagaaatcgggcaatcattgtgggcagaagagaacagaattttaggaagctgtcgacataatatatctcatcctagtttctcctctaggaaaatttatagtacatagacatacatgctgttattaaattaatcaactgcatgttaaactacataagggcaaggtccactaaaaaaaattctcaatccttaacacaatgctggacaaaaagccaacacttgttgatctcacgagggaagtggttgagttttgtgtaatgaggtcgtcttggaaaatcgttgaactgctctgcaactgtttccacatctgcaaagtgtctttatctcccagggatattgtaaaaattaaataagatgatgactttaataatgacactttatagtttttttcccatttcctccattttcattctttgatgttctcttctctaggcattgtaacctaagtaaggagatcagatatgcagtcagaagaagtttgattgaatttgctaattttaaaatcaattttttctttctaagagaacctcatcaggcagctggtcaaactagttgggtggaatgggatccccatgatatgcagtgaaagccaagctagaagatgacccacttttctgcagccagggcaaagagaagggggcaaaaggaaggaggaggaggaggagagaaagagagagactggagttatttgaaggctaatctcttttgagcttaaagcaaacattaaaaaaaaaaaaacatatctcaggctagggcacagtagcttatgcctgtaatcttagcactttgggaggccaggggagaaggattgcttgaggccagtttgagaccagcctggacaacagagagataccccatttctacaaaaaataaaatgaaaagaatgagccaggtgtgacagtgcacacctgtataatcctagctactcaggaggctgaggtggtaggattgcttgagccctggagtttgaggttacagtgagccatgtctgcagcattgcactctagcctgggcgacagaatgacaccttgtctctaaaacaacagaacaaaacaaacacatctcagaaagcttccttaaacttgtcagagttacagtccctcatatactggtatcttggttcctaccattacttttcacctttctggacaaaacctttcaccatacccttatcaatcttaggagaacaagaattagcttcacatactggtttgatctaaaagtaagatttctcccattttggtcctcttttattgccattcagcatgattttagtggcatggatgacattttaaagacaaaaaaaattctctttgccaattttgattctggcctcagtggagctgctttgacctggagagcagccgtaggcggcatagcaccattagtattagtatttcttagtagctgttggattaaaaaatactgaggatggtcactagatgtccctcttgtgtctctaaagaggctgaggaggcggggctcccttcaggattgaagtaaagggaagctaaaacggagagaactttcttgtttttattatctacatgcagaacgattttattcagttagttaataaattcctgatcatgaaagtgttttgggctactcatttagtcaatggcattcttggagtataatgatcgagtgtgcctattagaaaaaaagaaattctgagggcaaaggctgttgttaggattatctgtagaaatagactgggggatggaagagctattttgtgtgtggggatggggaaggctgtgtaactgtcactttgagattaggggtggggaggagataataggaaagaaggaaagcataggcacacgcccctgcctcccttagcacctggcttgtgtaaaagtggtttggtagctggaagtacttggatgctctccttggaaaagaggggtgcctggagtgtgaacagcgagcaggaagcagggaacacggtggcatcgccttagcaaagagggtttgtctttgcaaatgcagaacatgtctttacattgtgattgcaattatgaaggtaatgacattgtacatgaattgaattctcctatttatctttaaaagacagcagaatatagacattctattagcactccctaaggtaagaggtctgcagtcttcttatcttgttgtgtgcatcttttcagatgctacgacaatgttaatcattttacctgagtaattcttccatttctcgttacctgggggattgttaatggccgagactacttctcagactctttgctcccgctcaatcaagccgtggaggcgccagtttacttttattgatcagtgggttcctgacagccttcgccacaaggaagcagcatcatccttttttaacttaaagggggaacagatcgccttaaagtttacagctaaaagcttctaagcatagcatgcaaacattttagcatgctgctaattgttctgtttaaatagtccaagcaatattttagaaagctgccaaacgccgaattcacatcccgtgatcagatagcaaacccatttcaaatgcctttttaggcctttttaattagaccaagatgcacttcattcccatgctctgacatcaaaggtaaataactgtgataaatcaaatggaacccttcctttcgcggagcccgcgaggtgcgcccaccgctgcctgccatgttgtcattctctactacttgcccatttctccaacggtgtctggagaaaaccggtcgggccaccgggctcccttgagccaccactctggtgtccacccgcagctctaaatgaccaaaattaaatgatactcattgcagaagcatcggttttctccctgttgttctgggccgaatcacatcctaacgtgaaacagtgaaacgacccccacgcggaaagcggatcaggctccctacgctctccctttggcctcggctacatattcaggggatcgcaatctcactcgcgaaataatttctttctgtaagaggaagccgcctttcccctctcccaccgccaaggtaaaggctgctaaagtagctcttcttggaaggaaaaatattttaaaaagcagctgggttgctctccacaagaagatggcagttttgagaaaacccattatgtgtccaaatgccggtttccttttcttgtttaacgctttttagagggcaaaaatgacgctcatgtgaagcccacaggctcgagccaatgtcgctgggctaattatgagtctgcttatcccactcccaaatatccgagacgactcactcagaagacatttttactcttccaagaattgtgaattcagaagcagcttccccacattctaagagaaaaaaaaacttgtttaacgggcacgtttttgatttttttgccgctggcgaccttaattaaaagcctcagagcccgggtggggaggaatgccccgctgcccccagggagccttcagtgcagaaggcaggatgagcttgatgtcagccctggccacgccggcctcccgcttcccagtactggcacatgccgcagccaccaccgccgcccaagtggagctggcagccccctgggaccgagaccccgcgggaaggctggggcgccctgcacatcggcgccggctcccagctgtcggcgacctaagcggacatgtatggcgtgcccgccccagagctcctgcccggctttgagctctgctggcttggcgcggcgcggcggcgtccgctccaccggctcttctcaaacgtacagtttatttatagggagctaaattctccaacagggtggggtgaggggcaatgaaatgtgtccggccccctccgtagctcattctctgtgccacatatcccatttgattaacaagcaacagacaagagcgaaccgatccaggggccctgctgggagtgcggcacgcagagagtagtgcggcgtctgcccggggtggaaggatgggggtgacggtccgggggggtggcggccgtggctctggcctgatgtgaagacacaccggctaagagctggatgaatgaccacctcaggggcgctttctccttccctttcttccttccactaccagagaatgagaagagaggaaaacaaaaacagacgattttttagggtgaagagacaaggagaaatagagggatatatatatgtgtgtatatatatatatatgtgtatatatatgtatatattatattcaagatatgaagatatgtaagggaggtaaacacgataagacaatcatatcatcctcatctttcctgaaatctctgcaaacatgagaagcgcacagttcccggcgaggctcagccgcagcgccagcacaccgcctccctgctcattcctgccctattgctcctgcctggcctgcctggcctgtctgtccgtcctcccatgaatcccgccagggctccatgggccggggtaccacttggtcccgccggtgtgaagtttccgcttggccccgcccccccgctaccccccgcctccgcttggccccgccccaagactggagcccgctggcggcgcgctgattggccagggcctggcgtagccgggctcggcagcttgagctttctccggctttctccagactccgcggccagtagtttgcggcatccggaggagcagcagcagcagtagcggcggcggctggcgcagcgcggagacggacgagcgggcacagacggcagcacagctcccgtgcaccatgcctggcttgcccgggaggcactggcacccgcgtccctagcccggcgctggcccttggcgcgttgcgctccgcagcattccggctgagcgatttcatccgaaatcctaaacctcctaccccaaacccattgcctcctgcttgctcatactccacactcacactccccacaccacacactcactcttcctctctctctcacacattcacacacagcccgagacagacagagaaagcgagacagacctcccgagtgcgcgagcgcccgggaggaagggagcccaacgcagcgcggccagcgcctctccgggaagatgaaatcaagacgctcctgcaagtaaacttcggcggcgacaaaatcgtcgactgtggcagctgctgaggcggaccccagcgacgtgcaactgagctaggagggcttcctcccgcggcggcggcggcggcggcggcggcggcggaccttggagcgacaccccagcccaaacggagagaagagaagcacccggtacccacggcggcggccccgcctctcctggccggtactgttgttgcctccccttccctcttccccattccccgccacccccggccattagaaagaccggggctttgattttcttggacaaattgccatctccccgtttccacaaacttgacgtggagggtcggactgcgttgttaactttgatttcctagacgaaaacgcccgcagaccctcaactgctctgtggggggaactccgctcccacctcggatcctggacagacgcgcccccaagcccttcgaagccagccttagcgcgagggagcgcgctcaagctctggcagcctctctcccctcccccttcctctgctggccccgggaccgccatccgactcaaccctataaccgg

SEQ ID NO: 12421 - DNA, 6000 bp, Homo sapiens
accacccccacttcctctaccacctcgaagactcaagcttggagttgggaggccacaggcctagccaggggaggggcccagagcccaaaggaaccagcagttgggccacatggccctgactcactggggcccatcgggagatgccggggtggcagcaggagacactgggaacccccttgccacccactgcctgacccacttgccacctaacgggcctctgggcctcggcaggctcgccacaggggaagtggttagggcgggtccctgacaccccccatcaccatggcaaccctgctgggctctgggccccacccaaggctacttctgggtctcaggctcaaggcaggatggctcatctttagaagccctgtcagcctcccccataatcagacaaaatacttctctggtgagtcaactagggggcgggcctatgaggaggggctgggctgtccatggcagctgcttcccagcccagcaggcagcacctggagggccaggtgagccgctcagagtggcctccccagttcccaggttggtcctggccccacgaggctgcctttcactctccccaaatggcagcagggagggggactcggagaggaccaagggtgcagggccagggaacaaggccagccagggcttcccatcaggcccccaccccagtccagcctcagacccctcaacgacccccacacggggagcaaccaggcccaccaggtccatgttaggccagcctactccgtccccatccccctcccaaaagagagagggaaggaccagggcccagggctgggagactgtctggctggatggccccgccccatcccacccccctttccccagcccctgggccagccaacccctccctcccctaatcactgctgctttccaacatttttttgccttatatggcaaagctctgggaactaggcctgctccagccagctcacaaggaggaggggagctgggaggagggaggagaccccccctaaagagctggggtgtggcccgcctccccacatccggtcgccccccctaccatccaggactgagatgactcagcttggctagactgaggctgggacttgtgggggtgggcctgcccctcgcctcaactggcattccaaagaaagaactttggttcttgggatctgccctctgagtggctgggggaacccaagtcttggtccctcactttcttgggttcagcaagggccattccagggctgcagggtaactggaaggcctctcaattctgaagaagagaagactcatcatccctctcctctccctgttccacatcacccccgagtcacccattctggggcctgccctctcatgcagcccctatcttgagaacgaattgggctgctgcagcaggcctggtcaatgccagcctctccagtccagtgacacagacactgggctggcacaatgcacgctggagcatctaccaaccaactcctgcgtgctacacgcagaaaagcaaggcctacatggaagcaagagtttggcccaagatgaagagaaaagttggcgtccaagtagtctacaagccaggtctctcagtcaaccacgcccaactcaccccgggtgcagttttgctaactatgcttctttctggcccccaggttgcctgtgtgtgtgtgggggggtagatctaaactggtggttggagccatctccgatgggcgacccatcctccagggacacaaagagcccagagccccagacaatgggacgcacgagctccaacccacacttcagaaccaacgggcctctgaaggccagagggccctctctaaacagctgtggggggagagcccgggcctcctcctcctcggggacggggcgcagggccaggagcctgcccagtgcccgaccccccaggcccactcccaccgcgagcacagccgcggaggcgcggcctgcggaggatgtgagttcagcctgggcgccggccagccggggcgcagcgggcgggggcgcgtagcggttcgcacgcccggccggccagccagccagcccgcgcgcctttgttctgcaggcccgcgtggagcagagcagccggaggcctcgggagttgcgctgcggcccggaagggggtggtttggaggggtccgcccggggagatggaaggacgcacggagtccccgcccccgcccgcccggcgcttcggggcgtccctcaccgatggacaccagtttgatgctctcgcggtccaggaactcgagcgccaccgacacgttctcaagctgcatttggcggaaagtgggccgctggttgtgcttgcggtgcatcttcttctggctgagcacctccaacagcgcgataagccgcagcccgtcgctcaggtccgtctgcaggttggcgatgcgcttgctcacgcacttcaggtgctcgttgcaccagcgcgtgaaagtgttctgctggatcttcttccacggcgcgtcctccgccaggtccttctcggtggccggcatctcggcgtcccgcgtgtcgacgccgccgcccggagccgcgcctgctgcgctctggcccgcccgagagtgggagctactcattttgaggcgcgagaagccgggggggcggtgctgcagcctcggcgaggggacggccctttaattaaagtcgcaggcacctaggcgcgcgggaggcgaggcagggagcagaggttgcgctgcggagagagcgagccctttaaatgcgggaggagggcggggccagagggcgggcctcctgcggggaggggccgtggggtggggcttcgagggcgcgcctgccccaccccgccccgcccgttggaatgcccccactaggcccccgggttcggctgatcagacgcgaaacccgggctccagggtgggtcgctgggcagtggggtgggcaaggatgctcccagccccgcagcctcgcgttggcgctgcaggaaacgcgccctagagcgaggaaaggctgagcagtgtctggcgcgggactgcttggcctgcagccggcgcgccttacaagggactttccttccccagggcccctgcggggggtggggtggctctcttccctaagtcacttgggctctgccccgtccctgcacatccctaccccccgccgtcatcccccttccccgggcccccagggcctagggttccccggcggcatccccgtccgccggcccggcagcggcgggaaggggccaaccctaagagcgaacccctggagagcggcagccccggaccaggcactgccgagggcgctttgtgtgctcatcacctgggaagcggctgcagggcaaggcctgcgcctacgcggtccccgcagaccccctgccacgggcccgccttcccagtccgtagggccctcgcccgcgcacctgtgcccgctgcttcccaccgcctccctctctgcttccctccacccgggaggatatggggcactgggccaggaggccgccggcactccaggagcaagcagccttcgaaggggtccgggcatgcccacgggcacgccagtgggcgcgggcagagggcgccgtgcgatgcatgcagagacgtgtgcccgcctaacccttcatgccagttcacccggggcactggggggagctgaagcggggggtcctctcctgtcggaaagtcccctcagcccagcgtggccagggcagggggcaaacacgggagtggcattccagacccagaggggcctgctcagaggttcccataagacttgtcaggctctgagcacctgggtctgggtgggcttcaggtgtggtggcaggtgcagaggaggcctgaggacagggatcaggggcctggggggttgtgtccccagagctgtgggggctcttcactcaaaattttctggtagataactctggagatggtgcagtggctgctgtgccgagatgtagactgggaccaggggacggctggggacgctcactgctactatcttcagtcagaagccagcctgcctatggcttcctccccattgtgcactcccctccctctcagtcctcggtacctcccctctccagaatgtttcctcctctgagtgttttttttttttttctaggaaggcaggtatctgtccctcctgttcaattctagtaataattaatttatctgctaaagaccagtgagagatggaggccctgggttggccagcacgtcatgcccaaatatggttgactctcctgtagccctgggtgtctacatgacacgtggtggggctgtgatccgcccagcacattcacttcggggcagcctgtggccccactggtttttcccactagtagtggtgttagggggtgcaaatggcattttccagtactgaggccaacccctgtatattgtcccctctcctgaccactttgagacacacctgcaccaagtgcgcctgggcgtctgggagctggggtggaggtgggagggagggctgggaagggggaacccatacagacccctccctgcacgggccccattcaagacgggcttgaagttgtccttctggtccccctgccccactggaaagcaagttcccaggcacggaattccatcaataattgactctctctccactaagggccattgagctgggttgtctgggttcattccttaatcttcagagctcagggaaactgagtcagagtgaccagtggtcaattccagcagaaagagtgtcaggaggtgggtgccgtgtcttccagccctagcttttccctatttagaggaaacaaggaatgggcgtgtagagggttcttgtccctagaacatagtatcaaccgccagatgtcgcccgatcccaaagccaccagatcgggcagtcctgggaagccaaaatccagctctttcatattttcccttatttggagtagattcttggatgttaggcacaccccgcccaccacaccacccctggccctcagaccccaggccagaccctcccactgggaggtatagcccaagcccaggagctgttcagctgggatccctaaggagctgtttccaggcctgcgtagccagggggcgcaggagggaaggaagccgcagactggcaaggtgagaagagacctgtgctggcaagtccaggtgcggcaggtgaggtcgcccattcccaagctcccaccttgacggtgcactcggagcacttacaaatgggtctgccagtggattttaacctattttgcctggccccaggtggcacgggaatctggggacattgttggttatatcctggctggcagtgcgcatccaactcagagccaacctggcatagggcccagggcccaaccaaggaacctggcctggtctcatcctcaccatggcccccatggagtagagcagccccagaaccagctcccctgtgcccaaagcagctggtgccctgtggactcgagccagcaagggacacgctgtccccctcccagtgggcacactggctgagaagtgtccttccaggtggccactcgccctgagtccacacaagttcctggtgtcagggcccttctctctcaggcatgcagtggtccgttcatgggcaagtgcccagacaccctctctctctcggggaccccccatggcctcaggctcccacattcgtgggcacagacatggctcgtgggtcaactagggaagctattctctggacactcactcccagatgccaggggagcctccatcggctcacgcatcccagctgaacctggcccggacctgggcgcgagctggcgcctgcgttttccggcctctctgcccgccttctccaaccccgcccccggccgacgaggagcgcggcgaccctacggcgcgaagccgggccgcggagacctcacctgctgttcctgagagcgaccggtgaccgatgaccgcggggtggcgcccggatcgccttcgcgcccgcgcccgcgccaggcgcctcggggattctgtcggcgtccgctgcgcgcgacgcgcctccacgcgaatgggccgccgccgcccgccttcttgttggccgcacccccgcccc

SEQ ID NO: 12422 - DNA, 6000 bp, Homo sapiens
ctaaaagcatctttccatattcttttgttactgtcccatgtgattatgtaggatcacgttttcttttctagttaatatcgacaaactatacttgcaaaattcatacttcagccagaaaacaatgttttaggaactatgacgttcctaataataaggttaaaaatgttgggagtaaaattaaaaagaaaaaaaaatcatatagaatagaaccaaacttgaataaagaatcatatagaatagaaccaaacacttgaaatgattgaaaagatagtgaaattaattgcattttgtcattactccttagcttatcatactcttgtcgaatgggtggaaaccatattcttttctactatttaattagctggaaacaaagcctggctattggttgactggatctagtataaatcccccctcccccatttttgattaatcaaattgccactccttatttatttatttaaattaacaaataattgtgtatatgtttatggtgtatggcatgaggtttggaattatgtctacattgtgtggaatggctaaattgagctaattaacatatgcattaccttaaatatttatttgtggtaagaacacaaaatcttagcaattttcaagtatataatatattgttattaactacagtctccatgttgcacaatagacctcttaacttattccttctgtttaacaaactttgtactctttgaccaacatctgccccgcccacagcccctggtaaccaccattctattctctgcttccatgagttcaactttattagattccacacataagtaagatcatacggtatttgtctttgctctttcttttaaaggaaataaattcttctcctttttaagtcaaaggactttttttgtgacttttgggtctgttcactctgctatggagattaacaaatattaattagtggatgactgctaggaagtgaaactcacaaccaatgaagtggttaattaaagttgaactttttgattgtcatttctaatattttttatattttatatatatatatatatatatatatatacaagtttctttaaattattgatttaaacaccttagtccaaaagaagattaaaaaatggctgaaaagggattacagagatgacttttgtttcaaatatttttaaaacatccaaaatttaaagtagataactatccctcaaagttagctgctccaagcttgatttgacatttgacgttcctgatgctctggctcagatcagagcagttccaagaggcttggtggtggcgatgggggttcggtgagaagtggggcaggcaggtctagatccggccccgcccttaccccaggacacccccttttctgtgtgctttggacttcagcgtcagttcttccggcccagggaggctatggaattgagggcaagtgtttgcattattgatgagggtacaaaggactccagaagttttgaggctttgcttttccccttagccctacagggtcaggctttcatgcagaaattggcctggaaattctccaccgttttcatagctgcaatgtttttgaggtgttttttagataacaaaaaactaaatacaattctcaaagcttattttgtttacttttagagtacacaaagcaattttgcaacaattacaattatatatattctacttgctactaagactgtataacattggtggggataagagattatatgttttttcctaaaaatatctacttaatgcactcttttaatttttatttttatttcaatagttttgggggtacaggtggttttggttacatggatacattctttagtggtgatttctgagacttttgctctccccatcacccaagcagtgtacacggtacccaatatgtagtcttttatctctcaccccctcctaacttccccctccacagtccccaaagtccattatatcattcttatgcctttgcatcctcatagcttagcacccacttataagtgagaacatacgatatttggttttccatttctgagttattccacttaggataatggcctccactccatccaagttgctgcaaaagacattattttattcctttttatggctgagtagtattccatggtgtatatataccacattttctttatccacttgttggttgatgggcacttaggttggttccatatctgcaattgcgaattgaatgcattccttttaatagttagttttgctgtcaatctcttttcctgtttaattatttgaactattggaccctgaggatctgcccctgaacatctcctgagaagtgctccagcagagcgaaatcttgaaagtcattcatgaaaacgttgttaagaagtggcttgagcccttctctgagctggcagaagtgaaggagaattacaagaaattctatgaggcattctctaaaaatctaaaccttgggatccatgaggactccaccaaccagggacgtctgtctgagctgctgtgctatcacacctcccagtctgaagatgagatgacatctctgtcagagtatctctctcacatgaaggaggcacagaagtccatctattacatcactggtgagagcaaagagcaggtagacacctctcaaagcggggcttcgaggtgttatattagaccaagctcactgatgagtactgcgtgcagctggtcaaggagtttgataagaaaagcctggtctctattacctcaggtcgagctacctgaggatgagaggagaagaagaaaatggaggagagcaaggcaaagtttgagaacctctgcaagcttatgaaagaaatcttagataagaaggttgagaaggtgacagcctccaataggcttgtgtcttcaccctgctgcattgtgatcagcaccctatggctggacagccaatatggagtgaatcaagaaagctcagacacttggagacaactctctaatgggctacatggtggccaaaaagcgcgtggagatcaacccgaccaccccattgtggagatgctgcagcagaaggctgagacagacaagaacagcaaagctgtcaaggacctggtggtgctgctgtttgaaactgctctgttttcttctggcttctcccttgaggatccccagaccctccacctgcatctaccacatgatcaagctaggtataggtattgatgaagatgaagtgacaacagaggaacccagtgctgttgtttctgatgagatacccctgcttgagggtgaggagaatgggtcttacatggaagaagtagactaggagtttatatttggaaaccttgtgcccttgtatagtgtccccatggttccttgagtggctctgtcccgcggccttgagtggccttatcccacctggctccctctgctgatgtctagtgttttttctgtcctgtccgtgtgtctaaggcaggaaacaagagccttaagccccattctctttctacttttataacaggatattggatgttgtgtattgtgcttttttgtttattttgttctgaaatgaaagtataccaaataaagcagatgccgtttttatgtgggaaaaaaaaaaacacttgcctgttctgtgttttgattttcttgatagtaacatttgcagcacaagcatttttaattttggtgaagtccaatttatctattttttcttttgtcacttgtgcttttggttgtgcttcgaccttgtcagatctaaggagccattgtctaatcaagtaattagctttcagtgtctcctgagaataagggccatagaagaggctgagtaaagacttgcaacaatgatatgtaattgcatgtgcatttttaaaaatagactatttttagagcaattttcattttacagcaaaattaagcagaaagcatagaatttcatatgtccccttcccctgtaccacatctggcctcctccattaccaacatcccacaccacagtggttcatttgttacaattgatgaacctacgttgacatgtcgttatcatccaaagtgcagtttgcatcagggttcactcttagtggtgcacattctatgggtttggacaaatgtataatgatatggatccaccattacagtatcatacagaatactttcacattcctatacatcctctgtgctttgcctattcatccctccctcttcccaacccctggagaaaactgacctttttaccatctccatagtttcaccttttccaaaatgtcatatagttagaaccatacagtatgtagacttttcagattggcttctttcacttagtaatatgtatttaaggttctttcctgtcttttcatagcttgatagctcatttctttttagcattgaaagatatttcattgtctggatgtaccaccatttatccaggtactgaaggacatcttggttgcttccaaattttggcaattatgaagaaggctgctataaacatctgtatgtaggtttttgtgaagacataaattttctacttgtttgggtaaataccaaagagcatgattgctggattgtatggtaagagtatgtttagttttgcaagaaactgctgaactgtcttccaaggtggctgtaccatattgtagtcccactagtaatgaatgagagctcttgttgctccacattcttgccagcatttggtgttatcagtgttttggattttcaccattctaataggtatgtagtgctatttcattgttgttttaatttgcattttcttgatgacagatgatatggagcatgttttcatatgtttatttgccatcttcatatcttctttggtgagatgtctgttcagatcttttgcccattttttaaactggattgttcattttccatattgcggggttttaagagttctttgtgtattttggattatagttctttatcagatctgtcttttgcaaacattttctcctagtttgtggcttgtcctctcattctcttgaagtgattgtatttccttgaattattcacttcacattcacttactgagcatcttctatggtctaggttctccgcaaggctctgggtatataaaagtgattaagacataaccttgcttttagacacttttagtgtgatgaaggagaaggatgagtaaataggtgattagaacactcttctaagtaagcagtctcaggcttcttggaagaggagtgtaagacataaagaaaaaggatattgacaacaagcacaggtgggcagagccttctgggtgaagggaacactacatcacaatgacataagtaagttcttgtcaatatgatcattagctattattgctatggtaatagtgtgtctaggctagaagtaggcaaactatggctgtgggccaaatctggctggccatctgctcttgtaaataaagtttcattggaatacattcatgtccatttatacacatattttctgtagccacttttgtgctacaagtagttgcaaaagagacagtcttgcttgcaaagcctcaactattactcccaggccctttacaggtggggctcagactggaggggcaaagatagactgctgctttagtgagatgctttagtgatttttccgcggcaaaaccacatggcaaaagtcatggacaggtggagaattgattccaatcacatgtctgagggcatggcaagctacacatatttttcaggagcagcagaagtttcattcatggctggtcaaaattaatatctgttaaatgacagcgactttctccccatttcctgtgtctaagaggaactacactgtaaaaaactcctggcaggcagctctgacatttttcttttttcagcaaggtaaacagatgtagatcactttctttctgattgtcccagaataatttgagatgagaaaagaagacatgacctggggcacttaaagacaggttgcttttcactaacaaagctggaagactttttgagctcttctaaattataagtttattatagctggaaagactttcttttcagataaagataaagagggcatctcaatttctttgtgaga

SEQ ID NO: 12423 - DNA, 6000 bp, Homo sapiens
aaagtgctgggattataggcatgagccaccatgcctcgccaaaagagaatttttttgtaaaagaaagaatcaagtgatgtggcaaacttcattgctgttttattttttaaaattgccacagccaccccaaccttcagcaaccactactctggtcaacagtcaatatcaagacaacaccttccaccagcaaaagaattacaactcactgaaggatgacatgatccctagcacttttttttttaaagcaataaaatgtatttaaggttatgtacattttttagacataatgctattgtacacctaatagaatacagtatagtataaacctaaccttatgtgtactgggaaaccaaaaacttcatgtgactaattttattgcgatgtttgctttactgtgatggtctggaactgaacccacaatagttctcacacatgcctgtatccagtttacttaaagattctaaataaaaccatattgcttttatttgaaagagagagctagaaaaaagaaaaggatattttacacctgcatgcctagaatctgctgaatatttgtgttgccagctggacaaaactcttattatttatctgcagaattttgcaatttaagttttacccccttctcaattattctagaaacagaaacagctgcagtggacaaccaaccacttactacaagaacttaaggttggcatggttcaggtcaattagaaaacagaaccaaacggagctaaatctataatctgatgctgtttctccaacatacaatatagcatcttactctaaatctcttcggacccttaataggaacacacgtgtcttgtgctttctatattccagaagccttttcagtttccagaaacaacagattactcattgatcaccctgtagtgaaaggccaatcatggcccctgagataagggttcatctctgtcccaagccctcacactggcctccaccctcagccatctcctttgcaaacgtggaagagaacctacatttcacctagcaagggtaaaacccaagggtacactgtcagcctccagggaagacagggcaaagaaagaatgtgaacctaccaccagagttgctttgacatccagagcaagacccattacaaatgatggaaggaggggagattgtgattacgatctcattccaactaggatcactgcacgttctggggttaaacaataaccacctatggaagcatgcagaatgatccttcactttgctccaccttcctcagaaatgtgccaaaactcttagaaatcccacttggaatgaatgacttgataacatcaagtagtaagaaccgactgaggctgaaaagcttgtcagctgcacttttaaacctcagacgtatttcatggggtcaaatgacaacatacatagattcttctgacaatccacctagggcatgcgctaatattacgtaagaaaaatctatttttgtcatcagctatatagatgttctggtgtctaaagaaacagcctacatgaagttaacaaagaatgacagcgcaaaacacactcacgctatgtctgtggaattttggccacacagtggacatgactgtcaactgtctcaggcagcccacaatcccatcagtactgggcttggtaatccccacagagaccctacctccatgaccttttagggtctcctgggccccagacagtgaggcaggcacttatagtctcaagtgctattatttggcaaggaggaagctacgggagtgcaaaaaggcacagaagaggtcttcattttactaaaggtgaagtagaagtcactcattaaaatcctgcaatctggatttataaagatatggtatattatggtcaacactgcaaatgttcttattacccttcgcagatctaccttattattttacgatatttaagaaactggaaataagcttattttcctttgattttaaaaggattttaaataattctgtattagactccaagaaaacacattttacacataccacattttacatacaccaaaactcctaattctgaatattcttaacacccaccctctgcctgaccctcccagcatagccattatcaacagacatcttgggttgctccacaaagacctagacccatgctgtccaagccagtagccacccaccaaatgaggctacagagtgcctgaaatgaggctagttcaaactaagatgtgttgtatgtataaaacacacacagattttgaggacctagtatcaaaattaatgtcaaacacttcaaagattttcttatactgactttgtattaaataatatttttgatacattaggttacataacatacatcatccaaatcaatgtcatctgtatctttttacttattaaaaattgctccccaaaatttttacctggctcaattctatgagacagaactgctctggacaacaaactgtcttctcttttaaagaaattgggaccatcttttgtgttcctaatttcagttatttacaaacagaataatcttccctgtccagctgctgagatactgtttaataattgtcatcttcttatttcaaaatcatcccagtttttaactaatcccactcccctactctctttctctgaatggcatttgagagccaaaattattaatattacctaaatcataactgactcttaccttggtcatgagaaacagaaaccgaagtgtatttttttttttttttaaaggacaactaacagcatcgtgcatgtcaaaagcatgggaaagtgtcctggctttcttcctggtcaacatttcctctaaaatctccatttacttcctcattctcctctgattaaacaatcttctcctctaatgttaacaatcctccatgaaactattcgttttcaattttacttccccaagtatgcaagtattggggctacatagacaaacagaacttcctagaaaaatgcattcaaaattcccgaaaaacagacctattgtaaaataactcattataaattgatagtatattgttatgcaaacaacagatacactgaagtgaggtgctaaagaatgacagcaggcataatctggtagattaaattaaagtggcacatcttggaaagctgtgttttatatttacacatttggtgaaagaatgggataaacaaaggtatatttccaagaaagttttgcaaggccttaccacctcaaagaagaggtagggcaggaaaggaggaaatgggcagaaaatgaggggggggaataaaaagaagcagggcttatttttccaaatagcactaattcttggttatctgactagatcagaggattgggtaacaatgtgaggtcaatgcttgtaatgccatttaagtcacattcatcacttcagggcatggctatgtgtgaatctagaatcagaattaggcaccaagctcatttagaagtttaataaatttaattttaatgagacatcttgtttggtattaaaattcatgagactcccagaacaggttctctggacctttattagaggataagaaatttatttgacaatttaactttttgaccaccggagtaggaaaattcatgtctacaaactatacctatgtatcccacaagctttctgaaattgagtcatttcaaatttagtagctgcatacaccgttggctccaattagtgacctctacggggattttttttttcctttggaattcatcagtttacacctctgtgttcataaaatgaagagaatggtttctgcatgcctttttaaaaggaaacactgctagggaattacccagcaatatgatgagcagaaacaaggtcacattcacaatttaagatgagctcaacatcatttatatttagaactggatcaatccagaatcgtttctcagcttggcttattagctgtgtgaccttgggcaagtagctttacctctctgagctgcagggttttttttttttttttttttttaattagtgacatgcaaatacttcctcctaacttgcagggttttgaaatgaaggaatgatatacgtaaccaagcaggtcagctgtctacaaagagtatgcagacatgtttatagatatatgaagcctcctggtgattatgtgtcatagtgttaactgtgtcaaggctttcggtagagctcagcatagttctgtcttgagttaaaaacagggttttattctttgaattctacttgaattcctcttggctggtgaagttcacatgtgctaagactgactaccttagtacactgccaagggtttcttaatgcctcggattgatagagcagctgttctcaaacgttcacgcgcttaaaatgcagattctgattgggcaggggtagggtggggccccagcttctacatttacaagtagcccacaggtgatgtccccggtgctggtcaccctaggcagccaggccacttgacggaccttctgtgcctctacactgttgacggcgcgggataattccttatggttgcatagggcactcctgtgcactgcgggaagtttaacagtatcactggtctggactccactagatgccagtgaccccatcactcctcgccagctgtgacagccaaaatgtctcctgacatcgccattgccagatgccctcagggctgcaaaaccgccaggtagagaaccgctaccatgcaggatgctaccatcaaagtgcgcccacagcagcaaccttggagcaggcaggcaagtatcctccaggctactttgcagacggggaagctgaggctgggcaccgctcaaggtcgcacgcatgcgtaaccgaaaagagagcgcggaggtcccgccgcgcctcgctctgaggagaggacgcggagccgcgcgcccgcccggtggaccccagggactgctcccacgtgctccggccccacgcgcgggccgccgaccggaagcgggtgctggggccgcgtagacgccgcggccacgcgcgcccgccagcccggacatgggcccgcgggcgctcctggccgccgcccgacttcggggccagccgggggcagagcgcgcgggagcccgagcgtccctgcatgaacaccgccccgccgcggcccccaggccgtgacgtaccccgcgccgaccgtccccacgcccacacaagaccgcccttactggaggcggcggctgcacactacccacccagaagaagtccgtccatgtcaaagatgaggtgggtgacgggctgcgggggcgccgccatggtggcgccttctgggtctgggtgggggcgaggaggaagtgcgcgcgcacccgcccgccccgcgcacgcgcactgaggaccttctcgcgcgcccggggtcgctctgcgcacgcgccttccgcggcccctcgcccggctccgagcccgcgcgtcctgggctgcctagtggcgctccgcgcacgcgcaccttgggctttcgccgcagctgtagctgcagacccgggatgcggcgcgggccggcgctgtatgtttacccgcatcaattcctcctcacttcacacccggaatcgggccaagctactcagccagcggccgcgcagagccgaggccctcgtctggggacaaattcagtgcttgagtttggatcaggggtgtgaatgaggaaggagggacagtacaaggggctgtagagtggggaaaggggattgaagatgctcagggtggtatcacttctagccatcaggttgcagacaaatggccttggtcaggaggtccctgggtgggttcgcccgagcccccagtccctggaccgtgggtgggtttttctcagtttcgcttgcccgcctccttgcggtcctggaccgcgacttgaaccggcagccgcgcatgcgcagtgtgcggagaggctgcacaacctccgtgcctgcatctctgagcatcccaggctggtgcattgtcccagagcaaagccaagctgctcaaggaggatgctgaaataatactaacagtcaacatgtcttgctggttgtgccttcttaggtatcatctgtcttttgggctgctctgagttttctttc

SEQ ID NO: 12424 - DNA, 6000 bp, Homo sapiens
gagctcttgggaagataaacttctctacatcaatgtcaaaaggaagatatgagcctttgacaagaatatccaccatgatgcccagttccagcagcctgggtgagccatctggttgagctcttgggaagataaacttctctacatcaatgtcaacaagaagatatgagcctttgacaaaaagatccaccatgatgcccagttccagcagcctgggtgagccatctggttgagctcttgggaagataaacttctctacatcaatgtcaacaagaagatatgagcctttgacaaaaagatccaccgtgatgcccagttccagcagcctggctgagccatctggttgagctcttgggaagataagcttctctacatcaatgtcaacaagaagatatgagcctttgacaaaaagatccaccgtgatgcccagttccagcagcctggctgagccatctggttgagctcttgggaagataaacttctctacatcaatgtcaacaagaagatatgagcctttgacaaaaagatccaccatgatgcccagttccagcagcctggctgagccatctggttgagctcttgggaagataaacttctctacatcaatgtcaacaagaagatatgagcctttgacaaaaagatccaccatgatgcccagttccagcagcctggctgagccatctggttgagctcttgggaagataaacttctctacatcaatgtcaacaagaagatatgagcctttgacaaaaagatccaccatgatgcccagttccagcagcctggctgagccatctggttgaattcttgggaagataaacttctttacattgatgtcaacaacagggcatgattcattaaagacaaaaaggcccattattgtgcccacttccagcagccttggtgagtcatctgatttggctcttggaaagacaaacttctctacatgaatggtgaaagtcagaaacagggtatgagccattgacaagcagacccactatagtttgcagtttgagccttggtaagccatctggttgaactcttggaaagttaaatttctctacatcgatgtcagcaacaaagtatgagccattcacaagaagatccaccatggtggccatttccagcagccttcgtgagccacctgcttgagctcttgggagataaccttctctacatcaattctggagagaggcagcatgctacagtttggatacggtttgtttggtcctgccaggtttcatgttgaaatttgaccccctgtgtggtaggtgggacctggtgggagatgtttaaaccatgtgggtgaatcccgtatgaatggcttggtcctgcccccatagtcatgagtgagttctcattctcagtttccaggagagctggttgttgaaaagaccctggcacctccccccgctctctcttgcttcctttctgcccatgtggtctctccacacacaatgtcttcccttcactttctgtcatgactggaagcagcgtgacgtcctcaccacaagcaggtccaaacaccacgcttcctggacaacctggagaaccactatgagccgaataaataatctctttttttttttacctttttttaaaaattttattattattatactttaagttctagggtacgtgtgcacaacgtgcagctttgttacatatgtatccatgtgccatgttggtgtgctgcacccattaactcgtcatttagcattaggtatgtctcctaatgctgtccctcccccctccccccaccccacaacagtccccggtgtgtgatgttccccttcctgtgtccatgtgttctcatggttcaattcccacctatgagtgagaacatgcggtgtttggttttttgtccttgcgatagtttgctcagaatgatggtttccagcttcaaccctgtccctacaaaggacatgaactcatcatgttttatggctgcatagtattccatggtgtatatgtgccacattttcttaatccagtctatcgttgttggacatttaggttggttccaagtctttgctattgtgaatagtgccattataaacatatgtgtgcatgtgtctttatagcagcatgatttataatcttcttttttttttgagacacagtctcgctctgtcgccgggctggagtgcagtggcagcatctcggctcactgcaagctccgcctcccgggttcaattgattctcctgcctcagcttcccaagtagctgggactgcaggtgcacgccaccacacccagctaatttttgtatttttagtagagatggggtttcaccatgttggccaggctggtcttgatctcttgacctcatgatccgcctgcctcggtctcccaaagtgctgggattacaggcgtgagccaccgcgcccagccaatgatctcttctttatcaattacccaacctcaggtattcctttccagcaacatgaatggactaagacagctcctgcaggaatggggaggctaagacggtagaggtgcagcctggtcagccatctttcacctttgctgatgttgctatccaggtgttttccattgcatgtgcatgaagccctatgctttgtttaggcgccaactgttagtatcgtaacacatgtccagtctgtttggttgttttttttgagacggagttttgctcttgttgcccaggctggagggcaatggcaccatctcagctcactgcaacctccatctcctgggttcaagggattctcctgcctcagcctcctgagtagctgggattacaggcactcgccaccacgcctggctaatttttgtatttttttttttttagtgagccactgcccctggcctgcgtgatgtttcttatgattttgtagacagcacaaaaggcatctgtatttgtgtgtgtgcaagtgtctgtgcaggtgtgtgtacaccaatatgcttgtgcagaggcgtgtgcagatgtgtgtgtagttgtgtgtatggataggtgcactgtgtgcaggtgtgtggggatgtgtgtgtgcaggtctgtgtgtgcagacatgcacgtgtatgcaggtgtgtgtgtgtgtacagatgtgtgtgcaggtgtgtgtgcagatgtgtgtgtagttgtgtgtatgcacatgtgcattgtgtgcaggtgtgtggggatgtgtgtgtgcaggtctgtgtgtgcagacatgcatgtgtatggaggtgtgtgtacagacgtgcgtgtaggtgtgtgtgcatgtgtgtgtgtgcagatgtgtgtatgcacatgtgcactgtgtgcaggtgtgtgaggatgtgtgtgtgcaggtctgtgtgtgcagacatgcgtgtgtgtgcaggtctgtgtgtgcagacatgcatgtgtatgcaggtgtgtgtgtgtacagatgtgtgtgcaggtgtgtgtttgcagatgtgtgtgcagatgtgcatgtgtccttgtgtatatgcacatgtgcactgtgtgcaggtgtgtgtgtgtacagatatgtgtgcaggtgtgtgtgcagatgtgcttgtgtacagatgtgtgtgtgtagttctatgtacgcccatgtgcactgtgtgcaggtgtgtggggatgtgtgtgtgcaggtctgtgtgtgcagttgtgtgtgcagacatgcatgtgtgtgcaggtgtgtgtgcaggtgtgcgtgtgtagacaagtgtgtgtgtgccattgtgcttgtttgtgcagacgtacgtgcaggtgtgtgtgcagatgtgtgtgtgtagctgtgtgtacacacatgtgccctgtgtgcaggtgtgtggggatgtgtgcgcacgtctgtgtgtgcagacatgcatgtgcctgcaggaaagtggggatgtgtgagtgtgcaggtctgtgtgtgcagatgtgtttgcagacgtatgtgtgtgcaggtgtgtgtgcaggactgtgccagtgtgcttgtttgtgcagatgtgtgtgcagatgtgtgtgtagctgtgtgtacgcccgtgtgcactgtgtgcaggtgtgtggggatgtgtgtgcagttgtgtgtgcagacatgcatgtgtgtgcaggtgtgtgcgcagatgtgtgtgtagttgtgtgtatgcacatgtgcattgtgtgcaggtgtgtggggatgtgtgtgcaggtctgtgtgtgcagatgtgtgtgcaaacatgcatgtgtgtgcaggtgtgtgtgcagatgtgcgtgtgtagacaagtgtgtgtgccattgtgcttgtttgtgcagacgtacgtgcaggtgtgtgtgcagatgtgtgtgtgtagctgtgtgtacacacatgtgccctgtgtgcaggtgtgtggggatgtgtgcgcacgtctgtgtgtgcagacatgcatgtgcctgcaggaaagtggggatgtgtgagtgtgcaggtctgtgtgtgcagatgtgtgtgcagacatgtatgtgtgtgcaggtgtgtgtgcaggactgtgccagtgtgcttgtttgtgcagatgtgtgtgcagatatgtgtgtagctgtgtgtatgcccatgtgcactgtgtgcaggtgtgtggggatgtgtgtgtgcaggtctgtgtgtgcagttgtgtgtgcagacatgcatatgtgtgcaggtgtgtgtgcagatgtgtgtgtagctgtgtgtacgcccgtgcgcactgtgtgcaggtgtgtggagatgtgtgtgtgtgcaggtctgtgtgtgcaggtgtgtgtgcaaacatgcacacgcgtgcaagcatgtgtgcaggagtgtgtgtgcacgtgtgtgcgggcgtgtgggaatgtgtgcgtgtgcaggtctgtgtgtgcagatgtgtgtgcagacatacatgtgtgtgcaggtgtgtgtgtgtagatgtgtgtgggactcacacttgagctgttccacgggccagtctttggagacgaggtcaggagccaatgaactcacggagcaattacaggtttcccaatcctatgaaatgaggaagcaggggagggaggggcagggagtgtatgatgacacagaggaactctgaagggagctactcagaagcgggagtctccgagagaagaaaagcaggtggaaggagaggaagcggatgccgtgggggtaagctaagttctttccttctgtggtctttgagcatgtcgagtcacccgggtacatgtttctgctgtgtctgtcgatagaaaagaaagagactgaactggaacataagatttcaaacgttggctcgagccgaagtggggacagcggcccagaagactgagagccaaggaaccttgcatatgagttgtcttctgcctttgttatatgcaggtttttaaaggcaaaattaaaaaaataaaataaaataaaaagagggaggtgttgttggaggacagggagggggcttctgtgaagctgtttgctgggaattctcgttggtttacagaaaaaaacaattgattaatgattggctgtacattgctaagctacagggcgttggggtgtagtatctagcacggaattatcacgtgaattcacagctatctgtggcatccggaagccgtttcgagagatgaacgcggccgggcgtggtggctcacgcctgtaatcccagcactttgggagactgaggcgggtggatcacctgaggtcgacagttcgagaccatcctggccaacatggagaaaccccgtctctactaaaaatacaaaattagccgggcatggtggtggcaggcacctgtaatcccacctactcaggaggctgaggcaggagaatcgtttgaacccgggaggcggagcttgcagtgagctgagattgcaccactgcactccagcctgggcaacaagacgagattctgtctcaaaaaaaagaaaaagaaaaaaaaagagatgaaaagagatgaacgcagagctgaaagggggagggagtgtgatggtgttactagttactagaaaggggtcctgatccagacttcaagaacgggttctgggatcttgcccaagaaagaactggaggcaagttcacattgcaaactgaaagcaagcttattaagatagtaaaggggggccgggcacggt

SEQ ID NO: 12425 - DNA, 6000 bp, Homo sapiens; identical to SEQ ID NO: 1359

SEQ ID NO: 12426 - DNA, 6000 bp, Homo sapiens
aatgcagtggtactctcccatcgcccttcactcctaaaatctctgaagaccatgacacagttgactcctgcctactccttgtggaggttaaagtccttccttgaattccataccacactttctcttaccaaagatcttctgcagatgggagaatgaccctattttaggttgttatcaagaccctacccagtgtcactttctccaaagatttgccttttctcttaagggaacactttctctattttacaccaaaatgttaagtatcatatccatagggtttgtgcttggatccgtagatcctaccttaagatccctattcaggtcaaatctcctgtcccaaagatctcaggtctgtgggtcattggtatttctatgatccaccagcacctcatttttctttccacacaagtgactctggctgagtgcactctcattcatcttagccttcccatctcaccacatgaaggctatctctagtatcttctcattttagggctccatcccatttttgctcaacttctgcaactatgcatatagtcaaatgccactcatagtgaaataaattcatcataactgtgttattttcactaatactgccctaatttatgaatgcagcagcctcgctgtactcttttgttctagaatgtcccagcccttaaatcccctcagagtaagctctctgaaaggtaatctctgctaccatccccgactaacacccataaggattccagccaatgaatattcatcaacctctgtagtccagcctgaccaatttcttcttattctcctctatgaatcataagaacctatcatcagctcaccaccactcctgttttcagggtttaatttgaggattatctaaaaaagcaacctcatgtagcagggtggccccccaaatgcaggttccaagaactcactcaagacctgctaggtttgaatcctggtgtttagctctagaggcatggattttgtaaccatcttcctgggtcatccttgtgcaccttgaacttccaaagcctttgctcacactatatctgtttctcgtctccagatattgttaacttggaataatgtcccacccctgctctccaattccccagggaaaccttgttcatctgtgaaccattttctcagcatcccaataggaagcctgttacgccttctgtatgctttggagatggcatatgtcacacattgagttgcattttaataattaaagagcttaatttatcctcttattagattttaagcaccttctatactatacatatttctctctctaataatgattagtaattaataacatagtatatattactattgcacgaacaattattatcctactgaaaatatttctgtttcacttggaccattgtattaggagagtcagtatgaatcagtagtgccccactggcttcaccagtattgcattcagagttctacgtattgatctcacaggagcttgaacataataccagaatgtggttgatggagacactgagatggaaaatcagagagaacaagtagtgtggtatagattatttctcatgttccctccagttcttgtaccaaactcagcttatatatctttcttggaaccctacagttttatttcattttatgactcccccagctcccacatttcaccatactccacaattagatttaaaatggaagcatgaagaatgatactcttatctcttccaggaattgtggatctaaacctctgtagctcctctgtctgtgttgcaatctggtggcccagttgttaaaaattggtgttttgggtcctatcctggtctcctgtaagggattttggattagggaaaatgataatttcataacatcttatattcactttttcttacaatcatgattccacctgtctaagatgctttctgacttttttctttttttgagggagggtctcattctgcaacccaggctggagtacagtggcacgatcatggctcactgcagcctcgacctctctggctcaagtgaccttcccccttcagcctcctgcactaccactcccagctagtttttaatttttttatagaaacagggtctcactatgttgccctatttttcaaattattttaaaaaactctcaatggagtcattcagatagaagtgaaaatgtgcttgcctgctctcttccaggtcacatatctcagggaagagatctggtacccaaccaatccacccacaagctaagccaagcattcagattttgcccaaactctccttcccaatcttactttatcatgctgccttatttagaagtgatgtctccccacatcaacttctcttcccttcactacccttcccttcctttttcctcccttccctttctccttttctctttctctctctgtgtctctcattcaggacttcatttgttgcatccattcttgcaacaatcttacaaatattttcttttctttccacgttggccctcttcaacttgttctccatattgccatcacagtgattgtcctaaaatataaatctgatcatttcttcccctctccctgcagaaaatatgttactggctttcccactgcctactggataaattccaccttttcagtatggcactcaaaattcttcacaattaggtctttaatcctttccttaccaccttcttttcatactcaatgtcatggcattccaaaccctccctatttctagatctccacacatacagtattgctatgatgtctttatccatggcttctttctcaacttcttgacccaatcagtgtctgtgtaccatttcttccctactcagaaagttcttcctttgcaaacccttctttaatcattttcacctccatgggtccctatgaattcatatgtattccttgtgcacaccttcttgtaatcatattttttctcatgcttttggctatcttgtccactagactgtatgctttctcaaaaataaatggatgagtttcactcacagatgcatgtcagtgcttaggactgcaccagtgctaaaaaaaaaacaaccctgaatttatgaataagtcaatgaattaatacattcttggcaaaacccatgactttctggcctactataaattactgtgttcaaggtgagattctgctttagtttaggatatagatatctatatatatgtccatatatctgcagctatatatccatatccatgtatatcactgatttggggaataagctatacttattaacaatattactatgttaatgggtcttcaatatctatacaataacggaaaaagtacatgcatatttctaaatatctatccaataattggaacacacacgtatgtatggatggatatatttttttttattattgggtatagatatctattaatagataagtgtatatttatgtacctatcttgttggtaaaaggtgcttttatacatattatttcatttagtctccacaagaaatccacaggaaaggtaattttaatctcagtttaacagattcacagaacataactgactttacaacaaggcaaagtttgtgaggatagagtcttaacatgaaaccaggtccccaaattggtgtctatcaccttccccattattggtcaggctgcccaaatatccttcacatcaccatggcaggcttcatgctttggtttactgcctaaagccgaagcaattaggaggatatcctatgtgttgcggacactatctttttccttccataaatgaattaatgggccatgaaataattttaagaaaagctaacttttctggccaagcagaagaataaaagtaatcaccatgtaatattgttgtgaagactacctggccccacacattaactcagctaatcattacagtattacacggtgattatctgttccattttacagatacagaaatggaggcaaacgattaaaatacacacctaaggtcacatgcatcttgaacccaagcaatctcattttaaaatccgtgttcattgtcacaacactctattatgccctctgatctttgcattgccaatttaaatccaactttctccaactcaactttaagtacaggggtcatacccccgtcctcgccccccgcaacttgaaactccctgggaaagataacctcctggaccctggaaatgaagaggcgtatttaaaaacaaatgcctcatcctgggcacaattccaacattttatcaaaatcatgaaagtataagaatagaagtaaacaaaaagctttcatcgatcccctctcaaccataccctgagcataaaacaggtcctgtactttacagaactgtattccaaattttgctgctcttaaaaattttttttatatcattgcttcccaaatgaattacaataacgcagacatagagactgctggagatcgtgaccttaaacagttaaagatgtttgcatatactgcagcatgtttggtgtggagggtatctagagagtcctaaaaaagcaaagaggaagaaggtttgctgtacgcgtctggtgcggtggcaccgtttgccatgcccacctgctctatctcccgagtacccgggatctctccgttacagctggtttgcattgggattagcagctctttgcatgaggttgtagctgtggatgtggtttctgtagtgatggggccgactccggagatctattggctgctggctttgtaaatttcattcagtttggtccaatggcagagggagagccccggagacagcaggacctctctcctcaatctctctttttcttgcagaaccgtctctctcccttctctgtctcttagcacagagctcttattcagccactagcttggcccttcctgcttcaattgtaatgcttgttctgcccgtccacagactattggcggcagaaacaacgaatttcctccaaactaggcggtgttggtggctcttgcattcctctggatgaggaaatctagttggggggttccagaaggggaaggctcctgggctttcaatacatcctcctgaatcatacctcgtttcgggttccctagaaaaatctggacgtgtaaaaagaactcttaacggccgatgcagctcttccaaagctaaggtaggtgcagttttaagacctgtctctgggacattattctcattttaaaaagccgtttaaacattttgacttgcagcaaaggatggaaagcctcactgcagatacttgagcttcacttcatctgatctttattttttccttttatgattattaatattatttttggaaaatttggacaggactttctcccatctgtctcgctgcatttcttaggtgtgggtgggagtgtagaccttcatacggtttttacatgcaacctctccacagaaatatttggttttattttcacttaaagagaaaaatccagaccaccgttgtttggaagcgttttgctgcaatcagctatttgaacggctctggggccgtgtgtgatgtgtttacaaagtagcgctgccttccacacaaataaacagaagactgtggcggggagaggaggaaaaaaatatatatgtatctgcagtacagggagaagaaggagagaagcggccagggctggagatggtgaaggcaggaagacttctgcaaactgtgaggcatgggaggcttttcttttctttttctctccccccccaccccccccccttattctttaagaaaactgtcagctaccaccgcctggggtgcttttttgaggggttgggggggtgctgttaaccagaaagaaaaagggaaaaccggcttggttggggtcgcatttaagcgattttttttccctccttcatctccgggcctcggataagatgacggcttgggtgatgcacgaaataacgcacgtgattgattagacctggcttggcttggctagggaacgatccaggcgcgctggagaccccgcgtgaagatgaaatgacggtagctccgggctgcttctgtaaaccggggagcgggctccatgcacccctttcccgtgtgtgtgggtttcgag

SEQ ID NO: 12427 - DNA, 6000 bp, Homo sapiens
gaaaggaactagagtaagcaggaggtaaagagatttgtaagaatcaaacatcaagccaggtttctgcccatacagggattgtgctggagagacaagatccctgagtgcttattaaacaggaaggagtgaggcacacaagtgagtaaatgtcccccaaaagactatagttaatatcactgtattgtatacctgaaaattgctaagagagtaggttgttgtttgtttttggacagggtctcactctgtcacccaggctggtgcaatctcagcttactgcaacctccacctcccagctaaagtgattctcatgcctcagcctcctgaggtgctaggattataggcgcacaccaccatgcctggctaattttttttttttttttttttttgtagagacagggttttgccatgttgcccaggctggtcttgaactcttggactcaggtgatccacccccgcttggcttcccaaagtgctgggattactggcgtgagccactgcgcctggcctaagagagtaggtcttaaatgttttcacgacacacatacacacacacacacacacacacacacacacagaaataactagatatggcgatagatgttaacttgattgtgattatcattttacaatgtatacacatatcaaaacatctcgttatacatggtaaatacatacaattttaatttatcaattatacttcaacaaagctggataaaaaagattggaacaggctgggcgcagtgactcacgcctgtaatcccagctctttgggaggctgaggtgggcagatcatgaggtcaagagttcgagaccagtctggcgaatgtagtgaaacccccgtctctactaaaaatacaaaaaattagccaggtgtggtggtgtgtgcctgtaatcccagctacttgggaggctgaggcaggagaatcacgtgaacccaggaggcggaggttgcagtgagctgagactgtgccattacactccagcccaggcaacagtgcgagactacgtctcaaaaacaaaaaaaagattggaacagacaaaatgcatccttatggtttataattattttgtactcctagatgaggtatcgaagttctgctaaacctcaattttttgtgtgtgttttgttttttagagacagggtctcgctctgtcgcccaggctcaagtacaatgacaccatcataactcactgcagcctctgcctcccgggctcaagcgttcctcttacctcagcctcccaagtagctaggactacagcagtgcaccaccatgcctggctaagttttttgcttttgcagagacagggtctcaccacattgcccaggctgttcttgaactcttaggctcaagtgatcctcccgcctcagcctctcaaagtgttgggattacaggcatgagccactgcatctggcccctcaatcaaattttaaaaattagttggaaatatgattttattgatagtttaaaatcaaattattagaagactgtatctactgtggagtaaggtatgcctgtgttttcctcattataaaagtaattcttgctcattatagaagtccgggaaaacataacaaggtatacaaataaaactaacaattctattaatctcacatcccagagacaaaccctgttaatattttggtagaagtgaatatatggatatattagttagggttgggtcgctgttataacaaataactcccaaaatacataatggcttaaacataatagcagtttatttctgggtcacaaacatgtccaagtcagttacaaattgtcagtgtgtggaggaggacggaggcaaagtcattcagtgacctaggctgataagacaatttcaacttcaacccgtggcttccaaaagcaccctaggggtcaacgtctcattcctgctgggagaagaggaaggcatgtagaagcaatatgtttaaggttttagggataagcccggaagtggtggacctcacttctgacctctttggctacaactcaatcaggtagccgcatttaactgttaaggagttaaggggaaatggagtctggctgtgtggccagatagaaaaaaatgttgaaaaagtaatagtctctaccatagtgtattttctttgtgtttttcaatacacacacacagacacacacacacgtacacacgtatacactaacatgactaggattatgttgtatattcagctttttatttggcttttaaaacatctctgagcatttttctacataattctttgcaaacaaggctacatgatatccgatcatacagatcagggtttctcaacctcggcactattgacatctggggccagatcattctttgttgtggggaggggagctgtcctctgcactgtaggacattgagctgcatccctgacccttacccactggatgccagtaagccccccaccctatccccagttgtgacaaccaaaactctctccagacactgctaaatgtctcctgggggcgaaattgctcccagtcaagaacccctgaactaggtcgacaatcatttatataactaattcccttctgttgagcaactgttgctttttttgttttgttttgttgtttttttgctattacatctcactctacaataaacctcctttcacattaattttgatcaaaacagttgttatttacttaggagagagtcccagaagagggattattaggtcagaggctgtgaatatttttaattctcttggtagtacagccaaatggctttccagaaaggctagaccaattgactcacccacctgcaggtgtaatcttgctttaatttttaaagatttcagttacttgagaaaaatggtttattattttaagatagcatttctttgaataatagtgaaatgaaatatacttactagccatcatctgcatcgtctatagcagccttcactaatttcccaaatgctatttttttttcttaagggttttagggacaattgcttgttgaaatcaatccatgatactcacaaagtgaggaaaattttctgttaaaatgtggctttcccctgattgtatacacaattgttagaactcagtttttatcacagcatccattgtggctagctccaatatttagacagctgttctttctttggggaaaaaaaagacaaaaaaaaaaaaacaaaaaaaaaaacgtaagacttctagggaatgacagaaagtagaccaaggagtttactttcatctcagtacataaaaccttagagttcctcgttccagagaggctcattaaggtcatgtcttgccaaagtactatttcagatggtcatgcctgagttcccttctgttgttttcagggtctcctaggaaaccctcaagatgtaggaaccgaccaaactcacccttccctcaactaggacttagcatgaattcctcattgctctcacccagtccacctttgtcttcctctaccttacaggcagcctctgttattgttggattcctacatacacttgcactcaggaatggcgcaaatggattacttcctcttaacaggaggacaacaagttatacctatgagctccctgttgttttatgactgcatgaagattggttagaaatgactattcccgtgggattgtgaaaatgagccactgatccgcctagcacaaatctctgtcctttcatgtaaaatattattaggctttctagagctctgccttgataaaatctttcctaatccaataaatttcaatagatgaaatgtttgcctcctccatcctttctcagtcctaaagcctctcttttggcttaaatgtccctaaagtgtactatctattgtcactgtttatgtaaccctctgttcaaataacatgatgtattttcagaacaataaaagaacacaacaaaaaatatcaggggggaacatcaggctcagaaatgtcacagagagcgttagtcctacaaaaactgcaagggtcccatgactcttctaatacctttggagacaggaaaattctctaaggagacagaaggaatttaagccctggacactgttaaaccatttaattcacttaaaggctcaagcgcgaggcctgagcagcgggagaaatggttgactggagctagcctgcaaagtctccaagagccttccaggggtggacttccaggaatcaagaggggtgataacggacaccagcaaatctggcaccactctagattggagggtgctacctgtgtctttctaagtcattagccaccgacaagttacttatgtcaatgtttcgcaaccttggatgcacattggaatcacctggggagcttttaaagaacggatgcctgggtcccacccgcagaggccatgatgaaatccggtttccagaagctccccagctgatttctcctctgcagccagggttgagaccactgaattaagtaacgactcgtatctgaacaaaaggaactgagactgtggattgaggcaacgctaagtactaagtgcccttggtccagtgtcccgggcctcagtttctttatctatacaacgggtgtggctaagacctcaaagccccccgctccccccaacctccccaggccataatagttttcatctgggacgcggatcgccgcctccgcgatcctagaagcccactcccctctctacccatccccctcgctggcttttccggttcccgcgaccctcggcgctcgcccgggggggtcccagaggaagccgcgagctttgcctgcagactccgcgcgcccgctgcccccaatcgggccctagctccgggcgcacaaagcccccggcgctgacgtcagggcccctctccgcgcggccggcccccagtgcaggcggagccgcgccgcgctcccaccccggccgggagctaggagccagcggccagccccgcgcagcgcagcgcagcccgcagaagcccggtcagcgcacgtgcccgcgagacctgcaaacttgtgccaccggctctgcccgtccccggggagcccgaacgccccgcagccctcacccctcccgccagtctccagccatgggtaagcgagcgcgctggctgcgcgccacggccacggtctcgcgcccccgccccgggagggcgcgcccttccgagggtcccgcccctcccccgctcaggtggcgcctcctcggccacctctgcgacgaagccgggacgctggaggtgggaggggcgcggcgcaggtgtccggaacgcccaggtgcgcttccctgttgtatcctgtggggggggtggtccccgctccggctgcggccaggctgcacccccgcacgtgcggctcgcgggagcctaagagctgggtacccgggaggggttgcagagagaacagacggcgcgtcccgggctagtgctttattttaaggggccagtagagagtcgcttcttgcctgtttcccgggacgctctccctgtcgcccgagctcccagtccagtcctgccccgccccgccccgccgtgcttctgttctccttaagcccgcgcgaaacaaacacccggttccccaagcctggggtcttccgggagctcatttcgaaaccatgacccttgaaaccaggaaagtgacaggagagactctggacagcatgggacggaggctgagtctctcctctttgtcccttgttccaactattaaaatgcggcccgggtgcaggtggaggcggtgtgctgagcgggttccaatgcaacgggggaacgactagcaacggcaaaaggctcagctccggagggttaaaatctgaaatctccaacctggcccgaggctggtgtaaggcggctgtaggattctttttgtcacttcctaacaccctgaaatgctgccgtcagcaacatgtctttaagtggggactctgtattgggaggaaaactcgtaaagagtgctgtggaaatcagcctcattccgcagcactcctgaaaacgtgtgacagctgtgcttgggaaagggtttttctcctcctgctccgttatctttctctagtgacagactccagccacaagccaca

SEQ ID NO: 12428 - DNA, 6000 bp, Homo sapiens
tctgagtccctagtccaaaaggtgaaactatgcctataccaaggcacaaaatgatgaaatttcaggacacgggagactaagagataatgtataagtttccagagtaaagaaaaattatgataacttcaaacaaagggccaggaatccgaatgaaattagttttctcaatagcaacaccaaaagctagcaggctagagcaatgctgctaaacttctgaaggaaaataatttctggcctactatttggcacccaaactatcaataaaattggagggctgaaaaataaattttcagacattaaagttcttagaaaatctcccgatctcccatgcagtcttctttaggaggctactggaggacggtcttcaaaaaagggtgctaaaacgaaaaggaagacatcactcaaacaaatcccaatatcctgtgattttccttgtctctctctttttttttattgccacgagaaaacatcaggtcctcattgcctctagtctagagctagtttcttaagctataatgtgcatactatcattccagatcttgttaaattgcagattcagatttagcaggtctggagaatctgagagtctgcacttctgaccagctcccagttgctgttgctgatctgcagcccctactttaaattgcaaggaggcttctggactactggaacagcctaactggtctcttctccagctgtgccactctttcaccttccttttctccagttcttggaacaattttcctaggacaaagctttgattgtggtttgacatttcatctcatattctgcatcaaaaagaagtaactgccttagttactcttttccaccacactaacctttgtttcaacagtgtgtagcctaaagcttatcaatatgagttttaaaaatgctagtaacatcttcatgttcaaggtatctaattgattcttttatatccactggtgtttgtttaatttctgcatgtttttatttccaaattcttattcttttaaaaatgtcatttcaaaaattatttgaattgcgtctagagtgaattcttcttccattgttacatttgtgtgttgtctttcttaatattatatatcttccattgtttttgaattttggtttataaaccaatcttgagagctctctctctctcgctctcactctcactctctcctctccccgtgtgtgtgtgtgtgtatgtgtgtgtgtgtgtgtgtgtgtgtgtgtgtgtgcttatatcccccagactagcagtgatagtggaaaattgcaaattatgttgcttggctcagttctgttagcaaagttatatcctcagactgttggcaaaaaattctttcaatgtctattcacaagtaggggagatggttaagcaataaggcttggttatctattgctatgtaacaaatcacccaaaaacttaatgttttgagacaataacgatttattatttctcataattctgtgggttagttaggatcagctaagtggttctttccacatagtataggctgaagtcactccagtggttatattaaattgggaactcacttactgctggaatgcccaagatgacctctcattcttcagggcttctctccatgtggcttgccattatccaatatcttgtctgagcttcacagcatggtcattggctttcaagaggaaaggttccaacaagatgcatcccagtaaataaacacttattaagcatctgtggcatctcatttggccattccagtcacatgctcaaacccagagccaatgtgggagaggattagacaaggctgccaatatggaatactggtttattgaaggtcaccgttgtaacagtctctcacaaaactggttcctgtatcaagccacacatggaaccctgttagtctattattctacaggggctgaaccctggttcacatcttcctgctgccacatacagaatccaggacctaggtggctttgttcctgatcaccattttgcgtattggttctgtttctgatacacggaaatgtttatcttcttgtttaaatcacaggtaaaacattaaattttctcatttatattgtatcacttattgttatatttgaagcagaatcaggagttaggagtctcaaaatactaattgaaaatgtgatcttggctggaagtccgcctcaacatcaagcccattttccttagtaatatcttctaccagtttgctctaaccttcattgataatgccactcttcttctgtctgcccactttcccttctcttttcctttgtgattacaaagcagtgtttgctggacagcacctgtctgtacctcattcatgttgttcttggaattaccctgttcccaagagttgcatgacaccatctacttattcttctagctaaatgctggcagctagaaatactcttcccctttgaactcccaatatttttcttatatttctcttatggcatttatcacttcctgctttttatcgtagatatttacatatgccttaactctgtattgtttccttgcaagtaaagctcatgccaggttttctctgcatcgtgctttgtacacagatagtaggctctcaagacatgtttgttgccttcgcactccaagattatcccaaagagctaatttacatatgaagttgcaaaaactgaatttcaagggaagatgatatctacatttattttacatcttcatcatctcaggtcgtttaatactaaaactggtaccaattgccctcatattttattaagtgcaatcagaatataatgcatgtaagtatcttagtctaattttagtggttccggagaaaattctctcaagacataccttgagaccatacattaaggcaggacaccataattagaatcatctccagatttatatcttaatcttgctactacaaatttcttttgactttttagaatatagccttaaatggagacctttacttaactgactataaatgaagtcatgtacccaggtgagattatgaacccttgggagtcggaatcatgatttatttatcttttaatgctcagtgcctaggacagaagctggagctttaaataaatgttcaatgttttcagactttgttggaacagcctgcaggctcctcaacgccctcccccacagagactcagcaacagtgtgcctctattaatatctatttataaaggtcagcctattctatatttgaaacacaaagaaccttttaagaaaggtggatttcttttgactattgataacatgtacaggaaaagctagaaaaaataaaaagctgttgaaacacagggactatgcttaatatttcttgtattccccacaaggccttttacagagcagacatccagtaaatgtttgatgataaaaataagaaatatttgttatattttgaaaaaagattcatggtggaatttcaaacgtgtactgtgatcagaactatggcaggggcaaaccaggggctcaataagtgaggcttaaccctcatttataccttccaggatttctacccccactctttgtcttaaaacctattacaaaaatggaaaggaggccaaatgctgtacctatctggtaatgtcgctgttatctgtgaaaccaactacaaattataaagcttaattaagtgtccttgagtcttcatcactgtaattctccgatgcttcatcaatattaacacagggcaaagtatcgattgctactctagtcttactcatcaactcattaattcgcttcaaatctcacaactaaaatgctctttcaatgatgttattgcactgtaatttgtataaggtacactccacgaaatactgtcaatacattttattgtgagcatctaatatgtgtcagggagtgtgctgacattgggtaaagaaattcatgtattaaactaaaacttcctcaacatccattaccaagaacagatcctgcctcagtttactatctggcagggaaggcagacatttaacaagcaaatacaatttccgttttcagaaagaagtccatgtgagatctcaagagacaagtaatcaaggatcagggtgaggagggagaatgcaatcaggcaaacaacttgaatatcatctgataaatgttatactttggccagcatgtggccaaagtactattaaaattaaaaagtgagagtatttcattctctggaggcttggggaaagcatcagaaaggagcagacattttcagggatgaataggcttacactaggcttaataaaatgggtgccagtaacggtggctgtgatggtactcagaaaggaatttcttctcgaaaacgcacgtatggcagggatgggggattccaagtaccagctgtgacgcatggatgaccgtcataccactctcactgattctttagcttcctagtcaagcaccatcgtaactagttgaaccagtcgagtgggagttgatatttcagatcagacctcgtatgtttccctcagagtgtagaattgccatataaataacaggatgtctagttaaatttacatgtccgataaaaaacgaatgtgtagtgaagtccccaatatttggtacatgcttgtattaaacatcatttgtgctttatctgaaattaaaacttcatagtttcatctgttttgactttttgtgtatttttatttatttatctggcaaacgtcccagagcggtaagaaccggcacggttttgccgtggcacagctgattacaaacaaaaagtctctccaatcagaagcaagcgcgcagagaactggcgtccggaatagagacgctgtaaccaggaaaccagggtgagcacccaccctaccgtcggccgcttctaggagacgggcgcaggcgcgcgctgacgttacatctcgcgcttaagggtggggacgacagagcgtctctctcggacgtgacctcagcgcctctttgtgattggctgcctcgggggcgcggcccttgggcgcggacgccctagattggtgctgcggaacagcagggagggactccggctgcagccgcgggaggtccggacactggcggccatggaactcaccggtgagtgcgcgtcgcgccgcccctctccagcgctctgggccgctttcggatggggctgttctgcgcgcgtgggatcgtggcgggtggtggagggggtgaaaccgacccggttcgaagcccggaagttgggtcggagggtctccagagtaggttggggctgagggtgcgtttagggcggacgcgctgggttccttggctcaggcgggtgggtcgagggactggggtctccggaaccccgggcctgagaccaacgtccactctttggttgttttctttctctctttgggcctggccatccccgccatgaacccagcggggtcgctgtctgagcaggggtatcccctccttggcccgagcgtttccccagcgacctctcagggaatcagggaatgaagctcagacagtgcccaggaattgtcggtggaagtaccattctcttgacccacaactcctgccaggtctccctaaggttcttcaggaacctctactgctaatgattgcccagggctcgttggtcgtggtcgagaattttacggtaatgtctttgccactttaagtggctgggtgggaaccttggacaaatcactcaacttgtctgggttctcatttgtaaaacgagagaggtattcactagagctccaagcctcatttcggctttaagagctaagattctgcgattgtgcagcataatgaacttttatgtcaaagatgtttggactgaaaacctggcggaagtgggcagactcctcacagaacgttgcaggctaatgacaacattttaaatgatatcatttggttcattactcactgtttttgctatcgttcatcttttaaaactggtagaactggaagttcgggtttaggtgaccacagtaagaaaatgttagttaagccacctaaaagtacaaacttggggaatttcaatatttggtaatattgaatcttaattagtaaactcagtcaacaaacacttctgg

SEQ ID NO: 12429 - DNA, 6000 bp, Homo sapiens
tctcagttgtacatacagatttagcttcaggtgaatataactgggaatattactcttctaatgttctcgggcttaatgaggtcagcgattaaaaaaatattcagatctcaagtttcctttagaccatgaaaattatatcacaactttctagttggatatcatagctttttgtggtatagagcaatggttctcaaagtgtggttcccagaccagcagcatcagcatcacctggaaacttgttagtaatgcaattctcaggcctcatctcagaccccctgaatcagaaactatgggaatgaggcccagcaacctgtattttcacaagtcctctaaaagaatattctagaaccactggtttagcgatttggagttgagttagatcattgttgaagcatttcacttcaaggatcaaatcaagacattatttgaaatcgtttgtttaaaacatacagaatctctctcttatattgctgtgaattaagagtgacatagaaattcatcgaacgaaaatattgcgaagagccctgggaggtcatgagagcacatagttttcaaacgtgttggttacagaaatctaaggttctatgaagcatctctaggggtctcctaaaagaaaatgttcatacgtttggttgatgactatcctttgaccatccagggtttgtctctaaaagactagaaattctgtgtcagaagaaatggagctttaggaccaagtcaatatcttatttgtctttatatcttcattaccttccagagtgccccagcataaagtagatacctaacaaacatttacaatgtatgtatggatggaataggcatctcatggattcaagtgcttaagtaacttttactaatattctggggtcattttttgaaaatcagtttggatagtttattctagttgctattaaagaatactgactgctttatgtatgcctccagtcttttaagcagttaaggattttatctagcagatattaagaataatggctccaactctgagaaagaaagagagggagagagagggagagggaggagagagagagaaagagagggagagagagagagaaacttatatgaagataatgtttgttccatttcttgaaatgtctataaaaatatgctactgcatgttaatattttcagtgactaacccaggatttcttcctgaaccttggcactagtgacatttggggctggatcattctttgctatgggatctctcttgtatgttgcaggatgctgggcagcatccctggtctctgcccactagatgctggcagcatcacctactactcctagttgtgacaaccaaaatgtctccagacactgacaagtgtcccctgggaggcaaaagtgcccaggctgagaatcactgctctatcctaatgttcatagggcagtagtaattttcctgcattttattcaaagctatggaaacaggcttcgagaaagagcatatgttccacatttctctttagctcattgttgaggactttggcagtgacagctctatctattttgaaatgatttggttcacaaatcctcattattttaggccatttttctccctggaacaactttatctttggagatgcaaattcacaaactctaaacatcttttttacactttctgtgatctacaaggcttcagcactgaattccattattgggcatttttatttaataatttctaaataatctatagactggctaaaggaactctgtataagtccataatacagagctagcaactaatggaatggtttttatctacctccttacaatattttaaaaaattatttaagaaaaaacctaagtaaaatgtaataataccctttattacatcctactgcaagattctgtccatggaaagaaattcaccattgcttctgggatttacttcctggtatcgaaagaatatgctaataattctagttcgtgatttattttagatgttatctattttcttccctttagcacatgaggatttagcattatttcaaccttccctcacttctgctcctccataatatcaatatatgacaatttttctttaaatcatcagtgtttaaatgatgagctgacagtgtatcctgacatccttatcgacatcctcatgtaaatgttccctctcttattttccacgtgggtatgtgttttaaatagtccctttaaaaaaaattaatggtattttgagacagtgagaggataaaagtatatggccatcacacatttaataggaaactaaaattatttttgaaaactttggaaagattacataaaaagtctcaaaattttatcgttagaaggtaaagatttctattttcccctcacctcttacatttagcataaatgacagtgaagcatttttttcaaatttaagaaacaagtataaaatctgatttttagtttttcatgaaacgaattttgtatataattcttgtatcaatattaacaccaataaatcaggaccatctagaaaacaaaaacaggattaaaaaagataaccaattgacatgacggatgaagaagacactaggtgagaagaaacatgtatataacaaagcctacaattgggaaattgtgggaatcaaagtcaagcagttaattactaacaaagatggcaaccatgtttcttttgtctttcacagtgaatgcataattagcacttaatactaagactagggaataaaccatctataatctattgaaaaagaccatctgcttctataaattttgttctcatacacttgccaaaagaagagaacatattaacaaaataatgggccctgcactgttaattgctaggttgtttgcagttgtgctgttgctattagaatttaataagccattccttctgctaaattaataagcagccaagattatgtaatagctgctttcagctgctaattatttttcccacaattccttcccctccctacccctacccccacctttttttggctaggagcaggaaaggagactgccagtatgtcatcagcaagtctcccgtcctcattttcagagcaacattaggagcataatcagagtttaaacttggaagtggctatctcaggaaccttcaggatataagtgttttgtacagaaaaagagaaaagcagcatttggattcagagggcgagttttcattgtgtagcattagagctatcttttaactggttaatggcatctgtttcttgtagtaagagagaaatgggacattcgaaagcacctttggggcatgactaggtagggagaaatctggtgggggcgagggggacctaaagaactacagaaagccagctctgtgccgtgtgtcgtcccctttctttaatattccagtatacattaatcatacatgttagtaggaaactttccaagcagcacagtagtgcttgaaaaggggaagtattacacatttctttttgttttgtcatacaaaagcattttttaaaagcccccaaaactactgtcttagtttcatagatactataatgtacacaaaaagaatataatccctaataaaggattcctttacattgattacatttagcttcgtgaaaattttagcatttctttttttactttaggccattaaaaaaattctggcgactatacttaggaacctctgcaaaaggggcatggcccaacaaaagcaattttctcgcttcctttgtaagaacctaggtgactcgggtaatgaatagcatttcgatatgggaaacccgtggctcttcaaggaaggtcacctaatcccgtgggactcccctttccttatctgtaaatgactagatgattcatccattctatcattcagaaaattatgaacatccattatgcccaggcattacgctcagcattacagctcttaacaaatttatcattttatagtctttatcagtcaactcacatttattagttgttatataccaggctgtgaactagattgagatgcaaaatgaatacaatttaaggtgtgctaaataaaggctaacgggcatgtgggtgaaagagggaatcgctcttacagggttttagggtgaggcttcatagatgtgacatttgggagcaaggacatgccaggcacagcaagtcgtcggcagtgctaaactggaacccaggcggctggtggggcgacccagtgtgaaggaagcgggatctcgaaggtgaggtgctgtccgggcttttcagccgaacggacggtaactcatccagtccgcagcaccgaggatgggcgaggcgagcccagggaacagactcccgcgaagctcggggcggaaggtgtctgggctagggctggagcagtgcaatgggaaggagagggcggattccggacaattttgaggcagaatgatagcaaaaggcccgtgaatgcgtgacgagctccacagaagagctgacttgtttttccagagttgcagcactccctcgtctcctcccaccctcctcgtcagccgtcacacttcacacttcctctctggggacacagagaatcattagagctcgaacgtggctcttcgctgtccggaacttccctgccccgcaccacccgctaggctaaggacgctgcagaatcccgtcctcctatcattaaacaagcaggacagccgcccgcgcgcgtcccggaggcacctgcaagagcgcgcgggcgcgcgggcgctcgggcccggcaaacgccgcttccgggtcacgtggcccggcttccggttcgcacctcccctcagcgaagaaacctccaatcggctgccttggactcagcggttacccgcgctgcctccggtgccgctggcgaccgctgagccgcttcccgcgcgtcgcctagcccgcccctcagctcgccgcagccccggctcctccctcgtccggcccccggggcggggtctgtcagcttgccctcccctctccgcctaagcctgccctatgccagccgggtgtcctccccacagcaccacggcttctcttcctcagcacggcgacaggggcttccccttcgccgccgccgccgccgccggccaagctccgccgcgcccgcggcccgcggccgccgtaagtccctgggggcgaaagggggcgccggggatgggggagagggggagggaggactgggcgcgccccccgccaccccgcgcgcgccccgacgaccccaccccgagcctgcccggcccgccactgggtcgccgcgcccgcaactcacttctctccgtgtccgcgccctccgcaccactccgcgccgcgcccggggatgtgggggccagtcccgggctccgcgacagcctcgcggcacctgtggttcgggaatcgcctcaagttttgcggggcgctttcgggaggggccgggggcggtggcggccgaggactcttggcgccccctgcgcggcggcggatgccattgtctgctccgctccttgcctgtcacctctcccgggcttggtcagtgatggagtgtggccacgggagtgggggggaggcaccggcgacggccggacccgaggaacgctggccccgagcccgcgccgcggctgagcccattgtttttaatgccagtctcgaggaattgtggtgccctgtgatttgcggcaaaatcaaagcgttggtttttaacacgagggaaggaatactcgtgctttgcaaccgggtttcgtcccatgttaggacataatttattttaaggagaatacattgttttttcgtcctgcaaagtggtagggcggatacaggaccctgctccagacagccttgagcccatactcttcgcaggcaaaccctcaccctttctggtcaccaagatctaggaatacgaggtccattcttttccaagttctggtaacgggtttgcagtaaatgcccagttgatgcttcacttcctgcccccttcgaatgccgctatcttcaggacttgcacgggaggcactttggtatcacctaataatgtccttatattttgttcccctgacgcattttaagtgaggtaataagaccattttaactttacta

SEQ ID NO: 12430 - DNA, 6000 bp, Homo sapiens
ttgtgtgcctgtactcctagctactcaggaggctgaggatggaggactgcttgagcctggaagtttggggctgcagtgaaccacgattgtgccattgcactccagcttaggcgacagagcgagacaccatctcttaagaagacaaacataacagtaacatcttttggaaatcagcaggtaccctgtgactatgaaattagagcaagggttgttctgcctcatgagatcagtttctgaggtctcctttcccattactctttcaagattatctcttcaacacattgcctttggcctgtaggcaatgtacaagacccaattcagatctcatccaagtatctgcttcctcagtgtcaaacaggtaggactactgaaaagtgagaacaggatttgggatttctgcattgctggttagcatgtgggatccccaaatacgggaagctggcctcaccctggtaagaggtctctgagcaatctcttcttcaaggtcctcagctcccacaaagatgccgagtactaaattcaaaggaagatgtgagatcctctagattgggagaggggtgagacctcagaaatcaatcccccaaaacagattatataaccaaaatatacataaaaggatgcacaatgtccagtatcctttaggtcccacccccttatttttcctactgtgtctgtgctgtggtccttaagcagaattctctcatctatttttcttactttagacagacgtacggcaggacagagagtgtttctgagaagcatcctcctttgggtctaagattgatcccatgttctgagactctattgtaaggaaacagaggtggtgccaatattaggaggcaaggagtgtcagggcagaggccagtatttaaagaagtatttcctcaaaatattggagtagtttttttttgttttgttttgtttttcctcaaaacacactgcagtcattaaccccacaaaggaagtctgctgacttcagtgagcagcatcatgatcgttcttactgaaaatggtgaagcaagccaggcaagcacctgtagtcccagctacttgggaggcggaggcaggaggatcgcttgagccaggaaattggagtccatcctgggcaacacagaaagacctcctgtctttaaaacaaacaaacaaaaaacgatgaaacagcttcacttgggatactgggtatgtctaaggaggtcagctaggagtcagtcggtttgtcaaaggccatttagacaaagattaatttacagcataaccaattcacagagtggacttgtttggtgtcattttgtctccataacagcattttaaggactagtttgtctttgtctctgctccttgctgttctagttggagtccgaaggaaaggaaaaaggaaagactgggtagacataagaacataatcttcaatttgaagaattcttatcagtgtatactttttttttctttttttttttttttttttgagacagagtctcgctctatcacccaggctggagtgcaatggtgcaatcttggctcactgcactctccacttcctgggttcaagcaattctcctgcctcagcctctcgagtagctgagattacaggcacctgccaccatgcccagctaatttttgtattttttgtagagatagggtttcaccatattggccaggctggtcttgaactcctgacctcaagtgatccaccagcctcagccttccaaagtgctgggattacaggtgtgagccactgcgcctggccagtatatactgctttcttttcatgttagtctccaggtacagcatcaagaagtcagagcaggcaaaaatggaatatatgttcttttagaatatattcttttaaatatatttaataaatatattcctcactgtgaagaaatcttatgttccctggtgtttcctctctttatctcttagcctcaaacgagctacaggaagctggagcagagacaaattcaacattctttaaaatgtaacgaaaaaatgatttccagtcaactaaattatcatagaaataactaaatttggtgaattggtcattttcagcaaattcattcagaattgaccttctgggtcaaagatggagtgattttctttagagccaaagacctgaaccctacaagagaaacatttattggtttccaccttggatgttaacatggggctctctggaaactacctgggctgaagtctctgtggcaggatgatggcagatcctctggctggggtcagaaaaatcatacatggtgctaccccagggtccagttctgggtcttcatttttatggagatcatgaatcagcttcagaaacaataacattccctatcattatactatatctgattcttgacaaatatttgagaaatgacttggagacaagtttctattggtgataaccagagaatggcttcatggatatggggaccaagatatggaggttttgcacctcagggatatgaggatactaaaatgtgagactgatttattatatagtacagctttctggtccaaaatgaatcactaaaatttgctttaaaaatttaaaagctaaaacggagtagccttccttcttggttttatcccagaattttgagcttattgaagaacatagcttatatattgctatgcaatcgcatagaccaaagccgaagaatgtagattgcctatacaccaaaaggggtgcaaatgtgcacagcagaattagcgaagaatgaagtcaggaaactgaaaatgtttctatactaggtggaaatgccagataaggagcaaagatcatcagttatttcccatatggctgcaaaatcaactcctaaggaaggacccaatggaaacaaaagccacaatgaaaagaagcaatgatcccagcttttagatggagatgaatacatgaaaattctagcaagagtacatattcagattccaaaacatttagtggtgataacaatgtctagttttattcacccctagaccacagcaaattcttcatggaggcacatcacatggatcactgcataattcaaaagccaatattaagaaaacaaagtattatatgaagtaatatgtgagctgatgtggggtttggtgctttagttgagtgacagagtaaagccatagatttatgttctggaatatctaatataaacttggttaaggaccaaacataagggaacgcagctaagcaggactgatttcatttactcatgcgagcaacattaattgagctccaactatatgctcaacactgtaccaggcatagtaggagataccaaaagactgtttcaatgaataacgtacattccaattaggaaaatatgcctcatccacacatgaaaacataaataacaacaggaggcaatacattgtggccaagtgacaacgaaattagctatgatttattaagtatttttctactagccaggcttgtgctaaatgctttatattcatcctcttgatcttaagtcatcctgtgaggtaggtgctatgattatctccattttacagatgagaacacttaagttcaaacatgtaaaacgggatgccaaaggtcatacgacttgtaaatgacagaactgacatttgaactcaaaatgaactgactctaagtcctaagctcttactaaaccaatggctacagaaattcagaaaatggggaaggctaatagaggagctgagctggccgttaagggaaagataggcttcagttagtcaaggaggaggaagaagggccgaaggggtcaagcatagagtaaatgcatggagactggaaaagagcttgcggaaattgattgcattagtctagctgtccagtaaattcctatgtgggccagattttggtggacaatgaataccaggccgaagattgtgaactgtaggttatcagcagccacgaaacattataatgaatgccaagtttcaagctgtagacccgtgggagatgaactgcgaacctgcccgaggaagcggcgcccaagtggctaggggcggggtcacaggcgccagaggtgtcgctggggcacctctccgggccttccccctttttcttccgggctgggtcccgctactccagttccgctaggcggcggagacggggccagaggtgggactacaatcttggccctcagaggggtgcccaggcggccgcggtaggcggccctctttctccggcctcgagtgggactggcacccgtctcggggggctccacactaccacgcaggaaagccaactcgtccgccgcccgaagccgggttcccctagactcccacgggccgcctcctttttcgtcccccccgaggccgcgactctgagggttccgctctgcggcggaggtggggccaggggcggggatgtgggcggggccgtgaggtcgttccagggcgcggggcggggccgcccccttacctgtgcccctcagggttccaaacgttccactccgcggcaggggcgggggcgagtccggagggcgggtccaaggcgcccaggtggccgcggcagaagggcctgtttctctggccttggctgtggttggcagccggccggggagagaagggactcagggaggcaacctggttcccgcccgttgctgatttcgcagcggctctcccgggccgcccccttttccttcctcctcaggccgcgacttggagggttccgctccgcggcgggggcagagccaggggcggggctgagcgcggcctgggcgatctccccggcggctggggtgggctggcgtcttcttcgcgcccgggggacctcctcgcgaccgccgggacgtaaaaggggcttggcaggggcgtcctcgccccactcccggaacctggtttcccgctgctcccgcgagcgtcgggagcccagcaggcctggccgaggcgggaccttcgtcgctccagcccccgtccccgcccccgcgcctccccgccgcgcggagctctggttggcttgctttccaaccggactttggggctagcgtttagaaaagtctcgacctcctccggcccggtcccatcccaagaaccgactaaggctgtgagtgtccgggaaccagacccgcttggaggccacagccccgacgtcccgcgcccacgcggcagatcgggcgctgcggcctgggagcctcggggagatgcggagcaggagcaattccggggtccgcttggacgggtacgcgcggctggtgcagcaaaccatcctgtgttaccaggtaaggagggaccgcccccagggaacgcgtggaactaccctctcatgtaactcattctccttcccaggtctggccctcttgtgacctgagaccttgcaattaagagtttgctatttgaatctagtccttgctagccagtgattaccaccccattgccaccccgtgctccttaagattcaggggacctaactgttgctacggctacttttcacagaattctttggccattgttcaggatgagaatgagccgcctccgtgcccgggtccaaactgcctctttttgcattgactctgctttttttggacgagaagaggtgtggggggtttggacagactacactgaatgagaacagtagacaggagtgaagaagctcctgaagtttacgcaggactctgcagtgtggggcgacagctaccgtccctcccatgagctgtcttggtagagacccacctgggaagcccttaggggctactttggttgctattttacagataagaaaattgtgaggctagaaaggtcactgcatgtagcaggtcagacccaaaggctcccaagctcacagggtcctatgacactgcccatgtggtccgaggtatgaatttgcctgctatgctttgtattcctgggctaaaattatgtgtgggtccatcagtgtaagaccactgaactatttttattcctagtgaagacagcagctatgtttcttgccctcaatcaacagcaactatttatagggccttcaaagtcaacgaaggaagtggcattcaggggttagaggcctgacctgcaagttgg

SEQ ID NO: 12431 - DNA, 6000 bp, Homo sapiens
ttttaagcatcgatttcttcatctgcaagttgaaaggttgagaagtttctagtatgtcttcagctgggcatggtttctaaaagcttttgttcctatcttcatcagaacataactagttctccagttcagggtcatggtactgtttatatagagtcctcaaagcattttaacctgtgagccctcatttggttattaagcttttggaaatgttgaaaagcttaagcatcccacttctctctttgcaaaccctccccaacgttcccaggaagaaatattggggtccagtctgtgtaccatcagcccattctagctcctacagctgacaaacatttgttgaacaaatcaagttcccacatgaccagtcagaagcctctggagagcttcaaagaattctttgctgagaatgccccatggtgattttgttgagtaatgaagttaaaataatgtttctgtctttggtaaaccacccattctcacctactgcatggcagcatgggtttctgccagtctttactcagcttgattgcacaaggttgggcaggtggtgagatgtgtattcactttgccttcagctcagcatgcttcagaatacaggtttagcatcccaaatgtgaaaatccaaaatctgaaatgctccaaaatctgaaactttttatgtgctgacgtgacgtttaaagaaaatgctcattggagcattttggatatcagattacagatactcaactggcaagtataatgcaaatattccaaaacatgaaaaaaaaatctgaaatccaagacacttctggtcccaagcttttctgatgagggatattcaacctgaactgcctcttccaaaggcttttgcatatcatctccatatttatttcagtgggtgtgggatagaatcacaaattctagctgccagttccttctcctcaacctgttagatgatagctaaagattgctagctaagtgatacttttttatttgagatggtgtctcgctctgtttccaggctggagtgcagtggtgtgatctcggctcactgcaaccgggttcaagtgattctcctgcttcagcctcctgagtagctgggacttacagtcacgttccaccgcgcccagcacgtttttgtatttttagtagatactgggtttcaccatgttggccaagatagtctcaatctcttgaccttgtgatctgcctgcctcggcctcccaaaatgctgggattacaggcatgagccaccacgcccggcctaagtgatattttttaaagcatgtttaatatttcaaaatgaggttttaacagagacacatagaaagggatcaacaagggacttgaacaaatatttgcacacccacattcagagcagcattattcgcaataggcaaaaggtggaagcaacccaagtgttcattgaggatgaattgataaacaaatattatccagccttaaaaaggaaagaaattatgacacatgctgtaacatggatgaactttgaggacattatgctaagtgaaataaaccagacacaaacagacaaatactatatgattccacttatgtgaggtacctagagtagtcaaatgtatagagacagaaagtaggatggtggtttgcaggggctgagggagggataatgggcagttattgtttcataggtatataatttcagttttgcaaaatgaaaagacttctggagatggatgttggcgatagttgcacaacaatgtgagtgtacttaatgccactgaactgtacacttaaaatggttaagatggtaaattttatgttatgaatgctttaccacaataaaaaaggatcaagaataacatgacaaatacccaacacccttctacccactaccagctaagaaattctatcaattagcaattacagttgatctgtcatgtatgttaccttgtctcagttgcattgtgtgtgtttcttgagaagcgtgatggatgacttgggtaagagaattctgggtcaagagagcattccttctcctgttttcttttcatttttatttgttagttaaagataaacatagtacaataagtaaaaaattaataacctttctctgtcctttaaaattagtgttcctaactctaaaaagcaatgtttctagaaacttctgtttaccctttgggctctgatgaatgtggagaaaagagagagaacacttaactcaccaggatggaagaataagataaaatatttgcaacctccttcctccctgaatgttgtgttaaacgtttttttgaggacttgcgctgtgtcaagtgttgtcgtatcagttatctattgctacaatattgctgcataacaaattactacaaaaccccagcagcatacaacattaagctgctctgtgtatcttgcttgcattatgtgtacaacaaacccctatgacatgagtttacctatataacctgcacaatgtacccctgaacctaaaataaaagttaaaaaaaaaaagaattaggaccttaatgcaatcagtacgccctagttacctatgcaaatgttgtagtggagacatctatgcagtcctttaaacaaccctgagaagtaggtggcattggcctcattttgcagttggaaaaagcaaggctcagagaggttataagacctatccaaggccacactgttagtgagtggtgtagtttgggtttgaacctgggtctgtcagacgccttcctccatgccgcctctgccaaactccatgcagcaccttggattaccacctatggaaacattctgttttgccttttgtgcttctatttgcccctcccactcccgctctactcctttctctattatatttgattgagtcctcttctccaacttctgaagtgtaagctgtttctatagtcctgtctttggcatcttcctgggttcagctaatgccatgaagcatacgattccctaagcccaacctctaggctggccctccctccttgctgccttcatgtccactctcagacactctgtgctggctactggtttctgggctgcaagtcataggcaacgtggttccatctggcgtaggtcatgaggaaatacctgtcttgtgtaacaggaagttgtacacacacagggcaggcttgtcagggcccaggtttcttttctgtgccctgcctctcctggagttggctttgtgctgtgaccagcaagtggagcaacagtggacttcccagtttacatccagtggggaagtgcaggggacctctcttcatttagatgctctgggcagacccacctttgtctctcactgtaccaccctgacctaggactgcctgcccatccctgaacctatttctggtgggagctgacccacgtctggtggtctgtggtggagtggcagatgggagacagtcactgtgtccccaactgtccctatgtggttgagcagcagattctctctcctgtcagactcctgttgcttctgtattctgcattttatttgtttttatttatttttttgagacagggtctcactctgtcactgaggttggagtgcagtagcggaatcatggctcactgcagcctccacctccagggctcaagcaatccttctacctcagcctacccgagtagctgggactacaggtgtgtgccaccatacctggctaatttatctattttttttttttttttttttagagtagagacagggtcttgctatgttgcccaggctgggttcaaactcctggtctcaagcaatctgcctgcctcaacctcccaaagtgctgggattacaggtgtaagccaccgtgctcagctgtgttctgcattttagttggtggcattaccaaccttcacttcctcccatcgacactttggggtcatttttaattcttctttcttcttcatccccttatttacttacatgttttgttctaactttgtttatgagatggttgttaaaggtctgttctgggctagcctgtagtaatccccaaggaggccagctgagttcctgttcacagagtctaggatttgagaatcaaacaatccccaggcagcgtgggcagggtaaagagaacattatacactgggtgctgtgctctctcatggttgttattggtggtggtggttgcaggggaccataaccctgcctcaaaagcagtcagggaaggtgtctgggagggggtcacatgtaagctgatgattcaaccttagccatgtctcttgttcttcctttttaaaaaaatattccctggtttctgatttggactcttaacacttcttcctataaaccagaagtcagcaaacgatggcccatgggccaaacctggcactggctgtttttgtaagtcaagttttattggcacacaggcacacccattcatttatgtgtggtctatggttgttttcaccactacaatggcagagttgagtagttgctacagaggccatatggctcacaaagcctgaaacattgactctctggccctttacagtaatagtttgctgatctctgcggcagaccattagaaaaaccgaattcctgcctgccgggaagtttcgtcttgcaaaaagagatatacgtaatatatagaaaattttataataaagccctttgaggtaaagacaattaagtgctgaatacaatatttaaatgctgacaaaaattattgttggggagattaatgtggatttatttttccctactttctctatttttctctgctctttctctattctgcaaatgaatcttcattcattttttttcgcctcaggatttttagactgacactttctagatttataacttctaagtttacacttttcatgacactcactttctgccctctgagagggggaggaaaggtatggatcagtttggaaaatgaagtctgggtgagatataaccccctcttttaaaaaaatacacctttgcacctttcctgtatttacaaggaaagtgggatttgtttaaataaagagaaaagtctttatctgcttcgaataaatagataggacgtgcattactaacctgtttgtttggtggggtcggcgggggacatctgcttaataatctgcccttttctggatgatgcttattccccaccccaccaagaggggactgatttgttgtttttctgatccccacacaatcatctgctcagtagggcagcttttgtgctattgggttgtttacacctctctgctcttttaaaacattttctagtttgaccttttcttttagactcatcctaacttttcttagacttactataaaaataatacatgtttagtgtaaaaaattaacagagtcaagtcatggtgtaaagagtcacatcaaatcccttccctgagtcatacttcctggaagagacttggttcatggtcatccctacagatctctgtgtagatattaggaggaaccataagcagatgcagatagtcatttgatcataaagatgtcaatttcaaacacatagtggtacatacatcttggcattttttaaaaacacagatgggatcatactgttcaggctatattgcaatttttgtattaagttgacgagaatcttggaaatcttgccgtatcagttcatttagagctatgcttctctttgctagtttgtgtggagatacacctatggcttaattaaccagttccctgattgaaggacgtttaggataattctggtttttcactattctgactaatgtagcagtggacattatgcatatatctttgtacatttcatgtgagttatctggagtataacttcctgaaagtggaattggtgttttcttgactcttttacttttaacacttttttttttttttttttttttgagacggagtctcattctgtcactcaggctgaagtgcagtggcgtgatcttggctcactgcagcctcaacttcccaagctcaggtaatccacctcagcctcccaggtaactgggattacaggcgtgtgtcactacgcctggctaattttgttttgttttgttttgttttttgtggagatggggttttgccatgttgcc

SEQ ID NO: 12432 - DNA, 6000 bp, Homo sapiens
gacacattgggaacttggacaatgtatgagatttgctgggcttgaaaacagtaaataattttttccttcctaattggttaagtccttagtggtttatcccacgtgactgaacttaagtagttgcacatttcaactgttaaaaaaaacacagagttagtgtacttgctgataggctataagctaacagcatgacagtaagttctctttattttcttaagaccagttcaacatctgaaatgtgttccccacatctcttccacaccttctacctccagctatgacactttccacttccctgatgaacttcccagtttcttccatttgaccttgacctctcacattactgacctgtttctgtggcctcagtggttcaagcttggagatgatctcatcctttatttcagggttcagagagagacaacttcctgcctttccctggctatacaactcatatacccaattttcatggagctcctgtactatatgactctagttgtagcctttgccccataaggtcccaggacaggggtgatcatggtgatatggtgcctcagctagcctcgggtaaaggaggtggcttctggcctttgtgtgatgtgacagtgcagggccaacaaagccatcccttttaagagatcttaaatctccttgactagggacttgaattttcttcacagttcaatccatttctcaaatctgggtctattttaacttttgtttctgccacacacacacacacatacacacacacatacacacgcacacatatatattcacatatatgatacatacataagatacatacataaatcttaactgtcacttcccaccccaactaccacccacttccagtcagataccttttggggggtaggttttcattcaatgtttgctaattttggaatctcccattctacttttcccatttttagggtaaatacaagtctatcatcttttttttttttttttttttgagacagagccttgctctgttgtccgggccagagtgcaatggtgcagtcttggctcactgccacctctgcctcccaagttcacgcgattctcctgcctcagcctccccagtagctgcgattacaggcatgcacgaccacgcccggctgatttttgtattttcagtagagacagggtttcgccctgttggccaggctggtctcgaactcctgacctcaggtgatgcacccgcctcatcatcccaaagtgctgggattacaggcatgagccactgcaccaggccaagtctactgtcttttatatgaaacttttggggccagctatgttgggcaattcatgatttttcagatattcgaagaatactatggtgcatacactgtgggatctctgcctacatatttcttcacactaaatggataaattgaaaccatagatagcctcacatcagtttgaaagatgttttcccactgttggggatcagaaagctctaatctgagaaatagatgcccctatattagctaatatgaaccctgtggttaaggaaacaaaatgacttatgggtctagggttcagggcctagctgacatggcaaatttccagattcctactgttctgaacttccaaacaataggagctatcagattcctactaattctaagttacaacccagaccactgcagctctgattggacatagtacggaccttataaacattcttttctcataagcaattacagaccttaagccagtttcagccagcttacagaggctgcatagaaactgtctttgtgtcatacagttcaacttttgatgtaaagagccaaattccacctcgttttagtgctaagaccctgccccaaagtgaacatgggatgttacatatatgtttacccattgtgcatgctttcttctcctctgataaatatgtattgcttttctcccaaacttgctgaatatatatgattatattttgtaatatggaccccgtgaggtataaaacccaacctgtccttcccctattcaaagagggagcaccttcggctcctgccagagaccttctcttcccagtttgaaaactaatatcgacaataaagctcttctttctagtatttagccatcctggtggtcttttggatgataaaacaaaacccccaaatatggtgctttgacatactgaactcaagaatcagcctcaaggactctctctgacttttccctgcctctctgtctctctgactctctttgcttcctgaagcaccaggaggaattccctctggaatttccttatataactaagaaaactcctttccaaaaaaatgcaattatcttaagaccccttcccttgaaatctcatcaaataaccaggaaagatcaaccacccagaagagactgggagttctcactatgtcaggactgacttttcatctattccttccagggcagttcagaaattacctgggaggctcaatctgcataacaagacaacctttgttcacagtgacattccgcccctcaccttactgccaccttccccagagctcagaaaaactttgtttcaggccatgttctttgggcccagtttcccctggcaatcatttactcctacacccctcatctctctttcagtgaagaagggtatataagcatctggacctcattgtgttattgggtaatcacactcctgtgatttttttccctgtgcacataaaataagttttacatgcattttttttctccaattaatctgccttttctcagttcatttccagtgaaccttcagcagttggagaggaagtgtccctgtgcccctgagtttgctacaaatatatgaaaagaaaaaaaatacttttgagagtttgttgtattttgaaattgaggattagggatggttgatgggcctatgttgtgcaaaattctataaattattaatagaggaatagagttttttaaggaaaatttggctttttgttaaaaattgtttacttttctagttttggagacagtatagagacaatttttttagatagtataaagaaggatggagtaactcaagcaagcagttgagaacaagccagaaaaaaattaagcaaaaatgtgggtggaggtgggggttggggtaggggtagaggggaaagaaagcctgcattgaagagaataaagaaaactattggctaattggaaaataaacttattaaagagaagatgatagaagttggaggcaaaataaagatttctttatatctttgagagcacactcaagacattttcttattacttttgaatacacattataaatctagataaaagaacagtcacacaatcctggtcacctcttaattgtcccggtttgtaaatttttcagtgttccctaattttttaaggagaatatgcacttaggcttctttctagttgagaagccaagaagccctttgggatttggaggttagtgagctctggatgctctaggcattctttgttaagggtcctgcaataattagcacggtaatgattgagaggtgggagaaaagttcccgaaattgtaaatataagaaaagcccgggcgtttattttacattaggtttgttctcatttgacactaactcgattgtttcttagcccaaaatgttgctgcagtcaacatgtgttcaacctatggaaagatgtggttggggaaaaataatttttatcaaccaaaagtatgaaatcttgcaacattgaggattgtgtttcatagaagagagaacatgtttcttgcattcttcagctcttaaccactgttttgggagtctcaccaagtttttgggatgactaaagatctagaaacatcgcccctcctcattaatgtattcaataaattatttattttatagaaaagatggagatgagtcaaagagctacaagagacagataacccaccaatcacatgctgaaccaggcaattacaaaatttcaatttcaatttcaagaggtgtttagtcctcacataagggagaaaatatggtgcatctacttaagaacaggacgatgtcctattgtgttgaatccttagcccttagatgctcaacaaatatttgtagactgcttagtttaccattcaggaaatatacacatcacttttcctattgcaggtcctgggctagatcttgctaaggacaaggacatcctaatacccaggaggggaattagatccagcttggcataatgcaaagcggaattaataaaggttttagccaacacccaaagggcagagcagtggagatggaaataagacttacttcatatttcgcaggagctctcatttcctttttagcgcctgcgttttcagagcaaatgcccttcataggggggcgcaaaagcaggtgagcccagagaacagaagcggcagcaggctagcggagaagtgagaaaacagggaaaaccgggggactcctgggcccgtctggttttgaaaagagggcaaaatgcatttagtcacttttctcctccgtcccgcaaatctctcaggatgtgaaattgtccggggaggggcgtgttacatcactgagagacagaggacctgtccttgctccaagaggcacagcttaggaaacctaggaatccacctctggcgccttctagaaaaccgcccactcctgctccctaagaaaaggaaacccacgtgactgggcgaaaggggagagcccggcgacctggagccagcgaggctgggggcccggcgagggccgggctgggcgcggggctgcttcaaggaactgccgcgcgctgcgaatcgggggcgcgggctggcactgggctccgcccgcgggccagaggcggggtaggggcgggacaggcgcgagcctccggcactgggaactggagccgaagccaccaagtgctggccctccgcccctccccgtacggcaccgcctcccgcagcccggggaggggccggggcggagcgagcccggccgagccgggaggagcgggcgcgggcgctggcagagcgcggcgcggggccggcggcgaaggtccggggtggaatcgacgtcgctgcggctgccgacgacccacacccggccggccgcctccgcagacccaccttggccgcgcggcagggggcgcgcagagccccgagggagcgagtccccgcgcgtggcagctcggcggcttctcccttcgggaggtccggctcccggctctccggacccgcctggcgtcctcgcctgcggcggggcggacgacagcggcgcccaggaatggcttcggcgggcagcggcatggaggaggtgcgcgtgtcggtgctgacccccttgaagctggtcgggctggtgtgcatcttcctggcgctgtgtctggacctgggggcggtgctgagcccggcctgggtcacagctgaccaccagtactacctgtcgttgtgggagtcctgccggaaacccgccagcttggacatctggcactgcgagtccacgctcagcagcggtgagggcctggcgcgccgcgacccctgcctcccgccccggactgccccgcgccccactgccaggacagtcaccgcctgtccccacgtccccgcatcctctgccctggcccgtcccaccccgtccaggcccttctcggatcctggggctcccgccacctccctggcatccacccctcttccctccccatccctggtcgccaaacctaaagcgacagcccacgccctctcccttccccgtggccattcctcctgttctggagtaacacgtacgctattttgggtatttgttatcatttgaggcgagagccatgtggctgtgtaaaaaaatgcgacgccttccacacccccgttaaaaaagaagcaggcaaaaacgccccaactccaccgagatgctgcgggggttcgctgttcggtcttccccactctttttccttcctctctcgaggacgaatttgcctagtgttcacatttctgccggttccactccaccttatctgcgttttcaccaatgtatttcggtttggattttatttccttacgtttttgatggatatgaagagttg

SEQ ID NO: 12433 - DNA, 6000 bp, Homo sapiens
cctaagtgccaaggatagttttatttaaatcagcgaagtaatacattttgtcatactttcagcccacccacatgtagacataacttagcttagcttttacatagataagacccctaaacaagaaaaacttaaaacaaagatgaggcattcctcttcttgatttctgaggacaccctaatctgtaactgagtagctttttataaactgtctcttctcactgtactctgcgacttccttttaactctttcctgctgaagatccaagaacccattcttggggatcccttttccggcaacagcttgagagggctgggagaatgaggaggcatgggaaaatgggaggggcataacggggctttgattcttagaaaatacctctcctgcagtacgtagatggctgccagggtctctttcaatgctgtctctgagtcgacaagctcaaggaagaaagttgggggcagggaggtgactcttgagaatccttttccttccttgtctcctggggctcactctgctctgactcaggggacaagactgttttgttgactacaacctcctcaacactgcacagagtggaaagatacctccctcctcctgccagactttgatgtctgtgttctcttcttctcacctctggtactttgcccagtactcaggaatgcttcagatgacaagacagacactgtctgcatgcacctgaggtgccttggagacttagcttataggcaaatagattgcactgtcgtaggttgtactgtgaagccactactggcaactcctactctgtatcggtgtgatttttttttttaagaaaacattttcaatgatctgtttaatttaaataagaaatatcattacatgcttacatatttaaacagtacaaaggattgtacagtaataaaaaattatttctcctactgacttccccataccctgatacagtatcatgccttccccataccacaaatggtagcaagatatgtgtattattttgcttgttatttcattaaacaaaatatgtgagactacctttcctactgatgcatatgcatcttgttcattctttttaatggccacatagtatttcgttacataggtatgcataattaataaaataattccccattaatggatatttacatttacaaaaatgtcaccaaccttttgttactatgagcaatgctgaataaaaccttataaacacttctttgcacagatgagcctgatgcagtggggagactacttggctttctagtgattcttagattcttcatgtgtgattggtttttgagatctaacataggacatcatatttatccttgctgtcttttaatgtttcaatacagcatgcctgcctagagagatgtttggaatctgtttcttgccctcctatcttcatgtcctttgccaaaaatatctttttctagttcataaatagtaacatcaagcaggataggaatggtgtcatagctctgtggcactccctgagtgacttctctttgttttcatcaactcattaacccttaagttatttgacagattatgaatctatttaactatctgattgtcttccaagatattgtgggattgggatgaattgacaacctcttcctctaccttacctctaccctcatctcttctatcagagagaaaactggaataaaaataataagaaaaataaaagtcccattggaattttctctatagggtagaaaagagagcaagagactttttttcctcattccaggctcttattttattttttcatgttcatattagttcttccaagggtttatatcgaatacttcaagcttgtcaaggaaaaataatggtttcccaatattatatctaattgtgttccctattactctaacccacgtgatttatataccttatacattttgacaacaatggcattccttttagtattcccactaggtaagaataccaccttgttctctcccctttatctttgttaggtaaaaatgaaagggttatttcgatttattgatacaagaggcaactgaacttggatctgtccttcaagatatccttgcacaatgaaaacaacaaatgttatttttctctgtaaacattatatagagatgtttcttcaagtcttttatttttgtttatttttttaatggacacattgtaaatgtacatatttatgggacccccatatctacaaaaaacacttagctggccatggtggcacatgcttgtagtcctagctactcaggaagctgaggcaggagaattgcttgagcacaggtgtttgaggctgcaatgagctatgatcatgccactgcactccagccaggaaacagcactccttctggataaacaaattcaaattcagaataagaccctgtcaaagaaaaaaaaaaaaaagaaagaaagaaaagaaaaagaaaaagaaaaaatcaagtcagtatttttttttttgagatggagtctagctctgttgcccagtctggagtgcagtggcacaacctctgcctcccaggttcaagtgattctcctgccttggcctcccgagtagctgggactacaggtgtgtgccaccactcccggctaatttttgtatttttagtagagatggggtttcactatattggccaggctggtctcaaactcttgacctcaagtgatccgcctaccttggcctcccaaagtgctgggattacaatcatgagccactgcaccaagcgtcaagtcagtattttgcgtgaccatcacctcatccatttctgatttctttctttgtggtgaggacattcaaaggccagagagcaagtcaacagtaagtgtggtgtttcttgtaatccagccagaatcagtggatagaagtgagctagaagttccttctcagcccagtaatagaatgtatactggttgtggtgaagacacattgcttcagaggtgacataggaaaggaaggctgctggccaggctatcctggacctggaatttggggtgcacattaacccttgtttacagacctaaagaagtagttctctattgggggcatttttcccctgggggacatttggcaatgtctggagacatttttttggctgccataactggggaaagggggattgctagtggtatctgttgcatagaggccatcgatgcatctctcaacgtgcaaggcagtccccctccccaagaaagaatcatctagccccaaatatcaatagtgcccaagttgagaaactcctggtctagaatttttatcctatactaaaacttataccgtggagcttagcggattggggagagacaaaaatatgcatctggtcaaactccaggtcacattcctaaagattctgattttattagtgtgaggtagagcctggatatggtattttcatgaagctccccaggtgacccacataaacaaggttgagaatgactccctggaaagtctggtctgatggaggccacagaatagactgacctcccccatttccttgcgactagggggttatttaagggttgttggttccctgaagaggtagcagcagtggagaaacccacaggagatggagcgaagtccccccaagtgctagagagggtaagatggacgttcaagtctggggcttttgtgagaattgggaaatggcactccttctggataaacaaattcagaacttctaggtgagtgcccccagggctcttagcctagctatcagaccagactactgtggcagagagaaagatgcccttctagtggatgtggcccctgccaagacgcaaagctccctgaacccaaaggcatttggattttggctcccacttgccccttcctctggatgcctttgtacagtgcccaaactgcacaacctaatgcagcaactccaactaaaatttgccttagctaagatctttctgagacagcaaaggggcaacgtattgccttactgatttaacaagaactaaacaaccaaaacaacaaacaaacaaacaaaactatgagaggcttactcaaatgcctcaaagaaaccagatccgtcctgcgggcagcctagaaaccctgtcctgatgccaggatccagcgatgccaagccacagggaagaggctccagtctggtcgtggtatctttggggtggttgagaacaacccaggaaatgaggaaatctggctgcaggaacctacagctggatccccatggctgtgggtgagacagagaactttctgtgccttgtgctctcccatcagctgatcctggaaggagaacctcaagccccatcctaaaccgcagcagagcaggcacgcacccggtccagtccttgatttattcctttgcaaaagagaaacaaactaacaaaaaatctgtagtatggactttgacgtcggcagaactacacacctaagttccagtccctgctctgccagtaacgggggtgaatctgggcaagtttctaagcgtcggtgtcttattggagaaagtggacatggtaatagcgaacttggggcatggtcgtgaggatcaaaacagagaacatggccatagtatccggccgcagtgggccactctgaatcccctcggttgccccttctgtttccgtgtgactcacgcagctttctgcacagatggtatccttctagacgtctgggatgttcgaggcggttgtattgaataccgtgtgtgtattccgggtgagggggcgcgcaaattggggcaaagaaagctacttcaggatatttcgctctgctggggcttgtctccagcgctctctggccagaaaaagcgctggcacaaaaggaggaggtgggtgggtcagagccccgaaccgcgcagtgttccagggggggcggagaaaggagggcaggccccaggcaggaaggagggagggaaagaggcgagaggaggagttttccagcccggccttcgcccgcccgctagcacgcagtcccttggtctcttcggtctcctgccgcccccgggaagcgcgctgcgctgccgaggcgagctaagcgcccgctcgccatggggagccccgcacatcggcccgcgctgctgctgctgctgccgcctctgctgctgctgctgctgctgcgcgtcccgcccagccgcagcttcccaggtaggatcggaggcgtggctgcctcctcagctgggcaccaaagacccccggagtcgccgttgggacccttcgctcgggatagagggaggtgccgggggcgccctttgtttgcgcagaactcctctttcgcagcccgagggtggggatgatgcggatcggggctggtgtctgggcacgcgccgggaagaactgaccatcccatctccaggcgcggggcgccctcgcggcgacgggagccctagcaccttctgcgtccgggcttccagagttccaatcaaacccttttcggtgtaggaggctccacagagaaagtttggccgcagactagtttgctactttctcacccccagaattttgcctctcacatggttgcccactggaggctggcagcttgtcctggaaggagcctctatgccctcccactacacgtcccaggctacccccttggggccgcaggacacgagccacggtaaagcgacttttgtggaaggcacgggcggggcctcccctgaatctcttaaccccccctgctggggattccgagaaagtctgcgcctctgaggaagaattgccagctgagagtggtgacatgtggcatgcacttgattagccccagggaaagagggctactcgcgcaaggatctgctgggcagagggtgcggcttattcctggagggcgtggtctccggcatctaagggggccctggtgtttcttgggggctctcatggtgtgagcaaaattctctttggagatgcactttaaaaagctccagctaacttcctcaccctggagtcttaggttagcgaagagcttcaggggagtagggcaatgtgccatgcactcctgttgcctcggaatggagaggaaatccatggatgcgttttaatttagtgttaatgggaa

SEQ ID NO: 12434 - DNA, 6000 bp, Homo sapiens
attgattctgcatcagtgagcttacactatgaagttagaattatataaagaagaaaaattcattcaaaataactctgttcaacaaccaataattagtattcggcccctaatatttatttttaatttcctttttactaaaagaattggtgaaaatccttgacccaatgttcttaagaaatgtttgttctgattttcacttcttcttgatcagaatttttgctatttgaccttcctctgtgtgccatacagttcttttcatgtcatctgttctgatacatcattccttgtttaaggccccatgtatgagttatgaagtattcttttttattttttaagttattattttcttttagagatgaggtctcactatattgcccaggcttgtctcaaactcctgagctccagcaatctgcccacatcagcctcccaaagtgctaggattacaggcataagccaccataccctgccaagttgtagaaatattcttagtcttgacatcactcattgttaaaaaaaattcactttgggtgcagattgcttagcacttataatgcaaataaggtcttgtttttcttcaacatgctctacagcatgtttggggatgacctctatctttccgaagacctgtgacttcgtgtctctgcctgactttgtatgttctggggccaacccctctgtaatgtgcccctatgtttcctgtcctgctcatactatgacaatggaaccataaggaaaaaggccatattctggttctttggaaagtaaaagttatttttctttctgtctcaatcttgtctctataagccaggtcagcaccttcacatggctgtcggtctattgaggtgagttgtgaatgcccacctgtcatttgacttgttccttgccaactttactttgatcaaatacctgaccaatccctggctctggggtaggtctttcctttggcatcttaaaccagcctgtggacttttgaggtgggcctagattctgtagcccattttcctgtgaaaggccttgacttggattgaagctgggctcctccaacttctgtgttgcctgaggatgtgtgatcccccctaaacaagtccttgggtccaaaagcaaggtcttgccccattgaagggtcccctaccaccttctcattgacctcaagggaaagatttggatgctttcagattaggatccaagctgatgatgaacactgcactgggcagaaccaggagccctataacacttccaattcaacattattaaaaagctatcctggctgtaacggctgaccctttcatcactttatccctctatatgtttttaaaaagattaacagagtcattggggaaaaaatggaaagctctgaagaatctaattttaaaacaaatcttctatcccctgtcaagcttcctgcattaaaaaaaaaagcgaaatgtacaacttagataatatctggttaactctgttctgcacagcctacttctttattgaaaccgcctgtggcatcatgagacattcgctgaaatatccgttaatgaaaagctggacagtaagaaagaagtaataagaacattttatctctttgggaatcttctaataaaaaaatgaaaggaaagtaagttcattttaattgatgaaagggacatagatttcatcaagttgaaaaggcacacaaacactgctaggggcaaactgcactcctctgcgccttttggttagagctgttgagtactgctccattggaacgtgaattaggtttattgtaatggtctgtttccatatttagttttcccagaattcacattgcttcttgtttataatggcatatacctaatgatgagcacaatgtctgacacacagttgttgctaaataaattattcttgaatggatgaataaaagataatgtattatcccttccagcaggaattgattatctagttgggaggggaagacagaaacatacacaaaaataagtgatgattcctatcattgtatttattgttaatcgtctactgttatcatcgtattcttcactattaattttgtggtatttgtgataagtcataaaggtagccaaagatgttctttctaccttagcctgtgtatgtttcttccattattccagcctcaggcttgcctctcaatttagcacttgctgatcagcctgcctggagtgctcatcttcctcagtagctaattaactcctattcatcctccaagccccagtagaaatgtcatttcctcctggaggtcctctgtggttgcctgggctgggttatctagctctgctttatgttccagggcaatattcagaattatgcttgtgatcactcttcctgtatgtcttccctgacagagcatgagccccatgaaggcagggacagactccatccttttcatctctttcccagggctcagcatagcaggtgtttaataaatgctggtataatgaatggacactttcttacaaagagcaccttggaataggtaaggggctctagagcatggaactggttctcaaaatgatggggaggcagaggcctggaatagacaatgtgatcaaagtgtgtggtccatggaccagcagcactgacatcacctggagcttgttagaaatgtgtcttctcagaccccacccaaaatctgggtgatttgtatgcacgttcaagtttgaaaagtcctgcttttcatttggccacacaatgcagatggagaagacagacctcagaaatcatcccacctaagagactgagggtcctgaatggatccagatgattgcctgtatgtggggacaacaggtggctgctgtttttcctatgaccaagtcctaggttctaattcaatccccacccccatcccttttaaaaatatacctcatggagcacaaggtaactgattacctttgtttggggaaaatgctgtttgctaatgaattttctccagataccatggaaccgtgtggatcctctcctgccctcattgccagttggacatagagaagggtttatcagtctgccttttattcaaagtcttagatccccaggctcctggctgacttgcactgttggaactaagcaaaagagattccaagaagatcccacaaggatctcgtgttagtccattttgtgctgctagtacagaatacctaaggggggtaatttacattgaagagaaatttattgtatcatggttctagagtctgcaaattccaagatgagatgttggcatctggcaaaggccttcccaatatgtcatcccatggcagaagggcaatgagggttagaaggagcaagaggtcaaatttgctgtctcaggccctttttatagtggcattaatccattcatgaggatggagcccttggaacctaaacatgccccaacattgttgcattgaggattgaatttccaacacgtgaactttgggggacacattcaaaccgtagcagatcctctccattcatcctacctcacctggcacgtaattcacttgcaggctaggtggggagacaagagtatccacagccaagaagcccacagcttcagggacctgtgaacagaagtggaccagataggggatggcaaggaggaggtcagcacaaactgtctgcagggtgaggtagcttcattctctgcagtggggacatgaggtagggatcggggttcaggcacagggtctgactgttttataccaaagcaggacagatggaagtcagaggtggacaaagacttttcctgtcacctgtgactcagtcacagaagtgcccaaattgtcttctggtctgaggacagcagaagctcaggatacctttctagcaggtagatacagggaatggtgtgggatgaggcagaggtttgcttcaggttctcatcaaattccccagatctgaagccagcccctctcaggcctgaacagaagcacttcacctgtttatttcttgaaaagccattctatgttgctgcttcccacttttagttctcagaggtggctttcctactgtccagaagacataaacttctgttttccctggagtcaccttagcttaaactcctataatcttgttgaatcatccctgtgtttggctaaaccaggctcctcatacccacgttccagggtcacacaggtaacttggcttgctgcttctgggggctctgaatcccacaatgccgatccaccacctcttccctgctgccactagtctcctggggtctagcctcaacagcttccaccaaggacacactgcattgcttaagagtgtatttaaggtgcggcatttgtgatgctagggaggagccttcctgacttaatcacgtagggggagtggggaaagaagtgggtatttggaaggagggtgaggtgggctgggaatgccaagaaatggtagtactgtgtggtgaatcaaagtgggtcttggaatcttcctagcttttcttttcttttcttttctttttttttctttctgactttttatcttatgttgtcactcaccatgttttgttttcctcatctgcaaaatggattgttgtaagcttgaacaggaatcatgcataaagtactgagcacagtgcctggtaccttgaaatcactcaatggaagtttcttattatttgccctacacccaaggagtaattggggccctgaaggaagacaccccaatttgccgtcctcccagccgccaagcctgatagtgcactagggaggctgatgggaaaataccgtgcagaaggctgaggagtggggattctggggcgggactctttgaagtcctaggtgacctctccgcccaggcacccgccctccccgggcctgggctgcagagctgcgggcgggggcggtggccctgcgctgcacccggcctgcctgcgcgtaggcgggcgggcggggctgcgcgtccgggctcccggggctggtaatatagcggctcgccgaggcgctggtgcacgggggcagcgcgcagcaggccggcgggcaggcgggcgggctggctggcacgcaggactgggatcgaggcccagaaaacggagcagcgggcaccagggaggcctggaacggggcgagcgccatgagcaacaaatgcgacgtggtcgtggtggggggcggcatctcaggttagtcgcggctgtgcgccctccttcctcttcacgcgctcggacaggtggctgcctgggggagacgcggggggcggccgtggggcaggggctgaccctggagtccccagactgtccacgcacgggcagggctctagtgggtccagagcgccgtgcactgaaccctcctttgggggcaattttgggtgcgttcccggacgcagaggccagaggctggaagcctgttgcagctctggggccagactttgaacttctcccccagaaggctgctaggccttcgcttgctggaattttcgaagccagggaaaaggggtggggaggtggcacaaaggtcagtcatttgctccaacttgacctggacactccgcaccctcgcttagagcaagcatgcaccacatcgtattgttgtcctggcgtcaggaaaacgaccttgaacagaagaggttggagcctggccaatcgattgccaaagactttccaggccctcctgattctttgaggttctgtgattgtcacggatctaacttgaggctgcagtgtctttttggcaaatgcctgttttcctcttatgcctctcgcacccccactccaccccaccccactcctagcgcagggtggccaagctgcagctttgctctctggcctagcccatatttggcaaggatggggacagacactaccccctcagccacacggggctgtgtacataccaagggcaccgaaaaatagaagccagaagaagggatgggggtagtggtggaacttaccctctgtggaggatcaggcagatcctatgggatagggtcaatgggaatcaatgatgctctcagcacagcctgtttaatggccccctgggcatgctttggcccacctcctaacgctgcctagtacttgagcagtaa

SEQ ID NO: 12435 - DNA, 6000 bp, Homo sapiens
agcacattaaaaatgctgtgcatgtctttatgaccttcttggtttctgatgagaaatccgtagtcatctgaattgttgttaccctgtatgtaatatttcatttttatctttctgctttaaacatatttttttgtttttcttttcagcagtttgaatataatgtgtctgtgctttgattctttgggcttatcctgcttgggttttgctgaggttcttcaatctgcaggcttgtgtcttttgctttatctggaatgttttcagttattatattttcacatctttttttctgtaccacactgtttctcttctccttctgtaactctaaagacacaaatgttagatattttattatctcctataggtctttgtggctctatttatttttcagtttttcctctctgctattcaggttggataatttctattgatctattttcatatttactgactctttcatctctattctgctattgcatccatccaattttaaaattccagctattgtattcttcacttataaaatttttttttttttttttgagatggagtgtcactctgtcacccaggctggagcgcagtggtgcgatctcagttcactgcaaactccacctcccaggttcaagttattctcctgcctcagcctcccagtagctgggattacaggcacatgccaccatgcccagtgaatttctgtatttttagtagagatggggtttcaccatgttggccaggctggtctggaactcctgaccttgtgatctacccgctttggcttcccaaagtgctgggattacaggtgtgagccactgtgcccagcctaaaatttcaatttggttcttcttttatcttttactcctgtgctgagccttttatccttacattcatttcaagattatttgtccttacttgttggagcatcattataatagctgctttaaagtctttttcagataattccaacattggtgtcacctcagcagtggtgtctgttgtttgccttttcccacccaagttaagattttcatggttcttcaggtattgaataattttgggttgtatcctggacattttgaatattatgttataggactttgtatcttgttttaatactatggggaaatattcatatttttgttttagtttgtaatagacatgcttgggtttagatcacaagttctgacatgccttttgtggatagtggctccaaagtcaattcagttttcaaaagtttgtaatgctattcagatctgtcctacatgtgttttatccagtggctagtctagggcttgggtggtggtctgcctcttagttcagttatcacagtctttggtatgctgtttaggatcagatccatgtgcaggttggggtgaacctaggagttcataaaaactttatgaggacctttcccaaggtcctctcctctctactgtctccttggtactttgtaatgccttggagttccccttttaatcaattggcaagaaatctagactatttaatttatttaaagacagggtctcgctctgtcgcccaggctggagtacagtggtgtgatcatagctcactgtagcctcgaactcctgagctcaagtgagcctcccaccttagcctcttgagtagccaagactacaggcaagcactacagtgcccagctaattttatttttaaatgtttcatagagacagggtcttgctacattgcccaggctgttctccaactcctggcctcaacaaatccactcacctcagcctcccaaaatgttgggattacaggggtgagccactgtgcctgtccagaaatctgggtctttatttaatcctctctgttatgtatttcctgaaactttgcccatgtcttgggccaagcatcaggacagagagagtgaaaaaatatatatcattgaggttttggccccactgtcttgggaccagagctacttcaaacagagaggaaggttctcccctcccttagcattttttgggtgcttgaaggtattgctgtctccattgtcactgttgactgaggtgccacagtgggattgcttattggctaaaatgtaagagaatggagaaaagaaaaaaaatggcacatttctcctactttctctgaatattaggagaccaattttctgcttttcctggagctctctctgtccatgttgatgctcccttccgggtgttaagctgccttgagtccagtctagtggagactggaggaaaaaaatggtaaactcaccgccagttcagttttacttcaaattctgttgtttttcctcagtttatgtggtacaatttactttccagagtcctcaaatagttgctgcatgcattctgttcacattttatagctgtattcagtagcaggtaatgggtttagtgtgattattctgtgttaactgaaatcagaactcctgtattatataggttagttttcacacataaatatgtagagataatggagtgttttctttggtgtgtatttgtgaatggttgggactagtcttttcatactctacccaagggaactactttacataataaatactcttctggttatctattgctgtggaagaaaccaccctcaaacttagtagcttaaaataacaccaatcattttattatgctacagttgcagatgttggttaggttcagcgacatggttcttgcttggggcctctcatatgtctacagtaagatggtggctgggaatgaattgatttgaagactcattcattcacatgtgtggcatttgggctgggaacactcaaaaagttgggtctcctgtggcatctacctctattgctacatggtctctctacatggtttcttcagtatgtcagcttccaggtagctagatttctttgtctgtttgtttgtttttttgtttttggaggcagggtctcactctgtcactcaggctggagtgcagtggtgcaatcttggctcactgcaacctctgcctcccaggttcaagtgattctcgtgccaccacctcccaagtagctgggattacaggcacacaccaccacacccggctaatttttgtatttttagtggagacagggttttgccatgttggtcaggctggtcttgaactcctgacctcaggtgatccgcccgccttggcctcccaaagtgctgggattacaggcgtgagccaccgtgcccagcctagctagagtggaaagtgacagaatgaaacaggcaggagctagattaccttttatgacctagcctcacaaatcacataatctccattaccacattatattctttgagggagtcacaaaggtccactgaggttcaaggggagggaacatagatgccccttcttgatgggggatggtaaggttctgggattggaaatatgattgtggccatctttttaaaaaatacaatccgccacaaatactaagaagtctgtacttttaaggtagctcctgagttgcccttttctaaagagagaaattctgtccttgagtactgggcacccaaaggggcataatattatgaccaacacagtgcccatccaggttttaagtatttgcaattttattggaaacctgtgtggaacttcaaggtatacggatgtttgcaggggctgagtgactgcctagaggagttgggaaaggggctagctaaaatgtagatgaagagatttccctgctttaaagaaaccactaaacagctttggcagagtgctcacctacaggggaaccaggaaggctgcagtactccaaagagttttcttacctaatgctacctctaccctattatttcatttggttaagcatcaccttcttcaatgaatcctcttaaaaatgcaaactcccctgggagcgaaaacatgggcagttttggtagagatttcagagtggttcaataaacacatgagtacagtgctaagcactgggaactcagtgattaatctgatcttgtttcttccttgaccagaggagcaaggtggattgaagattctagttttcctgagaatttgttccaagaggcttcatccttcagagtccacgccataattttgttcagagctgggtttggtcttaagagtcattaaaagactctctgagctaccaggtgagcaacataaaagaaagggtcatcagggtaacccccaccccccaccaccaccttaggaccagctactgctcatctaccaggaatggcaagcgttcagttccttctggttcaaccctattccccaaggggattagtagcacagcgcagacgaagtctattccctcaagtgaggaaggagatacttcaatgccctcccccgattccaactccttatcagtcctcacatttgagtctgatgagaacagaggtttgaatgaaacctagcagattctggggctggaagggcaacctgagagatgaggaaagagaggtgtaggggctaacgtggcttcggggctgctcggttcactgacagcccccactttactgggcccagggcggctgcacactggcctgagattaaacacttcgccgtggcgccagagacgggactcgagaccgcaaggctagtcactccaagccgatgctcccgctaggcgccggcgacctctggcgtcccctttcggaagtgcggcggcggctgcccatgaactggccccacgaccccagactgcctgggcaggtgcgccaggacggggtgagaagcgcagagaggcaagcagccggcggccggcccgcagacccgagggcaacacccggccccgcctgggtggctcggttggcccgcggggcggtgcggcgtggcgcggccgggggacgaacaggtgcgcgggcggggggcggtgcttggggatcctgcgcactgcgcgcgcccctcccccgcgcggccccgggcgcagccccggcccggcgcgagtaggaggaggagctgcagcggccacggccactccggcaggtccgcggtgctgccagaacccgccgacggcgcgggctgctggtccccgctcggaggaggcgcggggggccccgggaccatggagcctggtgacgcggcgcgccctggctcgggtcgggctaccggggcgccgccgccgcggctgctgctgctgccgctgctgctgggttgggggctgcgagtcgcggccgcggcctcggcctcctcctctggggcggcggcggaggacagcagcgccatggaggagctcgctactgagaaggaggcggaggagagccaccggcaagacagcgtgagcctgctcaccttcatcctgctgctcacgctcaccatcctcaccatctggctcttcaagcaccgccgggtgcgctttctgcacgagaccgggctggccatgatctatggtgagcacccctgttacaccccccgccctccacacccctcggccgccgcgctcctcctggcgccgcgcggtgctcccccttcacttgccaacgtgttccgtttcttttacgtttcccgctgcgacggtgttggttcccaaggtcaactgtctgcattttctggctctctgctaccgttaaaaacaattccacccctattccacgtttctgcattgggaacccaggaaaatgaaagggacagaggtggtccggttccgtctgccccgttcggtctctgttgcaaacctcttacccaccacctcccgctccagttgagctcgatagggtgtgtgtgcctgcgtggtggctggaggtgggtggcttcccaggtgactgcatcacctcaggggacaggccacagtagggagtggggacgaagtctgaaagtgtctttgcttgggtatgggttagtggggcctcttggacgccacatccatggtcagcctgggtgggtacccactcctgaggtccacattcccaggtctcttaatgataaagtcagagcatgaagtgtggtgaaaggtgagcagtggtccaggacccagagtgggtggcaccaccatgtcaggcctggacgaggagacaggcacgcctcctgctcttatgtcccgagtggaaagttataccc

SEQ ID NO: 12436 - DNA, 6000 bp, Homo sapiens
gttcgagaccagcctgaccagcatggagaaaccccatctctactaaaaatacaaaattagccaggcgtggtggcacatgcctgaaatcccagctatgtgggaggctaaggcaggagaatcgcttgaaaccgggaggcagaggttgtggtcagccaagactgcgccattgcactccagcctgggcaacaagagtgaaactctttctcaaaacaaagaaacaaaacaaaacaaaacaaacaaacaaaaaaaaacagcactgttggccagttacagcggctcatgcctttaatcccagcactttgggaggccaagggaggagaattgcctgagcccaggagtttgagaccagcctgggcaacatagagacaccctgtctcaaaacaaaaaacaaaaaacaaaaaaaacctcccactctgagtaatacaaagttcaggaaacaaaacgaagactgtggcaccatgccatgtgtgtcaactgaaaacacagtcactcaaaacaacacttcatattttcattttctatgaaaatgtatctatatgatacatttatgtatgtatttatatgatacatgtatctatatgatacatttatatgaaaatgatctatatgataaatctatgatacattttctatgatatgtatcatagaaggatacattttctatgatatgtatcatagaaggatacattttctatgatatgtatcatagaaggatacattttctatgatatgtatcatagaaggatacattttctatgatatgtatcatagaaggatacattttctatgatatgtatcatagaaggatacattttctatgatatgtatcatagaaggatacattttctatgatatgtatcatagaaggatacattttctatgatatgtatcatagaaggatacattttctatgatatgtatcatagaaggatacattttctatgatatgtatcatagaaggatacattttctatgatatgtatcatagaaggatacatatcaaacacgacagagcagctgcccacagaggtgggaattgggaataaaaatgaaaaaataaacatgacaagaggaagccttttgctgacctatgacagaaacctaccttgaactggaaagtatgatgaactcaaacctctgcacttgagggcttttaaaagtcaatggttttacttggtaataaagtttgaacaaagtatgtatgtcagctactcaaattcagaaatggccacagagcacttctagtgaataccgtccaaaatcaaatgtctttcaaaaaacatttctaatgaaagccaagactgaataacactaggtgatgaccttatctcaaatttgggctcacttttcagaaaacaaaatattacaattctacatttttaaaaggagtggtggtagaagaaacacttcgtaaaacattttaaaaattattttctctttttataaagctattgactcttgagtcttaatagaggctttctgagagagttaggtctgcttttctaggcaatcttcaagtgtcatggctgggtcacctgcctcggaatcacctggatggcgagggatcactgaattttactcaggatttctgtattttacccagtgttccagctattccttgttcatagcagagctgaagaaataactgtctgagagtatccattcccagcaagtatcatgccaactgtagcccatactgtccctggagtcttccactatctgacctggcttgtcccctagtggtcccgggcaaatcctgactctgatggtgccattcccacccatccctcataccccaggctatagccccaacctcaacctcccacccgttaactgcatagcgtccctgtgacaccctgagtactgagaaggatgcaatctcatgtctcattcatcactgcactatcagagcctagcacaggtcctggctcacaacaggtgccaaacacctgtctgctgaaaagaaacccatcatctgctatgctgtttcctctacccagaagccccatcctagcaccttcttggatcaattctcacatagacgcaagcctaggctgtctgggaagctgagaacagataactcaccgtctttcatactccatgtcctgatagggccttcgggggctgctggggcccctcctcagccgctggctccgtttcacttcccagccacccccgctgctgctaccatgatctgccagcctgggtgatgcttcctgcagggactctggggagagtggagggaagaaaggggtcaaaactgttgggactgagagggcctccttgagaaactcttattgtcaaggctctccgctgccccttagcccagggacattgtcttccagctcccagcactcctgtgcatcacagtatgaaggtagcccctacttggcctgctcctccctttccccgcaaacataaggctagagcccactgccctagaaaacagcaaggacttcagcagacagggggcatcttgcagagagacctggcggggccacccacagtgtgatcagggctttgccacctaagacaggtagacaaattcaagcctggggctgcatcccagggtgggggtaggggactctcagggctgaaagtcttgcctgagattcagcacatcagacaagacttcacaacaatgggggccccaggctccttccacaggccccaagggaccatctcatcctcccaacaagctgctggctgtcccctataaggcagcaaaagaccatgaaaggctcttgggggggtgtgtgaaggggcgaacttggcgacgagacagctgccacctccctgggctcctggccaacacagccttggccctcacacagcaactggctcagccctgagccctgtctcttatgtgcagcccggtcctaaggtggttccctccccagggctcaagcccggtttccagaggcaaaaggggcccttttggaggctgttctgaaccactgtgctcttctattgggatggagcagcagccacttcatccaaccctcagggctgtggtgagaactcagggagtcctgagaaccctgtgacccagccagaggtcaggatgaatcccagatcttcaggccccaccctctgaataagaagcaggtaaagccaggcaataatagcacctgctcaacactaggttgctgccacacctttgctctatgctcgtgcacacacatacacagacaaacacactccaattttctcttcctcctcaagccacagggaacccgagttacctgctcccaggtgggcaagagttagaatcacacagaggcactggcgtctgagagcacaaaaaccttcaagagactctggcaaaggggccagagtcacacagtaacatccaccacagccaagggccagtcacagacacgagccccaaataactacgggcccacatcacagaaggaacacacagtaaggaccacaattacacagtgggtcccctttccatggatgagcgtcagtgtcacagatacaaactccccaaaagaaggggcaatgagtcacacacacattccctgcatgccccttcccacccaataagtgggttagggtcaatcaaaagacagtcgtcccccaagccccgccccatggataaggatcagagtcacagaccgccccccctcaaagggtaaagaccagagtcacatcccccctccgatcccccaggaatagagaccagaaccacagaatatttccccatggaccgataaacaccagagtaacacagagcagcatcccctctcctatgcacaaactcaaagtcgcagacaaccgcttccccactgataaacttcgatgtagccgacacagtgatccacagtagcccactcccatccgtccctcccttcccccaacccgcatgcacccatcccatgtcccagtcgcgcacgcgcctttgctcacaccaaaaaaaaaaaaaaaaaaaaaaaaaaccaaaaaaaaaaaaaccctcccgggttgagacattgcaccaacccctccgttccgcgcatctcccccgacccgaagtccgccctcgcgcctcctctacgtccccgccccgggccccttacctccgcccccacgaccagcgtcgacgctcaccttctcggcccgggctgtcaaggaagggctcccagacatcacctctgcccgccgccacctcctccaactctcccagctcagccggagccggagcgcgcaacaaccaagtccgagactggaggcagatcggggggaggggagaagcgccaagcgcgctgccctcccagggaaactcactgccgcctactcccagccggccacagtcaccagctcaaaatggcgacgacgagaagggagtcggcgctccgaccaccatccacctactaaggaagcgcgctctggccggccccggcgattggtcaccgcccgctaggggacagccctggcctcctctgattggcaagcgctggccacctccccacaccccttgcgaacgctcccctagtggagaaaaggagtagctattagccaattcggcagggcccgctttttagaagcttgatttcctttgaagatgaaagactagcggaagctctgcctctttccccagtgggcgagggaactcggggcgattggctgggaactgtatccacccaaatgtcaccgatttcttcctatgcaggaaatgagcagacccatcaataagaaatttctcagcctggccgaaaatggttggccccacgaagccacgacaactggaggcaaagagggttgctcaacgccccgcctcattggaaaaccaaatcagatctgggacctatatagcgtggcggaggcggggcgatgattgtcgcgctcgcacccactgcagctgcgcacagtcgcatttctttccccgcccctgagaccctgcagcaccatctgtcatggcggctgggctgtttggtttgagcgctcgccgtcttttggcggcagcggcgacgcgagggctcccggccgcccgcgtccgctgggaatctagcttctccaggactgtggtcgccccgtccgctgtggcgggaaagcggcccccagaaccgaccacaccgtggcaagaggacccagaacccgaggacgaaaacttgtatgagaaggtgagaggcgggggggggggggggggtagtggggacggaaccccgaaggggtcagtccgggatcggcagatggggcgctgtagaggacgttcttaggcagtagaggactgcgcggccggcgaaagcctagaagacttgggaattttgcctaccttgtgttcctcctttgtctctcggtatcttcgttccagggccagaggcaggattggttttattttgcagacagaaatcacacctcaagtggacagcgctcaaaacacgttagaagcagtatagtacaacgataatactaaacaccgatatggcacttgctcgttgccgtctgcattcttttttttttttttatagggacgagatctcgctatgttgcccaggctggtctcgaactcctggctcaagcgatcctctcgcctcggcctcccaaggtgctgggattacaggcatgagccaccgctccgggccccgtctgtgttctaaacacttgacatgcattagctcatcttatactcgaaacaaaccccatttcgaggtgggctctattattatactcatcctacagatgaggaaactgaggcacagagatgttaagtggattgccctagctcacataactgaatacatggtggaggtggaactggtatttgaatttagggctaccaggtctgctgtgctgtattaatagcagacgctgtgaaatcaggcagcactgacggttacccacccgtgtgatcttggtagcataaacccttggtgcctcagtttctttgtctgtaagatgggaacagtaataggacaccttctaaaaaataggacaccccacctgcctcatgtaattaaatgagtaaaaatggtcagaacagcagctggcacttcgtaagtatgtactcag

SEQ ID NO: 12437 - DNA, 6000 bp, Homo sapiens
tggggtctaactcttcatcctttcggcttactgctgtggaagtggcagggcaaagtcttcaatagaggcaccaggagcccctgatcactgagccccaccccacaagaagaaatgaagcccctggctgccatgtaccacagcaccctcctctagccccaggtccaggcatctttttgagggaaggcttcctcacgcagtgcaccctgcaccttgttggtctcaccgagccccattctgcccagcttacccttcttgctcttgggatagggagccagctcctcccggcgatggtggcgccgttctttgccctcttcccggtctgccttgtcatacccgcggtcccgatcccgttccctgtctcgctctctctctctgtctaccttgtcatagccacgctctcgatccctgtcagacttgtcgtggccccggtctgacttgtcgtggcccctgtctagtttctcatggctgcggtccgacttgtcatggcccctgtccgacttgtcatggctccggtccaacttttcttcagcatctggggacacaagtcttgaagtgacctcttgccaccccaggacccagcagcctctgccttcaacaacctcccttgcctgaggctgggcccgcctggtctcacctgcccctctgatccactatcattctacttggcctctccgtgagaactgctaagatcactcaaggcacgcttgtacctgccaactcacctgcattactgcttctgagcttcttggccgatttggtaaccacggagttggggtcatgtggggagagccaggatacaaggtctgtgtctgcattccagtagtaagggagcccgctgtggggccgcaggaaagaagtgtcagcacagatgtccttgccttggatcctcaactcttgtctccccagtctctgcctatacctgccccatgtcaggaccccacaggcaggatccccagaatctcttctcctgaagagaaaacactgtcagctgggcgtggtggctcatgcctgtaatcccagcactttgggaggccgaggcaggcggatcacctgaggtcaggagttcgggaccagcctgaccaatatgatgaaaccccatctctacaaaaaatacaaaaattagctgggtgtggtggtgtgcacctgtaatcccagctacctgggaggctgagacaggagaatcgcttgaacccacgaggcggaggttgccataagccgagatcacaccattgcactccagcccgggctacaagagtgaaactccgtttcaaaaaagagagaaaagacagtcttccaaccccagaggagccaggccccagcaggcagcaacttgagtcctgcagatacctaatgccaacaccctccacccgaggctccctcccttgtgtccccctaaacctcacaaccaaggtcagcacaggaagggtgaagccagaagttagctccccctcacccaggctcaccaggaagggtcgaacaccttgtaccagcttggtggtaggccctccaacctggtggcctcgtagtccacaggatcatcgtcatagtcctcggcaatgatctcttcctctggttctggtagaacaaggtggggatgaggagagcagataaggaccaggggacctcatcctacatgtagagcctagagacacgcactcacattcacacaagccacacataaaagacacgtgtgtgtgtgtgccgggaagaatatgaagtatctttcacattccaaatccaactctctatattaggaggtttacaaaaaaaggttacctaaatctgtgtctgggttcagatgatgagttctactgttagccaaagctatctggtttcagagttgatagggattcatcaaaaaatttactcatcttggccaggcgtgatggctcatgcctgtaatcccagcactttaggaggccaaagtgggtggatcacgaggtcaggagttcaagaccagcctggccaagatggtgaaaacccgtctgtgagactagcctggtcaacatagtgagacccctgtctctacaaaaaaaaaaaattagctgggcacagtggcacacgtctgtagtcccaactactcaggaggctgaggcaggaggctcatttgagcccaggactttgagcttgcagtgagctattatcgtgccactgcactccagcctgggcaacagagtgagaccctgtctctaaacaaataataaataatatatataccataggcacaggtcattcaataggcttaaaagaaaatccagcctggccaacatggtgaaaccccatctctactaaaaaatacaaaaattagccaggcacagtggagcacgcctgtggtcctagctactcgggaggctgaggcaggagaatcgcttgaacccgggaggcagaggttgcagtgggccaagactgcaccactgcactccagcctaggtgacagagcgagactctctcaaaaaaaaaaaaaaaaaaaaaaaaaaaaagtaaatcaatgatcattgccagttttatttttttgagatggagtctttctctgttgcccaggctggagtgcagtggcatgatctcggctcactgcaagctccgccttccgggttcacaccattctcctgcctcagcctcccgagtagctgggactacaggcatctggcaccacgcccggctaagttttttgtatttttattagagatggggtttcaccctgttagccagaatggtctcgatctcctgacctcgtgatccgtccacctccgcctcccaaagcgctgagattacaggcatgaggcaccctgcccggcctgggatcattgacaattttattaaccacaaggtctataccttgcacacagtaggcttgtaatagatgtcagttatcaataaggagaagatatattttccagtgcctggcacactatagccccaaatagatgccagtttttagtattactgataataaggtgtgatttgcagccagagcacagtaggcctaaatgatagatcctcactgcaactacgcttggcacacaggagacagcagtagaggttagcagtacttcctattagatactatgtcatcacccccatagagtaatccatgggatttaacttggcatacagtaggccccaaataggcattaggtggtcagtattattttgttgttttttttggatttttttcagacagggtctccatgtgtcggccaggctggagtgcagtggcacaatctcggctcactgcacccttgacatcctaggctcaagagatcctctcacctcagcctcccaagtagctgggactacaggcatgcaccacaacacacgattaatttttgtattttttgtaaagacggggttttgccatgttgctcaggctaatctcttaatccctaaactcaagcaatctacccgcctcagcctcctaaagtgctgggaatgccagcttgagccgccacgcccagccagtcagtattgttaagaatgaaatatctgccgggcacagtggcttatgcctgtaatcccaaccctttggaaagccaagggtggggggtggatcacctgaggtcaggagttagaggccagcctagccaacatggtgaaacccgtctctactaaaaatgcaaaaatcagccgggtgtggtatcacgtgcctgtaatcccagctacttgggaggctgagacaggaaaatcgcttgagcccgggaggcggaggttgcagtgagacgagatcacgccacagcactccagcctgggcgacagaccgagactctgtctcaaaaaaaaaaaaaaaaaaattgccaggtgtggtggggcggggcgtgcctgtagtcccaactactcgggaagttaaggcaggagaatcgcttgaacctggaaggcggaggttttagtgagccgagatcgcgccactgcactccagcctgggtgcacaataagactctgcctcaaaaaaaaaaaaaaaaaaaaaaaaaaaaaaaaagaatgaaatatctattcccccaaccccctccacttgacacgcggtagggatggatgtcaggaatccacattgttaacaacgaaaaatgcctgccaccccattgcttggtgcacagttggcccatgctaggtatcaagcgtcagtatcaacaacaaaagtgcctgtcgaggctggcacgtgttaggaccatctgcttttagctgtctcaccaggctccagatgtttgaggatgcctctcttggccaagcgggtctgcagcgcaacgggcagcggcatagctgatagcagacagacctagggacagacgaacaaactgacaagcagctcagataaagattcctatctggatcccgtaaccaagcgcctcccgtaaacatgtactcatctgactccgatctactcaaatgaaccagtagctgggtggacagaacatacgcactaaaagatgtaagaggtaggtggcaatatcatcgcaactcccaccaaccctactgtccccgaaaccaggtgctccagggccctgttcctctcccaggcccaggctccgcccacagcctaagaagcccggcccctccgcacttcagaaatgggctcatccagcgtccccatgactgccgggtgggagaaaccaaagcgctgggatgggggagcagagggcagcacttcctccagctccaaaagagtgcacccaccccaacgttaccaatacactcgtgcaggtagtggaaggctgtcacaccgcccgtctctctcgtgtcgccgctacgatacctgggcccacacgactctcttcccaaaacaccgaatgagaccttctctcaacgaggccttcactccccgagcctgaaagtaactggactacgctcaggaggcaatgaacaaatggcagaaactcgattggccaatgagagtgcgtccttggcgtgacatgcggtatagcgacccaatcgctgcccggtaataggcggaaagctccgacgccggtgtgcgtctacgctgggggcgtggcctgactgcgcggccagacgccagcgccatggaggagtacgctcgggagccctggtacggcaatgggcacaggcatccggaatattgctgcgacgccaaggccagccgtgggggtcgggcgggggaggcatcggccgcacagagccatgtaccagactcgggggactcttaacgtatctcccgctacccccactcggttcctgtcattcgggctccgttatgaggggccacaaccagagaaggtgcggcgaaggccgaaccacgccatgtttctcctgacttcgtaatctcctagccctgttaacgaaaaaagacacgctggacgatccatcccggctaggggtggtacggtgttgaccggaaatccccagagttgccgccagtggtttttcccaggtcgcctttgtcagtggggggcggggcacggatgaacctgttgagggccggcggggacggtggatgcttcccgcggtcgctcttggtttttcccagttgtgccggattgaaaaggggcggggcatggttggacgggctcaccgtcggagaaggggtgcgacgcggtcctgctttgctgacagtctgtcttggctagttaacacgcctatgtcgcttattgaaacgtcaactctgcgtgtgccaattcatttaatctttgatcacagtaaaaccgttggctgattccttggttggtagacagggcgaagactaatatttctccccctttgccccatttctcgctttaatgggggggtgtgtggaaaaagcgtgacagaactagctcattattatctgaagtgtttgttcctacttaggaacttcccattctggtgacttggtttctcccagttagaaaagagttcgtgtgacaggacctgggggagggctcacattaaccccgtccttcccttcctgcttgcagcccatggcgaattgtggatgattgcggtggagccttcactatgggtgtcatcggtggcggagtcttccaggccatcaagggtttccgcaatgcccctgtt

SEQ ID NO: 12438 - DNA, 6000 bp, Homo sapiens
cctagtgatctgcccgccttgggcctcccaaagtgctgggattacaggcgtgagccaccgcgcccagcctctaattttgtatttttagtagagacggggtttctccatgttggtcaggctggtctcgaactcccgacctcaggtgatctgcccgtctcggcctcccaaagtgctgggattacaggcgtgagccactgcgcagggccacatttaggctttttattggctggttctaggtgcttggtgatgctgacaaaacacatgataacactaagtccttttgtgctaggtcctttgtaataaatcactcagctgtttaacaaattaggtatattgaccacctactatatgacagacataattctagacactcagcaaagtattacataagtattgagagctcattttgtgctaggtccttttttactaattgttttcacctgtttaacaaatatttattcagccctactctgttagcagccactgttctagtgcttcatatacgtccgtgaacaaaacaaaccattacacaataagtgtttattgagtgctaactgcttgtcagagcccatgctattaagtgctgtcatctgtttaacatttattgatcacctgtgtaaggtactattctaatctgggatatgtcagggaacaaaacaaaacacataatggtggtgctgcttctgctgaaagccttcagttgataaccagatttttctttgtatttttgcttgtttgttttgagacagctggagtgcagtggtgtgatcttcactgcaacctctgccttcttggctcaagcgaccctcccacctgagcctcccaagtagctgggactacaggtgcatgccaccaagcctggctaatttttgtgtttgtgccattttgcccaggctgatcttgaactcttgggctcaagcaatccacccacatcagcctcccaaagtgctgggattgcagggatgagccactgtgcctggccgaacttctttcgtttattcaaatgtttattgatctacgacatgcgagatttgtgcaggctctttgctggtttcaccctctcaatcgctgtgtgagtttgtgtctttagggaaagtgaggcccaggaagggaagtgagttgcttagcgacacactgtcaggaaaaggggccctgagttgagcttaggtaaaaagcctcagagctgttgccctgacatctgtcttttttctctccctgcttcccaccccacctgtgcccccagtcagactcagtcacatgcccactcgaagtcgcactgctatggaaagtgggtgcaggtggtgggcaccctggcgtgatccgcctgcttgactggtttgagacacaggagggcttcatgctggtcctcgagcggcctttgcccgcccaggatctctttgactatatcacagagaagggcccactgggtgaaggcccaagccgctgcttctttggccaagtagtggcagccatccagcactgccattcccgtggagttgtccatcgtgacatcaaggatgagaacatcctgatagacctacgccgtggctgtgccaaactcattgattttggttctggtgccctgcttcatgatgaaccctacactgactttgatggtaaggcttctctaaatctccctggagggattgtttttacttgatggccttgtgacctttggcctccagtggtggggtgtcctgtaatccttgacccatactgcattatataagatgatcgattgctaatactggggattctcagccttgccctctgataaagtccatcttttaatggtgtgctaaccttattctgggctcctattctggtgaggggatcctgttaccatcctgagtattctttctctggtaaggggatcctgttacttttcagtgcttttattctgttgaggggactctgttattttagctgctttttatctagtgaggggactctgcttttatcttgagtgctcttaattgtggtgaggccatccttcctggagagtttggggttggagaagggcatcatgagattgagttggtctaacccctggcttgtgtgcagggacaagggtgtacagccccccagagtggatctctcgacaccagtaccatgcactcccggccactgtctggtcactgggcatcctcctctatgacatggtgtgtggggacattccctttgagagggaccaggagattctggaagctgagctccacttcccagcccatgtctccccaggtgaggcctcactgaccccagcccagaagactccatccttctcagggaccagtaccccctactgactgctaatcttccctctctgcttcttggcctacagactgctgtgccctaatccgccggtgcctggcccccaaaccttcttcccgaccctcactggaagagatcctgctggacccctggatgcaaacaccagccgaggatgtacccctcaacccctccaaaggaggccctgcccctttggcctggtccttgctaccctaagcctggcctggcctggcctggcccccaatggtcagaagagccatcccatggccatgtcacagggatagatggacatttgttgacttggttttacaggtcattaccagtcattaaagtccagtattactaaggtaagggattgaggatcaggggttagaagacataaaccaagtctgcccagttcccttcccaatcctacaaaggagccttcctcccagaacctgtggtccctgattctggagggggaacttcttgcttctcattttgctaaggaagtttattttggtgaagttgttcccattctgagccccgggactcttattctgatgatgtgtcaccccacattggcacctcctactaccaccacacaaacttagttcatatgctcttacttgggcaagggtgctttccttccaataccccagtagcttttattttagtaaagggaccctttcccctagcctagggtcccatattgggtcaagctgcttacctgcctcagcccaggattctttattctgggggaggtaatgccctgttgttaccccaaggcttcttttttttttttttttttttgggtgaggggaccctactctgttatcccaagtgctcttattctggtgagaagaaccttacttccataatttgggaaggaatggaagatggacaccaccggacaccaccagacactaggatgggatggatggttttttgggggatgggctaggggaaataaggcttgctgtttgttctcctggggcgctccctccaacttttgcagattcttgcaacctcctcctgagccgggattgtccaattactaaaatgtaaataatcacgtattgtggggaggggagttccaagtgtgccctcctctcttctcctgcctggattatttaaaaagccatgtgtggaaacccactatttaataaaagtaatagaatcagaagcggctggccatttgtaggtgtgaggcttttatggagcatctactgtgcactgagacagactgtccctctgctttgtcctcaggaagccacagtcttatgttgccatcctaaagagctttaaggattcttgaagctgcaccacacacacacaaaaaaatcttgattcccctgcccctgatcttatgcagtgcccagtatgtgcagaagggttctctgttggagatactgtgcatattgaaggtgtttagggcacatccccaatcaagatggctatctcagaagcagaaaaactaccttccctggcaccccaggggaatgaagaagccctttcccctgttgcagaagaaaagccctgtcagggtactggccagggcggggctggggttgggcgctgactggaatctgtccagggtgtagtcacctgttttgctctttatctttagcctcttcccccatctttacccttacatacccatccctctaatttctccttcaacacttgacttacctggcctaccctattccatgttggtttcacttgttccgacctgagttgttccctctcttgccctgcttatttgtctcggttcagtataaactccgccttccgggttccagcggttctcctgcctcagcctccagagtagctgggtacaggtgcataccactaagcccgggtaattttttttttttatttgagacggggttttgtcgttttgcccaggctggaactcctgagctcaggtgatcgcccggctcagcctcccaaagtgctgggattacaggcgtgagccaccgcctctggcccggactcttgccctgcttccaaatgctagctaacctgtgagcctttcgcctgtcccctttgccatcctcagtggtgactcacttgtcttcccttatgtgcgtcaactttcctttgcattttcacttgtttatcctcacctgctctgcttttatctgctagcttaacattcctgactcgcacctgatgccagtacgccctcaccccgaccccgccaggtcaaagtttcttcgtccccagattcccgtgtgctctccagggggcgaggcctcgctggaagacgggaaagcggaatttcagtccaaccatgaagcacctggtagtttctgatacggaaagggcggcgccttatggagaagctgccaataaagagccgagatgaaaggggtggctgaaccaatgagtctaggagacaagatcgggggatgatctggaaagcgcgatcagtgaagcggacgaacggcaggataaggcgggtctagtgacaggaatgggccgatgaagctctgtagggatggtgggtaggccgatcgggccgtgtccccggcctcccgatccgacggaatttggaaatcccggggctattcatacattgagcttttaggagcggaggagaaaagccaccaccctgacgatcccggctctcgctccaccttcactcaggtggcccggcagcggaagtgacgaacgcggaagtggtttttctgttgccgaggggacgggccgggcagatgccaacatggcagcggttggggctggtggttccaccgcggcgcccgggccaggggcggtttccgcgggtgcattggagccggggaccgccagtgcgggtgagacagtctgcccgagcagtcgcatgggaggcggaggtcgggatcgctgggagtcgggaatgttcctcactaaagtgagagggagcatcccgtgtggaccgacgtgtgtgtgtgtgtgtgtgtgcacattgtcagtgtgttgggggcggggaagagaacattctgagagtgattgtgggatccttccgcatatggagagtagagaccattgtgagtgtggtgggtaattctttttgggaaggctaaggccaccgaaaccattctgaatatgtggagtccttccgtgtggaagagaccattctgcgggtgtgggagttcctcactgaagaagggggagactattctgagggtggtggttccttccttataaagggacagagactattgtgagttagggtggggcgagtccttctttatgtgactagagagggtccattttgaggatgggggtgtctttcattatgtgcggaggagaccgttctgggggctccctcctaatggaggtagagttcattgtacattcgggtgggagggctcatcgttatatggtggagaaagaacgttctgagagtgccgggtccttccttatagcagagagagctcattgtgagtgtgggtagagcaaggaaaaattcattagctagagggtccgtgtgcggtggtgggagggcagaccatgtggagtgcagggaagtatttcctcatctggttgagggagccagacctttcttggtgggataaccattcctgatacaggattcagtccctgggagcatgtgggaatcatttcttgtatttagtagactattctggttcgagaggaaccagttgtcacaggagtgaggggttggagagaccattctgggtatgaggaggatcattccatatgggatgtaggccattctca

SEQ ID NO: 12439 - DNA, 6000 bp, Homo sapiens
cacatgttacatctggttgttttatggcccttaaatctctttagtgcggtcccttttttcctgagaccaatttgttgaagaggccagcccagtcaccccacaggaagtatgctaccttttgggtttttctgctggcttcctggtggtatgatttaacatgtccctctcttccagttttcctgtcagctgaaagttagatctcatttgctttgggatcttccttcaatcctctccacaaggctctgatgtggttactctctacccccatttaggcagaggagaaaacagagtctgagggtaccaagatgggccaacagtcccagcttcagggcccatgttctctcacccacctctggcctggttctcctccccagtccctgacacctgtctggggtcggtggtgctgagcccggggctggcctctccccttctctttcctgcagtccttatccagcagccctcaagcccagccccctcggccagcagagctgtcagatgaggaagtggctgagctctttcagcggctggcagagacacagcaggagaaatggatgctggaggagaaggtgctgcctgcctgcctgcctgcccatccccacttgaagtgcccttgtgggtgtggggtctgcccgggcccgcctcatgtgtgaacatgtacagtagaggggtctcaggtgggctgggccatcttgcaggtgaagcacctggaagtgagcagtgcttccatggcagaggacctctgccggaagagcgccatcattgagacctacgtcatggacagccggatcggtcagtgtcccctccccggccctcagccctggtccagccttcacctggccctccctctccattctgtgctgcggcttctctcctctcctctcggaactcagcgaagctactgacaagaccatggcctgtggaggggagaacaggaaagcactgtctcttgatctcgcctcctccctcttctctctttctctgtcatctctccactctccattctccattgtgtctctctgtccactttctcctttcctctccctgtgcctcatcttcctctcctctctctctcccttctctcttctccgtttctctttttcaccccactccttcatcttgtctcgctgtctatattgttttccttctctgtatcttcattgcttttgctttctttcaaactttctccttcacagatttttctttattaatcagaatcatactgaccaacatgtgctgaggactttctgtgtgctctgtgcttcacatacagtcatgtgcatctttccagttccacaagttagttatcctcatttctcggggccatagagctagtgagtgacagagctaggttttgtatgtcaaagcctctgtcctacatgacatggcttttcctgctgccttctcccctggtattcgtctccctcttttctcctctggctctgcctggctctcctctggctctgccgagggggtggttttcagcctgggcccttgcagatgtgtctgtggcagcaggccacacagaccgcagcgggctgggcagcgtcctgagagacctagtgaagccaggcgacgagaaccttcgggagatgaacaagaagctgcagaacatgctggaggagcagctcaccaagaatatgcacttgcacaaggcaagtgtggcctgccagcctacccatctgttcacccagccacctgcctacccagccacatagcccctgggtcatctgccagtccccttgcccacccacccagcctgtcctcccagctatcctcctacccactcatcaactactccatcatgctctcatcttccaccctctcatcaacttattatccattcattccttccatgtacccgctcatccatttatctacacattcacccaaccatttgcccatctgtccatctacccaatctactacttacttatctcattgtctaccccatgtcctgccacccatttcttgacatatcattctcttatctactcatcaattgccccttgtgttacctttcacccacccagttacctgcctgcccacctgttgatctccatctgtcctctggacaattcattcgtccaccaatttgtctaccatagatcccccatgcccatgggtccacacacacatctttctgcccaaactgccacccaaggactttccccatctctgagagttagaaaggggtcagacccagctcctgcctttgagaagcaagctcacacttagaagagcaggtggccagagtggtggtgtatcctgcagcagcaccatgccacaggaggcatcccactcccattatctgtagctccccacccatcctcatgacttttctgagccctgcccactgttgggggtgctgtgagcttctccaagtaccttctcatcccaggccagacacagctgagcattgattaatgaaagggtgtgagggaaatcacagatgataccctacgtttggcaagggagcagcctgtccccttctctggcccctgatggttcatttgtttcttaggatatggaagttctgtcccaggaaattgtgcggctcagcaaggagtgcgtggggcctcctgacccagacctagagccaggagaaaccagctaaagacctgcaggctgcacccacctcctccccttcctaccccctaggatgctattcccttgggctgtggtggaaaaatgagggctggagccaaaatcaaatagcttgggagactggacattaaaggggctagaggcctgatggttagtgttaatgatcctgtcttagggcagaggccaccagggagtggggatcctgagggaaggggcagggatttctccttcttcttggtcctggctcccaagggcttctgtcttcatctctgcatgagctctccttcccagagaccaactcttttttattttattttattttattttttaatttatgtctggagcctggctactctgcatttgggattggggatgctgggtgggtgtgtggtccatgttcagcgttctagcaacacgtgtgtgtgtgtgtgtgtaaaggctatgcagccaaaataccatctggccagacgggcccacccactgactgtctcgtctcgttcttttcaaccaggaggaatatgctgggggcggggaggtttacaccattggaatagggagagaggtctctggctgcaacgttactctcttttccccaccctcatccagcctgtctccatttactgctgaccagcccctcaaactgagtggagctgaaatacctgcagatatgtacatgggtagacatgtatgggattgtgggtatagatgagtagacagatgggaggatggataagtggttggatggaccgatggatgtataagtgaacggttgcatggactgatgatggatagattgggaaataaatggatggatggataggtggttagatgaataaatgggtagatagattggtaggtggatagaggatggatagtagagatgtaaatggacagatggataataggtctatggacaaatgggtggatgatttaggtagacaggtggatggatgggtttatggacaggttaggagtaaatggaccaatggttgggggaatggatggatgggtagatgagctaatgaatgggaagggtaaagagtgggagaagaaatgacaagtggagctatgtatggacagagatgggcagaggatgtcaccctgcatgtgttccgggtgggaagagatgggcagaggatggatacatacagatagatagattggcaaacagccaaatggggtgaacttacaaatggatgaatgagtgggtgggtagattaacgactaagtggacgggtgggtggagggatggatagaggaattgattgtgtgggtgggagaatgggtggatgggtaggtggaggaatggatgtagaaatggacaaatcaggagtgtgccaaatgggcaattggaagtttacacgggtgggtaaatcttgggtgaaaggctaggcctggccctgcattacagtgcccctgtcatcacactcctttaattaagattaagcatccctggtgtgagctgtgtccagtgctatcacctttcacatcatgtaatgctccaaatgacgctatcaagttgggataagtctctccatctgacaactgaggaaacaatgcaagtcacttgctcaaggatgcagcaagtcagtggcaaagctggggtttgaacccacccatagccagccagaggcattccataatcagtgctcctgccatccagaagcagagccctctagcggaggaggtgtgatttgaggccactggatatggacagataagagagactaccccctcggagtggggcctgcctgagatggtaggggggtgggacctggattgtccccctctacattccctttaccctcatttcatatctaaaaacaggaagtcccgtgctccaatcccacagccgaagtcttagagctggggctgtaacccatgctgcgcccctcaagggggcggcttcggaagcttggccatctagagaaacactccccagcaattacccccgactcctggctctcctgcctttccacagtctggggggcagggaggggacagcgctgcatcattccctgtggcactccgctctggggccattaactgacgccttcccatcgatcggatctgctaagtgctgctgattcaggcgagtgggggtgggggcccctgggggcagagcgggtaggagctgggcaggaagagaggggagtccaggaaggaggtggagagaattggcgaagttccctgccacccccattttccagatgacgcgactgaggcccaaccagctttgtaggaggcggagtctccccagggtccctctctggctgtcctaggggagggggctcagggagccacgaggcccctccctgcctctccatctcccggcaagctcagaggggcggggagagagagccagaggaggaggagaactcaggcagctctgcagagggggccaggagctcgggtgtttggtacccccagccccaccgctgttgctgctcctgcagcggggacacaggtgaggacgccccgagagagagggggagggggaccaccactagcgctgtcctcatccttccctggtccagcccccacgccctaacccatcctgggatagtccccaggggtcccactggaccttgcccttcccaggcctccttccagggaccccgcaccctccccctgcctatgccaccttctctcctatgcctggctgtggttgcttctcttcctcctgctgccgctgctgctactgccactgcccagtacacaccgccagcccctcggggtgtggtttccccagacctgcccccaacggtgggacccagccttctcccggcgtctcctgccagcttcctgcaaagcccaggagcccccctccctggagacacacccaactccctttcaacaccccacccccctcttaatcccattttggggttaacccccttcctcttatttagtcttcatagatcccctgggtgctctgggattgtgcccaacttcctaacatttgagtcccggcccttggaattccccaggcccctttttcctccctgtagaactcctgagagtgtcgaccaggctttgttggcccgtctagatacccacctcccccagataactctcagcctctcaaaaaataacccagccccctgtctacccctttagataaccccttcccctctccagccctactaggaggctctggcctctcctttcttccccagaactcctgtagagtatagacacccccccgggctattcttggcaactctaggcagtcccaagacacctttcagcctctttacaacctcctggatccacagccacccctcaagatgcaccagctccctttccagatccatgaggggggtctaaccctcttatgcttcccctagaagtcttgagggtgtggacaaccctcctcacctgtctcagcccctc

SEQ ID NO: 12440 - DNA, 6000 bp, Homo sapiens
aaggtgtgagaggactctggggtggtcaaataggttggggtacagttagaagggtatgagcagaggagttcctggggatggcagaccaagcatagcagtcccagggccaagtcagggaggtacaagaagtgcatctcctagcccacttttgtctatttattgagagagtccggtgctaggtcaggtttgaagatgagaaatgggttgggagtggttccaggccatgtctggcattgggatcaagattggctggcggtggggaggagatatcacgggggcaccccctatcacattacttcctgacaagtcagtgagggccagcatgtaaagaggaggtgtggggtccacgtcagtgtgggcctggagcttgccaaacctgaaagaaggagggttcctggccatgttgtttgggatcttgggagcttagagcagagaccctgggactctctgtttttatctttttcttccccccgagacggagtctcgctctgtcacccaggctggaatgcaatggctcgatttcggctcactgccatctcagcctctcgggttcaagcaattctcctgcctcagcctcctgagtagctgggattataggtgccccccaccacacccggctaacttttgtatttttattagagacgggatttcaccatgttagccaggctgatctcaaactcctgacctcaggtgatccacccgccttggcctcccaaagtgctgggattacaggcataagccaccacgcctggcctgtttttatcttttttgcagtcactccagagtcagtagttagcagagtaggaggaggaaatcaggtgaggcagaacttggaggggagattccaggactcttctcatctttatcccatttgtatgcagaggaacaatcctgcaccatgactcaacagccacttcgaggagtgaccagcctgcgtttcaaccaagaccaaagtgagagaggattgggcctgtacccttgtgggaggaagcgaggaaaagaggggtcagaagtgggccatgggcccccagcttcctacctgggcattctttaaggcagtctggattccttccatcccccaggctgcttttgctgcgccatggagacaggtgtgcgcatctacaacgtggagcccttgatggagaaggggcatctgggtgagctgttggcaggggaggggcaatgggcagaagagctgggctgggcattggctcccacctccactgacaccctggtccctgtccagaccacgagcaggtgggcagcatgggcttggtggagatgctgcaccgctccaaccttctggccttggtgggcggtggtagtagtcccaagttctcagagatctcaggtaagtgccctcatcctgccctttggcccagatttctcggattcctggcctcccacaggcaccccaaggtactggcagatgaagacgtcagagtacttcagagtcacacagagaggaggcctacagcttggaagtcatggatcttatagcttgagaagcttggtgctttgttttcattttaaaaattctgattgagtgcctcctgtgtgccatgccctagagcacttactgtgagcctggaactgccctaagcactttacgtttattaactcatttaatcctcacagtaactctatggggtaggaaggatcattatccccatctttaccgatgaggaaactgaggcccagtgcagttaagtgactcatccaaggtcacacaagcaataggttttaaaatcttggagccgtcttcccaatacccccttggcttgagcctcaagtgccatcttactttaagggtttttcttgatgatcccatctggacaaggcaggagttgccctaggtgagtcacagagccctaggattcctcacggaaatctccagggtgcatggactaggaccctggaggcagaaatagttaccgaggggaagttacaggcctgagtgtgagtccctgtttggttgctgatgagctttgaggtccttggccagacactcaaccactttgaacctcagtttcctcatctgtagatgagtgtaacagtctagaacactcctctcagggatcatatccacaagtgctcgtgctgtgcgaggatctcactggttgtttattgaaaggctaagcaagtaggttgaggtccctgggaagcaggggtggatcctgtgtcaccagggctgccccttaccctaaaccttggccccgacaacccacccacctgcccagcagtgctgatctgggacgatgcccgggagggcaaggactccaaggagaagctggtgctggagttcaccttcaccaagccagtgctttctgtgcgcatgcgccatgacaagtgagcctgaggaggaccggggtgggaggtaggaggtccccacagtaagtgagagggatagtcctccctgggcatcccgccaccccctcacggccatcctgtgttgtgtgatacccacaggatcgtgatcgtgctgaagaaccgcatctatgtgtactccttccccgacaatccccgaaagctgtttgagtttgatacccgggacaaccccaagggtgagagggctcagatacacaggtgtaagggcatgaaacagtggatggggcagaggggcagagatgaggaaagaaaggaaggggcactcacacacagagaaatggggaaagaggcagggagatgctcacactcatagcctctccatctttccagccctcagccagttctccccacctccggacctgccccacccctgggtaccccagtggcagagcaaaaacacctcgtgaggacatgggtgggtgtgtcagggatccctgagcttctggggctgtgatagcagcttactagattccacagctgcagagcaaggaatggaatctgcctagctggcggggcgtgcagctgagctgagccccctcagggttcttcgggttaagcttatcgtggagggttgaagtctggtcctcatccagctctgtccattctgagatgctgcctcctcttcagccgcccaccccaccccccatcttcacaccctagggctctgtgacctctgccccagcctggagaagcaactgctagtgttcccgggacacaagtgtgggagtctgcaacttgtggtgagccgtccagtggacaagggtgggtaggttggtggactggcttccttgtggactcttggccccttccctccataccaccccaacctcagactcctccctcctaccccaggacctggcgagcacaaagcctggcacctcgtctgctccattcacgatcaatgcacatcagagtgacatagcctgtgtgtctctaaaccagccaggcactgtagtggcctcagcctcccagaagggtacccttattcgcctctttgacacacaatccaaggagaaactggtggagctgcgccgaggcactgaccctgccaccctctactggtgagcacagggtatgcatggtgggctggtgaccccataccacatgacatgtgggcatcactgctgatctgtcttctagcattaacttcagccacgactcctccttcctctgcgcttccagtgataagggtactgtccatatctttgctctcaaggatacccgcctcaaccgccgctccgcgtgagtaccccctccccaccctaccgtgtccctgtccccctgcccatttaccatacctgggcttagccagtgctgcctgcaggctggctcgcgtgggcaaggtggggcctatgattgggcagtacgtggactctcagtggagcctggcgagcttcactgtgcctgctgagtcagcttgcatctgcgccttcggtcgcaatacttccaagaacgtcaactctgtcattggtgagtgggaacagccccttggttgggggtactgcatggggcaaaggcctgcaggttggacctgaaaggattttagggccatgtgaggctcagcttcatcatcagtaagggggacagcactgggcaaaggcctggaggcagaccctaggtcctgagatgcctgagaggactggagcctgtggctgtggcagcctctgaccttttaccaccccccctcccccagccatctgcgtagatgggaccttccacaaatatgtcttcactcctgatggaaactgcaacagagaggctttcgacgtgtaccttgacatctgtgatgatgatgacttttaaggaccctgggggctgtgctagggacctgcagtggcagaactgcagagctgagccttggcagtggggcgtgcttggaagccaccagccagcaagcattaatggggctggtgcccactttccactcagcagagctatgtctaaataaagagctcacttccccccagcacttcttgatgactgtgtgccccaagggccaggccagagacccaggaaggcagcgaccccttgggatccctaacctggaggaaattgccagggacccagagggagtgccctaatccaacctggggattttttaaaagcttcctaggaagagatgatctccgatgtgatgaatacgaataaaaggcccttaatggcatttacggcttgacctcaggggcggggcatggagtttcctggagaaatgtgaccctcttgggcgctgacaggaaggaggtggaatccaactcggatccttgtgacagtccctcctttcttatctgtctggctactttgtgcttgagccgctggcaccgcccggagcagcccctgcggcgccccgcgcgggggtggatggcagttttaagggttgggagcatctcgcttcgtggcaaaggcttgatttcccggcagcctttgctgctttcctgagcggcgtgttagttgcttttccggtcacgtgcatcgccgcccctgcgcaatccacctaggaggttaggaaaaagctgcccagcccagactccatttcccggtgtgccccgcggtggcgaggggcgtaacggttgttgtagtccggccccctcctggctggtccagccacattaaccggcaggatgtcggaggtgcggctgccaccgctacgcgccctggacgactttgttctggggtcggcgcgtctggcggctccggatccatgcgacccgcagcgatggtgccaccgcgtcatcaacaacctcctctactaccaaaccaactaccttctctgcttcggcatcggcctcgctctcgccgggtgagggagggaggcgccggttggccagggacgtctgcagagcgtgggggtagacccacaggtctttgaggaccaggacggggaacctgagggaggtgcaaggccgggaagggcgaagtcagtagagatggacggcctgaggggcttggaaggggggccttgaaggaggtggagcctagttataaggagggcctcagggagatggagcctggctgatgaggagggcctgcgggggatgggggtctgcaaggaagatatggggaggatggagacaagtgtgggactgaaggggaaagtgggctggaaggtgaaccggaaaaaaaggagggcccgaaagggggacatgagagtacttgaggggcgtagggggggtgtgatgtgaatgatggggccagattgaggccgaccctggagtacttagggcagagaccgggaaatagacggtaaagttggagggtttggaagatgtatttattggggatccggtcttggaggggagcctggctatgattggaaggcgccaggggcaggtacctgttggggaacttgggcccaggaggaggatccatggttggaaagcctgagaccagagagggatggagaatctggaggaaggacttgagcagtgctgaaagttcagagtggggctgacgacctggaagaggtcctagcaatgatggagggaggaatctatagggaaatgggagcctggagggcggttctataaggaccctaggcctggggagaggggaacgtgtgaagacagaaggcctgaaagagggatttgcaggggctggtgttaaagggggagcttg

SEQ ID NO: 12441 - DNA, 6000 bp, Homo sapiens
ccgcttcgatgaggaggacttgggagacgagatggcctgcgtccacgccctctgaattcccacccctccccaactgctcaataaacctcctgccctcccctccccagcaggaggcaggcatggaccacatccctggattttgttgtctttgcactgggggtctggggctgcccaggggcccccatccatccatcccctgttctagccctgagccactgcccacacacgggtatttccagaaaccaggacagccaggcctgattattcagcgtcagggaaggagggaggaggaggaggaggaggaagagacagcagccaaaaaaagctggaggcagagtggaggaggggggagggggagggcactggacagagatggaggaaaggggagagagcgggtgtgaggggtgcttggacccagagaggaagagaggcagagatttcaccagggctcagccaggtcaaactaggaagggtagacggatgagaaggaaaggacaaggaaacccagagaagaatcctgccaggggagaggcctggaggttggaatcggcctggtatgtgatgcatcttaggcagaggggtcctctgacggcaacaggaattttagggtggctaaattgagatcgctctgtctcccatctcccactttctgcctgagaaagaaaagaaaacctaaatccatcagtagacaacataggtgacagcaaaggtcagggctcccagccctggggaacccactcagggcccacctggctttcctgagaccacctaacagtaacctactcttatcccacacagatcccagaggtcctctctgcttcttgccccagctttactcttcacccagcctttggggttacattcgctcactgaaggcttatcaggcatttactatgtgccaggcaccggctctgggtttctctcggggcaaactgaactggttgaaacacgggacaggtctcatccaaagtgggagtcagccccactccagaggaattgaaggtagcattgggagtggtgcaggatgagaccaccagtcggggaggaactcttcccagctcccagaacaggggtgtctcatttgtataatctgcgccaatcaagccaggactgaaatttgagggaagccagaattggagactaggactgagaagattgagttacattaggccttgaaacaaaggcttaaagtggttgggctggagttaggtgagaacagcaagtcatgggcagggcacagagagtgaagggagactgttgagggatgaggtgggagaagccactgaggccagatcaggtggaaccttgaatgccaggtcccaaactctgggatttttcctataagcagtggggagccatgggagggatttgagtagggtagtgacatagttaacattgcattttaaatagatgttctgacggctatgctgaaaacagaagggagggggaagagactggagatgctaaaattggcaggaatgatggtcgccttagccagaggaggtggcagaggagatggtgagaagtgagtggattccagagatgtgtaggaggtaaaatgaaccatttattgggccctgtgctaactgcattacagtgatcatctcgttgaatcagtgcaacaaccttataggtatcattttaaaccatcttacctgtccagggtcaaacaagaagtatcagaggtggcattcaaattcaagcagtttgatgccaagatccatgcttttaacccctcctgtgtactgcttccccaataaggcaacaacagggaagtatccattacatatatgtgtgaattttcatgtttaaaaaaacaggtattgagctgggcatggtgactcatgcctgtcatctcagcactttgggaggctgaggcgggaggatcacttgagcccaggagttcaagaccagcctgggcaacaaagtgagacctcgtctctacaaaaatatttaaaaattagctgggcatggtgtctcacgcctgtggtcccagctacataggaggctgaggcaggaggatcgcttgagcccaggaggtcgaggctgcagtgagccatattcatgccactggactccagcctgggcaacacagggaaaccctgtctcaaaaaaaagatattcattcagatggttcaaaattcaaaaggtaggccagatgcagtggctcacacctgtaatcccagcactttgggaggccaagtggacagtggatcacttaaggtcaggagttcacaaccagcctggccaacatggcaaaaccccatctctactaaaaaaaaaaaaaaaaaaaaaaaaaaatagccggacgtggtggtttgtgcttgtaatcccagctactcaggaggcagaggtaggagaatcgtttgaacccaggaggcggaggttgcagtgaactgagattgcaccactgcactccagcctgggcaacagagtgagactctgtctcaaaaacaaaacaaaacaaaactactgagatgctgtttttcatctttcagggtggtgagtatcaaaaagtttgataatgttccatactggcaggttggccagaaacaagcgttctcataaatcgcttgtggaagtttcattggtataacctgtgtagaaggcaactgggcaaaatctagaaaaataaattcatttactgttttgttcagcttcatacttctaggaatttcttacaggtagactcatatatgtgctaaaaggtgtatgtataagatgatacactaccaggctgtttatttttttattttatttgagatggagtctcaaaaggtacaaaggggtataaagtgaaaagtttccctaccctctggaagcaaatagtattatcaggtatctttcacagacatacaagatggtgtgctgaaaaaaaaaagatggtgtactgataagttagcacagtggctaagagtaacaggtgctggagccagacttcctgggttcatatcctggttctaccaatttaccagctgtgtgaacttaggaaaattcctctccgcctcttagtttattcagctgtaaaacaaagatagttgtcgtacctgtcacatagggttacagtaagaatttaagtgagtaatacaggcaaagttctctaaagagtacttgacagaaaacagccacaatttaaatgttagctattctctgtctgatataacccttctcttctctttgtacacaattaccacacagtttgacatcttgcattttttacttaactaaatatcttggcaatcattccatagttccatgttattataatgacagcggcatagtatcagagtttatttaaacaggctaccaacaatgagcactttgggagtgtccattctttatcctattataaacagccctggcctggcccagtggctcacacctgtaatcccagcactttgggaggccgaggcaggcagatcacatgaggtcaggagttcatgaccaccctagccaatatggcgaaaccccatctctactaaaactacaaaaaaaaaaaaaaaaattagatgggcgtggtggtgaatgcctgtaatctcagctactcagggagggtgaggcagggagaattgcttgaacccgggaggcggaggttgcagtaagcggagatcatgccactgcactccagcctgggcaacagagtgagactccgtctcaaaaaaaaataaaaaataaacagcccagtcatgtattatcttatacatatatcttttagcacatgtatgagtctatctgtaagatgaattcctagaagtatgaaggtgaaccaaacagtaaatgaatttgttattttttttttttagattttgcccgattgccttctacacgttataccaatgaaacttccacaggcgatttatgagaacgcttgtttctggccaacctaccaatacggaacgttatcaaactttttgatactcaccaccctgaaagatgaaaaacagtatctcagtatttttgtttgcttgtttgtttttgagatggagtctcgctctgttgcccaggctggagtgcagtggtgcaatctcgcctcagtgcaacctccgcctcctgggttcaagcaattctcctgcctcagcctcccaagtggctgggattacaggcgcctgccaccacagccagctaatttttgtatttttaatagagatggggtttcactatgttggccaggctagtctcaaactcctgacttcaagtgatccactgtccacttcggcctcccaaagtgctgggattacaggcatgagccactgcgcctggccgaagttgagcatcttaagccccaactgtattttggattttgcatcatagccatcactgttgaccttgatgggcctagttttagtcgcaggaaggagggttattccaattaagagagagctaaggaataaataggtaaagtggtagagttcgagtaggcattaatttgacaaagaggaagaaagaaataagggagatggctagatgggggcaggagtttcagggtgtgcttaaaatgcagactatgaaaaaggaacctggaaggccttgaaccgtgtttaaactgcagggactctgggcactgccagctagtagctggctgaccttgtgagagtcacttaagctctctggggaattattttcctcgtctgtaaaaacggcctaatagtccctacaacgtaggacttctgtaagcattaaatgagtgaacatgtttaacaaactcagaaaagagcctggcaaagttgtcacactgtaggaccgagcagggaggtctcctctccccggccctcgacttgtgttttcccaacgcatattcccgcacgctctcacggctccagcctccgggccggaatggctgccggtgagactgtggtacaacccgctgtgcgcaggcgcgtggcgggcaaggagggggcgcgaggggcggggctgcagccgcctgggctgttccaacgagcgcgcgccgcccccgccgcgccccgcgccgcccttgctagccgagcctcccgccccctgcattgctgatgctgctgctggcggacatggacgtggtgaatcaggtacgcgctccagcaccgtggacagagcccgccgccgcccggctgcctaggccgggtcgctcaggccagccgactctgggaggtggtggccagggtctggcagcggagacccggtccccggcgctggggatgggggtctgcggcaggtgaaggggaggaagggggaggtggagaaaaggagtgcgctctttgccgcagcgagggccgtcctcactgccgcagcgggggcccccggagccccgtttattactggcgaccgcgaggggaggaataggggcctgggggctggagtgagggcaagggacaaggggaggggagagtggaaggaagatggggggtgctgcggataagctaggaaatagagcgacagaaggtgtgggggcggggatgggggagagggctggcacccgcccctcccaaacagagactgtacccccataggcgaccaccccttcccccagagcacacctaggggacaatccggttttactccttccaaaacccccagcctcctcacccccaacacatagcgactgaagccgtgtcccagccctcccccaccttaatcagtccagaccctctccgccatgtctctcgtctttgccacctcagaaactcacccccaatcagtcccaacccttccccatccccatcacctcaaatatctaccgccaccgccgtctaacacacctttacccctgcagacccttcccccacctgagccaaaccgactcctgccccgttatgactcaccttcaccatcacaacccccccacccgaatgcaccccactccatccccattctctacccgaaccccttccccatccgactcgcctttacgtttcaaacctgctccccctccttaactagtcctgacctcatccccatctccctcacccccgacttcctctgccatctgactcaccatctcttcagaccttcccaccagtccttgga

SEQ ID NO: 12442 - DNA, 6000 bp, Homo sapiens
ccttcattgctcccattacctttaaaaccaaatcttccaactcttcaatctgatgttgaaaaccttttacatcccgctttctccctaccacttgcttcactctaatctcatctctcatcagtcgttggtatgttccctctatctcaaccagcctggctcattctcacctccagatttctatctttgcttctctccttgtctgcaatgcctttccacttcccctttgctgatctatgttaattgcatcattcaagatccatttcaagatctgtccccttacaaaaagctgtccgtgattcactcacaggattgctgatatttcgtgctaaaacagactttagagctagatgatcaagctcaactttattcccacctccatttttcatacgagaaaacttaaggcccaaagacattaaatgatctgtataaggtcatgttgagagtttagtggtagaaccttaatatgaagccagatttcctgactccccttgcaatttcctttccgctctgtcacacttagtccccacccacccccagccccccagaaaagtacaaagtgtggtgtcatgatcataaactggcatctgtgtttggattgcttttcacctgtatttggcttatcttgaccaccaagctctaataattcttgtgggaaggatcacgtctaatatttctgccctttctccttccccaggacacctaatagggctgtatacaccacagactggcagtaaataccgcttaactgtggagtgcttcacttcaagaaaacataaaaacagaaccaataaaatgagtataccctggttgaattattatattacatacatattcaaaaatgttcctctaaacagggacctcctatagtgagcttggttgcagatcattaactgctgtccagaaagagtgagagctgagaaacctctgctcctttgacaagctcaagaaagaaaaaggcattaaggcagccttcccactctgctatgaagaggatttacacagaccctgtctcacagcccccagctcacagccctcagtattgtgctctggtctccctcagctggaaattgagtgacacaagttctaaatgtctgttccaccactaattatctctgtgacctaagacatggcacttagtctcactggacttgtgttttctcatctgttaaagggtaggggacaggggtatgtgatggaagtccgaatttgcttgcctcacacatttgttgtgaggctgaagtgagataatatatgtgaaagtactttagaaataaaaaggcattatacaaatgcaaggtattaactttttaactctccaatcctatatcaattaatcctaggagactagagtgagtaaaggttaacaggtttgcattttaatcccagctaaattaatagtctgaatcctctaccttctccatacatgctgcctgttcttcatcccatctccttattttatttagtagattattataaaggttgctattttggcttggcacatcccgaggtagtacagtaggggaggttggcagctgctaagactcgggagagacactgatttcttcccaaattgctctaaaagggaggacttagggaatttaaagctactgatcaaggggggaagggcttccactctagcaatacagtgccactctctcattcaataatgaaaatgaaatgaaaacaggaagggagaagagatttaattttgtcacatttctcagcttttctctcctttgcctctccagaactctgagcacggctgaaattgaaggagctccatgctggcttggataagctttattctgggtagaatcagagtaaatgctggcagttgggtaaggtagtgcattgcatattcaaaagatatgagcctattgtactgatcgatccttcatccagcccaatcaggtaacttatataacatgcccaaaagtcccaggctaaggaccatttctgccctgggacatccagaactatgttcatccaagcctctgtggatacggtcatcattccagatatgtctggttaaagaaattcttatgtacctctttgcctttttaaaaatctgtattgtttaattaaaagagagcctcttaggagatcattaatcatttgaaatatcaaatagtgctgaaaagcaaggcagaaaaatacatcctaaccagtaacctacaatgaatcatccacttaacagacatttcctgaatcctgactatgacctcaagtcctgggttaggttgtgaggaaaatacagaagcatctaagtaaaactttattaagaaaccagcaggttatgggaaagaggaaggtgtagcttagttacagcaaaggtgcctccccaaatcaggtaccaatcaaccattctggccatccctctactctgcctccaatgtaaagcatggtattcaatgctgggctaaggaacccccgacacacacacacaaagaacccttactatgatatgaggcaataaggtagctaatgatgggctgaaaaataattttttaaaaccttcaaaactaatcataatgcagttcaggcagtatatctccagtaacctaccctaatggagcaaaagccatgtacaagcaactattttagcattcaatctcaaaatgaccttgtagcaagagtctacatcataaatgttggcctcattataattgagtgtagaattatagacaagagtttcaataaacatacataaagcagtaactccaagttgtcccctggtggtatctcgcttgacaatacactgtctatgccaaaccccaagaggccatctgtaacccaagaggccatcttactctgtgactgctcagccttcagcccttctaactacatgttgggtttagtaaaaagcaaaatttaaatgtgggatatctgccccttctaaggacagggattccattaaggtgtgagagccagaaaagtgatctccagtcctggacttgctggttggtcagatctggcactttaatgcaccagatccaataatgagatctggcacctgtatatttcagtcctgaactcttagggttaaaggcggcttggctacttgagtgtgggataggggaaaggagaacaagcccaaggagggtgaagagagtgggctcctaaggtgaatttactggaaggaggactgccacgtgagggaattgatagggctcacttctcctggtcttcccatccccagagtttaaggacggtccctgcactagcttagtagctgccaagcagtgttaacacatctctggaaaggtgggcttaggctgtgaggctgcagcgaggatctgggaaatgcagacctcaccagagattctggtctttggagggatttaggtgaaactgtgctcttatggtattatttattgctgagacatagtataggcaacagaaagatgttgcagattctagaaaattctggctaggtcagtgtccgttggcaaaagaagagggaatagtgggggatatggtctgggagtagatggctagagaaggggctgcagaaagaaggctgctacccacaactgcagcattatgtgtatgggagataaattcacttgtcatatttcaaatcaggtttacaggtatttctcccccgtccgctccccccacccagctgtggcttaacaggtagtcttctcaaattttaattacaattggtaatatattggcgtctaaagtctaggtctgactaagatgatggtttgtgtgtatgtgtacgtgactataacagaaagagcttctaaagtcttccgatgtggtgggaaaggtgctgcgctaggcatcagtcgttctcttcccaagagaatctcccatctctaatgtcagactgcttcaggaggtgaaaagggtgtgggtgttgcagtgaatttccccagcccaagacacacacacacacacacacagacacacacacacacgcgcgcgcgcgcgcgcgttaacaagtttggggggggcggaaaaacaaactcctgctgatggctgggaaatccagctaaaagcacaaggcaggctcctatagcataggcgagccagacagacgcccagatagcctcagctcccgagcgcgaagcccagctgctgccggggcactctcgacttgctctcggggaggctgcaggctgcggaaagccggggcgccagcctccctcatcacactcctttcccgaatcacctcaaactctgtacccaacggcaaagctcagaaatgcaaaaaaccgaagagggtcaaattgtacttcaatccaaaggaggctgaacacccgccccccccgcacccccccccccccaccacacacacaccatgccgcttaatttcttttcccggcttagataaaaagcattacttgcccatcgaggcttggagatggggggcaagaggttggtccgaggctaagctcacctgctgctgaggtgagagagcagacacaggatggaagctattctgaccagcagctaagtggttgggggattgcaaagaccctcaacttcgcctctggcttttttttttcattcgtgtcactaaagggttaaacacggcaaggctccagcccgccccccaacctccacgccgctccactccccctcccctttttgtctctcccctcccctcccgcgcgtcgctaggaggtcatcaagcgctctgcccagtccgcgttcgcaagcccctctgcttcccgcccatcggacccgtggctgcttacgaagaggtgtgcgcacactgaggggcgtgttccagcatagggagacgctgagcgcccacgggttagacctcagagccaagccagccatggagtgggatgggggaaagtttggcaccctgcgaggggctgccggactggagtgggcggggcgcccgagggtactttagccttccaggcttagggactcaggctgcccagacctgaagcggtgtgcggccatggaccgcggagctgccgcagcccagggcactgccccgcctcaggatggagagcagcccgctgagtctccagagcctccgccgccttggccgccgccgccaccaccaccggctccgccgccggctccgccgctgctctccgaggcttcgccagaacccataccagagccctgtccagagcttgctccaggtccctgtccagaggcgacctcagaatcagccacagaactgtacacagaaccgaccccagaaccagccacagagccggcctcagaaccggccccagaacctgccacagagccggccccagaacctgccacagagccggccccagaaccggccccagaacctgccacagagtctgccccagagccgactccagaacctgccctagagtcggtcccagagccggccccagagctgactccagaagttgccccagagctggccccagagccgaccccagaacctgtgacagagctggccccagagttctgccctgaggcggctccagagttccgtccaagtccagcaccatgtctattgcaatgtccggtggacactcgagagagaggtctaaagacctcgccatcgccatcgccatcgccatcgcccagaacgccaatgtcgtggtccagaataaaggtaagcaaaagaccccctgaagcggggaaaagaagcaaggcgaagtcagatggctatggagcccgcgggactccgggtaccccttgcatcccgcttgtctggcactggctggccaagatgctgagaaagatgcagggatggggaacccgggggaatgggaaggggttgggaggcgggaagcaacatgtgggaatcgagaatgggctgtttggggctagaaacgggggtgacagcagggggtgggaatcggagcagttttccccttgaagagaagcgacagtgcggtgagcgccaatatcttgaaagagaggaggaagataccctcggggagcgcaagagacctggagaagtgtttggggctggccccgaatacatagcggacggattgagtgggggcggtgggacacacctcttagccgcggtca

SEQ ID NO: 12443 - DNA, 6000 bp, Homo sapiens
tgcgcagggctctaagttttaggtcatcacagatctgacttgcagtgtcccaagcacttctttcttatgtgccatctcatttaatccccactagcacctttggaagaaagccctgtcacctctgtcgctgatgaggacactggagcgccaagaaggcagatccctggctggggccctccaaccagggtggggcagagctggggccagatgacaattcccggaggaccgcagttgggacactcccagcgctcatgctgcccctgtccctcccagggtcccttctctgtcctcacagacccagctgggcagtgtcctcccatctcctgaggtgacactcaccccagcgcctccttcaggaatcccaccccgccccctccagccctaggcgaattgccctggactctcagtctgggtctggagtttcatctggatctgggagacatttccagttctgccctaacagggatgttgtgacagaaacctgtgtgggggcaggagagatatctgtcctgcaaaatggtctgcactttcaggaagtgcagggagggtcctgagggtgtcctctgaggtaggcctaggtgccgggtgagaggaccgaagtgggcgtgagagggtataactgaggccccatgactagggctggggtagggaggtagaggtccgtggtggaaggggagccctggtggctcacaagggtggggagctggggagagagaggaggtgtggcagctgccaattggagaggaagtttgggagaaaggaccagaatgctcagaagggccataatgggggttgccattggcagtgtgaagggaggacctctactctctctccaagatccagttccccacagtgggtgctgagagatggcaaagataacggggtctaggggtctcctactgtgttctgggatttaccctgaagcccccatggggcaagatacaaaagtcaccaggaccaaaggtgatcagggttggtcagacgatggccattcctgggagccagatatgagagcttactctctgatcccctcagtcccagagggtccttccccatccctggtgtgaacctgccttcctcatgacaacaacggtggtgactgcagactgtggggaactacaagatccaaggcctccccataacagtgttggatggcacagagattcagcatcacacagcagccctgagctgattctttgtgggtatgtgtaccagggtgtagctggtaagctctttgtgggttggtgtgtgaggtccttgagttattgtgagctgttaccttgaggtaggaattctctgagctggttgggggtctgtgtcctgaggtgtggcatctttgagctgtttggtggttggtgtctagggtgagaggtctctgaactgcttgtgggcactgtcctaaggcatgagatctttgaacatttttgtgggaggtctttgtccagaaggttaggtctccgagctgctcatatatcaggatatttttgtgaggaaggcaggatggtcctttctctcacaggggtagaacaaggtgccctggtatcagagagatgaaaacataggatccttatccttagggagggcaagtcctcagtgtagcatgtaggagccagtggtacaaatactaatgacaatgtctgcagacattaaccccatccttgctcagggccgacccctgtgacaaacccatgtaacccatgttaactcaatctgccaaattgccaatgaggagctcaccatttgcagatgaggaggctgaagccaagtgagggtagggcctgtgctcacacagtcctcatgaagagggaggaactggctgtaacttggactcactggaggagacagggaaaggctcaggcacagccggggtcaatgggagatgacaaggaaaggggaaaggaagaggtttgcccagggcctcaagggccccatcactgactcactggtgggaggtctgcctctctgtctctctgtcgcacaccctgcttggtaatggatgttgagaatgcaatcctcacgttacctgtggaagtggtggcatgaggtaaagagtggggaaataccacagattcatccattggcatgaggtccaccagcaaatgtagagattcctacctcttcttcccccttgaaagaatttttttcaggccaggcatggtggctcacgcctgtaatcccagcacttttgggaggccgaggcaggcagatggcttgagcccaggagttcaaaaccagcttgggcaacatggcaaaaccctgtctttacaaaacatataaaaaaaaatcaggccgggcatggtggctcatgcctgtaatcccagcactttgagaggccaaggcaggtggatcacttgaggctaggagtttgagaccagcctgtccaacctggcgaaaccctgtctctactaaaaatacaaaaattagccgggcatggtggtgcatgcctgtaatcccagctactcgggaggctgaggcatgagaatcgcttgagcccaggaggtggaggttgcagtgagccgagatcacaccactgcactcagcctcggtgacagagggaaactctgtctcaaagaaaccaaaaccaaaacaaaaaaatcagctgggcatggtggcgtgcacctatagtcccagctacttgggaggctgaggtaggaggattgcttgagcccaggaggttgaggctgcggtgagccgtgattgtgccactgcactacagcctgggtgacagagcaagactctgtctcaaaaaaaaaaaaaaaaaaaaagaattttttcagcactgagagtcagcaggacggcagtcaagggctggagggggtatgggggattctgtatacagcatgagcctccccataactggaacgtgtccttatcctgatgggtagagggtcccaatgtgtgtcaaggaagtggggcgggtcttccctcatgactgaggcccaggccaagggcaggtgagtcagtccctagacacagtttctggggagaggcttcctttcctctgcagacacaggcacagcacctagtagcatgcataggggtccggagctgtggatctaattcagcagggacagccagctgccagaagtagtctctctgcccttgtctctctattactctctttctttccctctatcttctctgtgtctgttactttctctctcagacatggggctaggtgtgacctcactcatgctatcagggcccttgatcagcttcttctaagggtatcatcctctgacatggatttttctggggagcagttgggaggataccttctgagtctaagggattgtccaggaaaggcatatttggctgcagaggggctggaggagtccctcggcaaaaccaggagctcttccctatactttgagtgacctgggcctctggcctctgaaagaagcataggagcttctctgctaaaaactttcccatggctcgctcagagtaagtcaaagtccttgccatggcccagaaggtcctgtataatctggtcctcattacctttctgagctcatctcccacctcttccagcaacactggcctcctcactgtgcctcacacatgctaggcagagttccacctcaacacttttgcactggttcttatctctgcccagaatgcttctctcagatattcatctcctattgaaatgtcaatttcacgttctcagaaagatcttccttggctactctttctagataggatcctcccctcttctatttcactaccctgacttttcattacagcaattaccaccacctgacaaattacatgcttacatttttgtgccatatgatcccaatagaatgtaagctccacgagggcaggagtttttgtctctttccacacagctgtattcctaacacctataacagtgcctggcacatactttggacagaatgaataaattagcaaatgaataaaccaatgcaaaattctggtgagagatatagctagacaggttgaggattctgctagggcacatattcaggtgtgacaggatttatttggcctactcattctccttgggggcccctgagagatggccctttccctaacagagcttgaaggtcctgctgtccctctcacccattactgacagtcaaggacagacacctggcccgcatcaggccttctgagcccagtcaggagttccatccctcctgccccttgggggactgtggctgggttcccaggccagcaggccccccattagatctattctgcattacccagggagggacaagtgagcacaatgcccagcacgtggtaaacgtttgatggtggacgctgcaggaaggtaatggaagtctgctgcttaggaacacttttctcctgttcaagattgcagtgagtatacagtcagtttttgtcctgactttgccctctcaccctctggggaccagcccggaatggtccatgggtatctgcatccactagctgttccttgtttgcaccaccaaggggcgcgcgggatggaacagttctatcctgggatgtaccactgaggggcgcagaggaaggacagtccactccgcctgtccattttggaataatcccttgtgtgcgacagcactaagggtctctttaaacccacgtgtagcatccgccacagttcctgccccgttaggtccgttcctactcgcaccactcggttctcccagcctgttcgaggcatcattttcactttacctccaccccttcgtttctacatagtcaaatcccgctggggaccgcaaaggggcaagcgattggctccaagatgtgaagggcggggtcgagggccgtcccgggaggtgattggttactgcgagagtgccccgactaagcttttccggggcgcggagtggctccggatggaccggctagcccctgcctccctcttcgcatctctggttcccattggccttcagtttgtgacaggcacgacgattgcggagctgaagttcaggcagcgggagcgaggagggtgtgtggcttttgatacagtagagttctttggcctactcaccaactgacagtcccaaaggggctggagatgccaccccggcaaagttcgccctagtcatttgcttcacgtgagctctttcagtcttgtttatccttaactcggtgacaagcctagtctggcgcttttggcacggcaccatcgttcctcccgctacactcaattaatgtccagggagcggtctctgagcttgtttggtgtttgcctaggaagtaatgcgggtgaagcagtttcggggatgtgtatctttaggcatgacatctcagatgctgtttgggtgtatttgatcactctgggccgtttggggtccagattgtgtctgaatgggatattttatctcagtggattttgtgtgcctatgtgtctggatatgccttcttttcttttctcttgtttgttttcagagtctcactctgtcgcccaggctggagtgcagtggctgatcatggctcactgcagcctcatactcctaggctcaagctatcctcccgcctcagcctcccgagtagctgcgactataggtgctcaccaccatgcccggctaagttttttattttttattttgtagatatggagtctcgctatgttgatcaggctgtttttgaactcctggcctcaagtgatcctcccacctcggtctcccaaagtgctgggattacagacatgagccaccacgcctggcctgggtgtgcatcttctgagctttttggacatttgtgtccctgggtgtgagagctctatgtaggtgtctgcaccccaggatgtgaagtctctgagctgtttgcaattctgggtcccaagttgtgatgtttcccagctggtgttggtgaggacaattttgcttaaggtataaagtatctgagctgtttggaggagggaggggtctctgcccagaatgtaggttctctgatttgtctggggactttatcttaagattatgtgatgtttctgagctacttgaacttctgtttctgttttgtattaggttg

SEQ ID NO: 12444 - DNA, 6000 bp, Homo sapiens
tcgggaggctgaggcatgagaatggcttgaacctgggaggtggaggctgcagtaagccgagattgtgccactgcactccagcctgggcgacagagcaagattccctccaaaaaaaaaaaaaagtgaagagggggcactgaaggggtttgaaagcaagtgggtaacaataaaaattgggttttaggaagaggcttctgctggtttcttggatgatccttttaagagcaacaatagtggagtctgaccagttgcaattgtacaggcaagagattttggatggtgataataggaaagtaggtgggaggaggtgccagatccaaaaagtatgtaggagttaaatcagcaggacttggcagttgcttagatggggtgaagagggcgtgagtcccaggatctggcttgggtgtctgggaagttagtactgcaaccaattgagatacagcagttttagggggcaatgattgagtttaatttagggcatctggtgtagagggccagcaaattatttgctatatgattctgaagttcagtggagaagatgagctcaaagtagagactgggaagtcctcagcagagagggagtattgaaaccaggagatggataagctccccagagagggggcagaagaaaaagaacccagggaagagacaaaagaacaatcaggggagtacaagaaaccaggagagtcaggcttcctggaagccaagtgggagtttctaggaagagcaagtgatgaatatgtcaaatgcagccagaaaggtctgattacacaaagcctgaaaaattacagttgatttaggcaacggtaaagtcaccataacctgaggctgtcatccttcaggttcattcagacatcagccccatttattcaagtggcaaacactcagccaacatgcgtcctcagcatcctctcaaacgctcgccacagtaattttcatgtcccctgcagtccttcagcgtttaaaccaatcattcagattgtgccccagctcactcagaaatgacaggctctgtataatcatcacttggggttcttcttttcccctcacatagatgatgatataattgggattctttatatttgtcaatgtcacctcagagccagctggaaccagtgcagctctgtctttgcagaggtaactgcaggtgcccacaagagttaaatgggttatcttgtggtttttatctcccaggagtgaagaccacccaggagtaaagaccacctttattcttctctgtttcctggcagggctaatttgacacaatgctgcgtgttgcttgttttggtgtccttgctgggcccctttgcgcacctctggccctcaggttcccatgagacatgcatccaaactgttgagtatgtgcgtgtaaaggttgacatcactttattccctatttttttgtgtgtgtggagacagggtcttgctatgttgcccaggctggtctcaaactcctgggctcaagacatcctgctgcttcagcctcccaaaatgttaggattacaggcgtgaaccactgcactcagcccctattccctattttctaatggttttgagacagaggtgcgtgcaatcaagagagaggatgctcagtagcagaaatccccaagaaagtgggaggggctgggacacaaaacccagtggaagggtgagccctaaacaggacatctctgagacccaaggaaaggatggtgtgggtgggtagagacaattttggaggtggcaagagagaagtattcactaatggcttccgtttgctctaaaaacagttcttttaattgtgcagccctcagaaccagaagaagttcagagagctccctctaaacacagttcttaacccacaatccaaaagacccctgaggagtcagtgaatagaattcaaagagcccatggacttggatagaggggaaattgcatcattattttcactattactaacagaaatatagcatatccttccaggggatgtgggtaacaaactgcagtaatattagcacctgtgactttgacactaagagagatcagattttcattattacggttgttgcatatctctcaaaataacatcactatttcaaaaatcatggttgtcactagacctgttgatagagcttgctatttaatgtgttaataaagaagcacatatattactacattacaggtgcgtttccttttattttgaaaattgtaccccaatataattggtttcttttgtaatcctacttataggacgcatgcattattctgggaaggggttcctaagacttcaccagactcccataggtgtccgtagcatagaaaaggatgagaaacactgctctgaagagtaaccatagctaacacttatatagctcttgctaaaggccaagcactgttccaagtcctttttaaatacatagttgttaactcatttattcctaacaaccctacgaatagtcatttgtttatactcattttacagaagaggaaactgaggcacatcagttaagtaacttgtccagggtcattcggctagtaaataatagagctgaggctgggcgcgatggctcatgcctgtaatcccaacactttgggaggctgaggcagggcggatcacctgaggtcaggagttcaacaccagactggccaacatggtaaaatcccatctctactaaaaatacaaaaattagccaggcgtggtggcccatgcctgtaatttcagctactctggaagctgaggcaggagaattgcttgcacccaggaagcggaggttgcagtgagccaagatgcgccactgcactccagcctgggcagcgggagactccatctcaaaaaaaaaaaaaaaagcggtagaggggaagagatccaagacaactcgagaacatggtcagagagagaaaagatggtgtgtagatgctggggagggcaggaggttattccagggaatgacaagtgcaataaggtggcctggacaggtggttaaagtagagaggaggtgaaggttcccggagttgggcaggtgaaagaatcatgaaactgtgcctggaaattcttccaagattaattcattaattcatttatttcacacatttgttttaagtgtcttgtacacgccaagcagtgttctcggcattaggtgaaccagctggacaagcccctggtgccatggggcttaccttccagcagggggagaactacacaaacaaggccaggttagcggagcatgcaggctcacaagcctgtaggcacaatcctgcaatgccaaaacttctgaaaagcataaggttgttttttcatactttggagcccaaactcaatagatgacaaaacctgacctgaagtagtgtgaggctatttatagtctttattcacacttggtgtgaattttcatacctttcacttcagaaatattaatatttcattacgatgctccaggcttttctcaatagttatataatatagactatacaaaaagttatgtttgactagtttttttaaagagttatgtaatataaattacatgtcttcctttctcaaattgaaaaaaactctgaattccacagcacatctggccctaaggttggaaaatggattacggacatgcaagtgctatgaagataattcaaatatgcaatgggatagtgtctaggtggctacagtttgaatatttagggaggacccctctgggaaggtgatatttaagcttagttctgaatgaaaaaaaataaaagcagtcatgcaaagatcaggggagagcattccaagcagagggagcagctaatgcaaagatgaacacaaaggaggccactgtggctacagcatattgggccggatgaagagtgctataaattgatggaagcacttcatgtagataggaaaattgtgagaccggtgtgctaaatcctttggtaaatacggtgtagtgattatgagtgtggtggctgtcaacaactagaaggcctggaggggaatcttcctgggtgagaaagcaagtggggggagatatttcagatagagaaaacataaagcagttctgaggctgaaatggtgggctaagatttatggcctgaagaccttggtttgaggaaaagtatagaaggaagacagattagatatctgggctcaagactctaatgacatagcttctggaagctgcctgaaagatgttctaggatgacaaagacctgggtcttaaataatagtctctggttgaagtccaatctgcagtgtgtgatctgggcttttggacttaaattagacaaagatagaggagagtagcaaagcctgaactgatgaaagatgtttttgcctctttaggtttgtgcttctcagcagctgtcctagaatgtctgtctccaagcatctctcttagcggctttccacattcatctctctgtgatcctacctggcatctctcttcctatctcggcctcaacatatttctctttacatggctctctctctctctaactcagactcctcatctttggatctccttgtctgagtgtcccagaatctggttccgtccattcgtctgtgtctgtactgtaattctctttctccacctggactgtgccctcctggaaggcatgaatcttttattattccgctgggtatcccaggtgccccgcacaccgtctagcatataggagtctcaaatacattcatacttgaattaagactttttcagaggagaaaggcatccgttctcaatatccacccctcttcccccacgcggagcaggccacttgccaaaaggccagctagagagtagggcgaggggtgttgtggtattgtacttctgctattggtctctttccccagttgaaataactctggggataccttagcaggcggaatccgccctctggccaaaggactagcgtaccaggccacgcccccacgtctcatgcggcagcggcagacgccccggcccgtcgcatccgccccttccgccgcttcgcctcggccaatcaacgagcgcccgcgcccccatccccatcccgtggagtggccggcgacaagatggcagcagcgtgtcggagcgtgaaggtagaaggttctttgcctctgttgcttgccttcctttacgggccgggacagcgcggccgtggaactaggagaaagagatcggtttcgagggaaagggtcatgcttatgtaggcctggtattgtggccgttgggctcaagaggtgaaagtcagcactccgcggcgcatctgtctgtctgtctgtctgtctatctatctatctatcaatcatctatctatctatcgtcacgggacgggctgtctggggatgagatcccttctgcccccgaggtcccaacgctgaggagaagcagcacacctagtttacccgcaggggtgaccacgacctctcccctccccccttctcctcagaagcctggagaacaggcaggcgacagcgtggggatggtctgggcaatgtaacagctgaccctgaccatgtcccttttgacagggcctggtggcggtaataaccggaggagcctcgggcctgggcctggccacggcggagcgacttgtggggcagggagcctctgctgtgcttctggacctgcccaactcgggtggggaggcccaagccaagaagttaggaaacaactgcgttttcgccccagccgacgtaagtggggtcacctctcctctcccagggtgtgcatgaggtcaccaacaccggcctgggaacctgtgggggtccctcccataagggtctcctctatgggggcggtagacccatctccttgtctcttttggcctgagccttcaagcactgtgggaccacctgtgataaggattctctaaagctgggattcacaacaatgaggatggggattggacgtaacaatctcctggaggagttatgtatggtttgaaaatgcattttgtgccttgtaattttatatttacaaagtcaaaaaacttgttttcatgaaacaaactacagaaagtgaaacttgatgaaatcatcttagcaggtaaggatacaaaaaagct

SEQ ID NO: 12445 - DNA, 6000 bp, Homo sapiens
aaaagaggataaaaacaaatggaagaacattccatgctaatgggtaggaagaatcaatatcgtgaaaatggccatactgcccaaggtaatttatagattcaatgccatccccatcaagctaccaatgactttcttcacagaattggaaaaaactactttaaacagattcactcttttacacttcataaaaacactataaagtagatattatcagtatcttcatattacagacaaggaaactgaaattcagacaggtgaaataacctcccaaagttcacacagttaataaatggcagaacccagttaatctggctcgagggctgatgttcttaatcactgttcattcttgcagtaacatttagaagaaccaagtaccaggatgagatctcatcttccataaagtgacggagcaagtaattccagactcttcctcctccctcaacatctacaaaactcactgttcctgaaatgcagtaaacatcttaagacctccctgattttgttgatattgtaccctctgcctggattgcccctttccctgtgctttatccagtaaactcatgcttcataacccatttaaaatatcatctgtgctctgtagtgtttcctgaaataccttagggacttttaaacttttttccttttgctcatattgctttctctgcctgctgaataggggattgagaaagaaaacacattcttctttaccaaaagacaaaaactataaatagttactagctgtattaagatatatgccaggtgtgatggttaatatcgagtgtcaacttgattggattgaaggatgcaaagtattgattttgggtatgtctgtgagggtgttgcccaaaggagattaacatttgagtaagtgggctggggaaggcaaacccacccttaacctgggtgggtatcatctaattggctgccagcaaatataaagcaggcagaaaaacatgaaaaggctagactggcttagcctcccagcctacatccttctcccatgctgcatgcttcctgcccttgaacattggactccaagttcttcagctttgggactcagactggcttcgttgctcctcggcttgcagctggcctattgtgggaccttgtgatcatgtgaattaatactacttaataactcccatatatatatacatgtatatatatacataaatatatatatgtatgtatatgagagttatatataaactcacgtgtgtgtgtgtgtgtgtgtctcctattagttctgtccctctagagaaccctgactaatataccaggaccttttttaattctcctaataggaagatattcctactaagcatatagattacttataaaaggaagagtatgagcctgacattgaacattttagctctaattataagtgttattaaacaatgaaataatatttataacactctgaggggtgaaaaactggactttggaattttatacctaaccaaaaatgataagagaattctctgtattactctatgatattttgaaaaatattgattactaaaattgatatgggaagaagttttttaaaaaacgtataaacaaattatcatggaaaccattggaaaagctgtctaagaacaacccagctaccatcaccaaatggtattagggcaaataattatattggctggtattaccaaaacttacaagaacagatgtgttatttaaattaaaatggaaactatagaccaatcttacatgaagaagaaaccacagcacgtctgggacatagctatcatgctactctctgagtttcattccagaatgtgggtaagggatatagctaatgaaggagagagatgctgatagtgagaccaacccttcaggaagtaacccaacaaagcctgtatgtcttccttaatccccactcatcacaagtggttgagactatcgttaactgggacaaccttttacagagatattggataaaatgtaggaaaaaatctttaaaagatccatatcctttggtcgaataatcccattactaaaaatcaatactaatatttgtggtgatggttgcacagttctgtaaatatactaataatcattgaattacacatttaaaatgggtgagttttatggtttataaataaacttttagaaaatctatgctaagaaaataacctaagatgcagagaaaactttaagtaccatgatgtctactgcagtgcaactgcaaagtaaaaagttgaaactcctaagtcaccgaagtctattcaatcaaacattgtctgaatagttacttattgtcaggttgacactggggttgcagaaatgaatcagacctagactctgattccagaggaattcccacatgggtaggaagtcagccaagacacagaacaaatcaatgcagagagagagaggggactatgtagagaagggccaggaaagtgtttcctttggacacgctacatgagcatatgggactgaaacttacttctccctccagactacattgcctcataaaaaggtgagaatcacacaaccaccacccaaagagaaaatgagacattttcctctaaaggagaggagatatcaggcacaaccacagccacctacactcacgggctcagctggaccaggaatagtacagagaggcaccacctaagtatccttcccaatgacctgggaagtcccacacactttcctccattagggcacttcgagtttttctctacgtcacctcagaggtttgttaacctcagtagattttattcttccagttccttttctgggtacaggcagaacagagtagaaagaacggaggaaatgcatctgaatgcaacaggcatttctgacagcccccctagtcaatggttccagattcctgtcagcaagttgctcaaggtctgatgtgggaggaagacataagacaaggtgccagtagtacagtgtgataaattctgagagagaagatgtgggggcccagaagagggaacaagatccagtgtgggggtttaaaagggcctcccagaagtgatgacctttgagctcacttttcaaagtgacaaatggttagccagctaaagagttggaggtcaaggttattgcagctgcatttgaaataccttctagaagaactggaattaatctttagttttaaaaatggttaaatacaccatgctatacccatactctccaatttacatgccactgcatctccactacctagcaccacacctgacatgctataggcactcaataaacatttgttgaattaataaattaatccagatgaagcagcaaatatcacagaaaaggagttaatattaatattattcaaagttcttctcatctcatcctcacaataatccaatagggtaggttctatgactgtcccattttatatatgagagatctggagataagtgaaccaaatagctaaggtgttggtgacttggtgacttgggtgagtctgactccagagtgcatgcttttagtccactatattttactgccaacccacccccaaaatgggcaaaaagtagaccactcagaagagaaatagacaactgataaagaaacatgaaaagacacccaatctcattaataatgaaagaaaagcaaatcaaagcaacactgatataccatttttagtgcctataagattaacaaatattttaaaaattgaaaataacaaatggtattggtgagtttgtgagaaaatagatacacatttactcttatacaccactgggtggggaggggtgtataacacatgtataggacaaattggcagtatcaaaaactttaaatgtctattacctttagatccaggaatgcttatattttaggatgccaccctctaaaaaaatgctctcacaaatgccaaaagatgttcattgcaacattaatcataatggaggggggaaaatccttgggaataacctaaatttatatcaataagggagtgtttaaataaattacagtgcattcagattttgtaacctccatggtatattggcatatggttgaatgaaaaacaaacaaaaaaaagaaattgcaaatcaatatgtagactatggtcttatttatgtaaatataatattaatgatgacaatctgctctaaagatgaaattgtctggttataacatggtcctgctgccttaggattgataagggaaggggaaaaagagagtgacaaaaggggaagaaaatgaaaaagggaggagaaggtaatagaaaagataagacagagaacttcacatttttaattgtatattatgagaggaagagaagagtgtgggttctgtaactacattgcctaggttcataggcgggctctgtactttctagttgggtaattatcaacaagttacctcacctctctgagcctcagtttcttcatctgtaacatagggataatagtacctatcttttaaggtccttatgtggctaaattaattcatgtaaagcacttagtgaagggtctggtgcattgtaagcactcagtcaacagtaggtgttatttatttgggccaggcactgtggtatgcgttttccatacatgatattaccaaattgttacaacaaccggggatctagtctgtggaagctgactgtttgagctcataagcacaacactgtattctaggtctgactccagagccctcccaacttgtgccacagtcacttctgggttttattgccctccttttatagttgaggagatctatagtcagagaggtggttttgctcaaggtatcccagctctatgtggatggtctgattccaaagcccaaatgagctaattttactgtcctatagagagaagaaaatagggaagagccagagctgggggagggggtacactagagggaggggctactttgggttttatctctagcaaggaagggactgagatacctttggggccaatgcagggccaggccggcagaaggcagggtgggtggggctgagtcagaggagaagggataaatgccaggtcctaacccaagtacccacctgtcattcgttcgtcctcagtgcagggcaacaggtaagagctgctttcagcctggcaccctatctctggtctgccagctggtctctcagggctgtacacactgactctctggtctgagtagatctgactttttcctttgtttgtttcttagaatctgtctctttttcattttctttttatctcccatgtctctttctgtctttcctcattttcagcttttttctctctttttcccttcgttactttcttttgttagttttcaagatcattcatttcatttcatcattctctgacactcttgctttctcttatttttccctctgaattctaactatctttttctctaaatttctttctctccccctttttgtctctttcctcggctttgtatctctccgtctctgtgtttctgtctctctcttcctctctatcaagaacgatggcttaatatttcttcctgcaattccccattcctctctccctttgactccctctacctgctgggctgacagcagagctcagtgggtcagagcccatggggagcctaggggtgggggaagagctagggagggaaactaagaggatgtgggggtgatgggaatgatgaattgggtaaggagagatttggggaattgagagatgaataattagcagaaataagtgaagaaagtggaagaggaatgtagtgtcactatacagaaagtaaacagatttctattctcatcctaattcactgtgagaccctaggcaagtcattcactctctgaaaaaaaggcttggcctgtaatttccaccaccctttctagttttgattttgtgatcttctaaattttcctgtttctaagaatttctgattctctgattacagttatctaaagttctgtatgattctttcatggtgggaaaggggtactaggaagagaagtaaggcctgatgtttccaactcctgaagagaaattaccacttcccttccagacctaattgacttttgcaaagcaggccaca

SEQ ID NO: 12446 - DNA, 6000 bp, Homo sapiens
ctttattttacttcatggtactcatcaacatttgacatattatatacaatatacatatttgttagctagatagacataatcaagaaaatcaaatctttctatgaagcttgttaaaatatttccccttccccaagacaatcattttcaactttgttagctgttttttttttttttttttggccagtgtttgacttcatatctctgaataacatgctcatattgctattgttattcttaaaaatctagctctaattcactccctcacctctattcacccaagtcctgcacatacatatatgagtatttcctgtcttcatattccacaacttattattaataaataaattatttatagacaatgttggtggtgagagcaagattcagtgtttatgttactggtatatcatggctgagccatataatatataattatataatgattgattttccttttgatatttgcttggttgttttttaaacttttttctttctattaaaatttaagtttcatgtctgtttctttattactatatcccccaggacctagaacagtgtcagaaacatcaaaagtgcattatatgcatttattcaatacctattatatgcctggtcttacgtctagggtcttgtaaatatcttcatcatggcttctttcaaactaccaacacaatgtcactaaacacagagttaggaataaattcacacaatcagctcttagaatttaagttgtctctagtacaccattggttgaaatccagtcacctaaatttctgtctattcccttcctcttccctgctacagaactcctagggatccccagaacataggttgaaaatccatgggtgaatatgacacctttagagtatagatgggaacactgaggcctagagaggtgaatgaacccgggtctcctaatgcccattcccatgctctttccactgcattatacaaccaatagtctaattagtctctcagttttctgcttccaatttccccatcctattccattgatattctgcaaacagatttggtcctaagaagctgctttcaaccgcagcaggcccccgtttcaccatagaagtttctacggctcccatagaagtctttaagatcaagtctaggcattttggccttattttcaataccctccacaatctggcttagctttttcttctcctgcctttctaaatatacaccaagctaaagtccaactgactctccctgttcatcagaatcattcttgcctttgattgcctctggactttggctctttctctaccacttacctggaatttttccccatcctctttgcctatccaatgctaaccaaatctcacatcccagcccacactccagctcctctagaaagctttcctaaaccactgaagtccatagggattgctaccacttctcaactcccattgtacaaaacagtttctgccattcctttgtcccttaatatgtaaggcctgttattgttagttttcttctaaaccctcatgtttatctttctatgtatttttaggttgatgtttatatgtgtatttctctgtatatgtatgttatatctgtgtttttatttaagtgttcatatgtttatatgcatgtattatctacctatgtcctgcttaagtgtatgaatctgtgtttcattgcttgttttctcatgtctatgtgcaggtctatgtgtatttgtgtgtttgcatgcatattttgtgtgtctgtgcttacatgtctctgtgtgtatattttgtgtgttgtacatcaatgtgctcacgtttgtgcttaaggccatattatatacatatgtatagctatacacaaatgtgtgaccatatgtatctgtgcatttatgtttatttgtagtacttataggggtgtgtgtgtgtgtgtgtgtgtgtgtgtgtgtgtgtgtccttgagcagggcctgtgtggatttactctttgtaccactgcttccctccaactcagtaagcccaaggtgcacatacacacaggagggtctcagataatgtttacacattgataaatttctccaacctgacctttcaacctttgtctagaaaggtgggctatgggggtagaaatagacacagagccacagtgacctctgaatattgggcctcaaagggtgtgagtcattttctctgctgctcacccacattctgtgaactcctaccacatgcacagtatcatctcatgaagcactgagcttgaaaataagaaaaacgtggaccccttgaattaaagtaactatccatctctctcctcttcaaccacttcatcttttctggctcatgccctggtgcatggagtatcaaaggtacaattttttgaaacaccaacttggatggtaaattacacttctgtcatttatcagttgtgtgaccatgggcaggttccacggtacctccagacctcagttctctcaataaggaaaggttattcataatgtcttccttgtgaggtaaggcctagggataatgtgcacagcacagagcaggagttctacaaatggtagttttagtatcactttacctgggaagccttcccacgctactatttccttcactaaatactgcccaaaccacaagttttacagctcagttaataattcaccttgtattagtggttcatatgtgtttgtctttcctttacactaaaatctcacttatacagggaccatacctaacatttcttttctctccctcacaacatccagaaaagacctggaactattgtagaagtggtcattaaaggtgtgaatgaagcagaatagtgtgttacttaacagtatcatttctggaggcatatagctaggagtttgaatcttgtctaggcaccctctataaaagtaagtgatttcaccattctgggttttagacacatttgtaaaatggggatatattgaattcattcattcaacaaatatgtgggctctacaatgaaaaagaaaagtagtgtaagggagtatagagtggtagggagagatacaagagtatgtgcaataatacccacctgaggggttgtaagaaccaagggaaataacccatgcaaggtgcttaattcagtgactggaagagtaaaagattttaaatagcaactatcattatatagttgttattgtatgtatagtatagtttgatttttataaatctgaaaagatacaagcatcaagtataattatgttcatgttacaattagggaagctgaggttcagagagatttgacttgttcaagatctcagaatgaagtagacacagagccaggcttatctccaggtttctgacttctcatccaattcttttactaatcaagagggctactgagcctactgcaagactggaagtctttcccagccttgaagtaatgttgtgcatactccccaggacatttatttatcttcagatccaggaggtcctaataaaatgcaagaggtagcacaaaacacacaatcacctggccaggcagaaatttacatctgtccagtgggctttttagcggggaaggggaggggtgtgtgtgtgtgtatgtgtgtgcgtgtgtgtgtgtgtgtgtgtgtgtgtgtctgtgcggtggtggtggtgtagtggtgatagggtgttggttgaaaaatatcaaaggagggttctgtgaagttcagggtttcctgagtgaggacccggtgggaaaaaatggctgaaatttccagtgagatggaatgagtgcagtactcaaaaaacaaggaacaaccagccaagggggattgggccctagaggcagaggtgattgatagaattccatgtaataatgtgtcctgaaatgctggaatgtctccttagcccgtgcacagctccaaatcatctgcatgcagccaccccttggcaagtatgtttctttatattcccactccccatctctgcacaaactcctccctcccctgaccaagtcctttcctatccctccaatcaaagagtaaactaagcttagctgttacttacagtgcagtatgaatttttgggatgtatttgtgcttttgaaagtgcttattgtttcaaagcttagtagacaaagcgcagtgccaaacctagttagactgctgatgaaattacagtcactctggggcctgtgaagaggagcaatttctggagcagttgagctttgctaggaggcataatattactctcttgtaggtcaagggcctgtaccaattggaagtcaatgaaaaattcaacctaatacagcataccactaatgggctgctgcactggaggctaggcttaaatttcccttaaaagaagtaaaaaataaattccttatgaaaaagcatggagaacattaatgaaaatgaattctcccttaccatcagagaggtggagccattgtagaaagtgattcaaagagcttccccaatatgagatatgaggcatattcacccataacagccttatccattggcttgtcaattattcaagctttgatgtgtagaaagccctttaatacactaaactcttgtactcttaagcccaaaagcaccccgggcccaacaccctgtccagttgcataggctgcacaggcaagggttaacagtacaactaatgaaaattgggtaggtcagcaaagttgatctcttctccctgggctcaccacaaaggaaaacaccgccatactggagtgggaagactcatcccaaaggtcgcccccacaacctctgaatcttgtggaggagactcaaaataaatacagcctaggagatcaaagaccagaaagccccattggctccaaggaaagtcaagtcaataccctagcagggggaagaattgcttcactcatcctggaacctccaaccccaaggaggtgggggaaggggggcaccccacatgacctgtactgaaatagggaaggaaggggaatgtgtgatgggactaggagtttgagtgagagatatagggaaggaagggaagtaagcagtcacagacgctggcggccaccagaagtttgagcctctttggtagcaggaggctggaagaaaggacagaagtagctctggctgtgatggggatcttactgggcctgctactcctggggcacctaacagtggacacttatggtaaggcagaaaggggggcctggctgccattgctggcttaggcaaaaggctagagggttggtgtttaatgtctactatggaaagcctattcctactgggcaggtgagtcttctcagccaaactctgcaggctctctcagccttgagcaaaacggatggatgtagttgaaggctgctgaagaagccagaaggcaagtttgggcagaaattgaaaaaggatttttctcttggaaaacatctgcattattttctagggcttgtatctcaggggcatcaagaaggttcccaatgacatccgaatctttcctccatctgctgtctctcatctaaaattctacaattggacttaaccactctgcttccaagctttggtctctgttaaaatatacagcccccgaagaaggagtgttttctaagagttggataggactatagaagtaacctataccacccttcattgtcatgaataagtgctcagaaacatccagtagtgattgagatttcactgttcactacctccccagaccatctagtccatccaggagcagctccaactgttagaaagttcttatttgtgttgaactaaatccagttccctctgacttccatccaaaaaccccagctttgcttcttggggctacacagaacatagatgcttccttgccctgtgatagcccttcaaagccctgaggacaagtactatgtctccttgactcttctctcctccaagctgaacagccccagctttttcaactggtcttcataggacttggtttcttacccattcctgggataactcacttccctatagacatggctcaatttgtctgggctatttatgggctggatacaaatcccaaaggaggatggactattccatagtggcattatttccttggagcttgggaagc

SEQ ID NO: 12447 - DNA, 6000 bp, Homo sapiens; identical to SEQ ID NO: 3793

SEQ ID NO: 12448 - DNA, 6000 bp, Homo sapiens
cacgtatactttaattctcaataacgacaatgagggcactctgctgggttccttacatgcattgcttcattgtcttctcacaacaagctaggtgctagcatcctcattctacatatgaggaaatggaggttcagaaagacttatccatagtcatagccggcaggcgatggagccagagttcaaccctaggtctgtctgactccaagcctgcattttttccactatatcacttaccttccctccctcattttcttccctctccctcccttcctacctttattcctcctttctcccctccctccctccttccctccttctctcccttccttcgttcctttcctcctaactcagataaagagattagaaatcatgcctcttccccctttccttcttaaagccccaaggaaacagcaaaccttgcaaagaaactgtcatcaagacaattacgaatattagatgtgaagggccaggagggagaggactggaacaaactggaggagtagggcaatggaagggtgtcagcaataatggtatttgtacatcttatttatctctgtcagggaaaaaatagtaaacttttcctgcatactaaattccagacatcaatgagatacccaagtgtgtgtgtcctatagcaaacaacatatatagggcttagattatagatgtgggaaccattcagttcaacaaattataattaagtcattcattcactcaacaactattattgaacatgtactatgtggaaggtacttgttttcttaactctgaattggaaggcattttttgggggacagcagagaatataatttgaaaggaaatatctagaacatatgttataataactttacctggaaggctatgggaaagacagaggtaaaatgaggtacatgttctcaaggagctctggttctggtatgggggtgggaggatcaggaggagatggccaaaaacacaaatgagtataattctaggctgcctgtggtatgtgccatctctgtagaaatcaaatgtgataagagtgtgagagaaggagagatgcattttgattagagagagatctgtatgctggagtctcttggccattacaatttttgataacctctgagtcatagttgaaatcatgagagtggatgttccaagagagaaggggaagagagggtgggggtagggggagagagatggtggagagggagagagaggagaggagaggagaggagagaggagaggagaggatctttgggggaaggctcacatgttggggaagtaggggaaaaaagagccagggaaggggccagaaggaacatccagaggaagaggagaaccggagtaaagcaaagtcacaggaaccaaagtaaagaagagtttcacagaagagagtgaggctgatctgctgcattccgttcctcttggccctgggtgaggacagtaaaagccaggcaggtgtgccggttggggagggttgggagaggtcttttcctgaaatagccactgggcggcagtggtggcagcagcagcagctgcagctgtgtcgggacatgcagaaacgtagcagagctaagtcaggagaaatgtagcagaggtaaaccagcctgaagcagtaggagcaggaagctggctcaggctggggcttctctagtgtagtgcttctccttgggtgtacaccaaacttcaaaacacgcttgtccacctctgcagaggccaggttcattcctgggagcaaagcagtaacaaaaaacaccttctaaacttgcagcattttatggttcacaaagtgctccacacctgttaaccaattcaatattcaggaaaccctaaaagattggtattattattattcccatttcactggtgaagaatggaagttacaaagaggcgcccaggctcacataactaataagtggaagagcaaggatttaaacaccagcccgtctggcttcaaaaacttgggcctcttatgtaatgtcacagtagtcagctgtccaggactcaggttatgactgtgtcctccactgctaccttttattccaccctttactctgccacagggcaaggatcttcagtttccccatccaggtttctgggctttccgagagatctagattctagattctagaagtccgcctcctcctctcactcccaggatccagctgggtgacattctcaggacctgaggatcaagtaagttcagagtccccattgcttctcagctccatgcagagtggattctgctccagcctgctcacccctccccaaaggcactgcttacctcatcctcagagtcctccagaccgggtttgcctctagtgcctaagatatacttacggaggcttagttggcttcaggagccccagatcctgagctgctggcaattccctacaccaggctctcaaacatctaggcttgctctctgcaccttctccactatattcagaccaagtctctgggagtgatcaagagagacgaggggtactgtatagaaaggggtagagtctgtatgggaaatgtattggctggtatccttaaggaggcatgaactgtctcctggccatcccctcttacatgtataataggcatctcaaaatttacaggctgaaaagtgaactcccaatctttcccctaaacccactcctgtctctgtcaacagtaactctattcttccagttgctcaggccggacattttggagtaatttttgactcttctttctcttataccccacatcagtaaatcttgctgtccctacttaaaaaagtctatccagaatttgaccacttctcatcatctccaccactgtgatccaagctaccatcatctctatcagcaatagcctcttgactggtcttccccctgtacctccagccctgcagtctattctcaatatagagctggccagtgagccttctaaaatgtaagtcagatgacacctctcttctctaaaccctaagtgccttcccgttcaccaaagagtcctttacaatggcctccaaggaccttcatgatctggtccctgccaaactctctgacctcattttttacttttccccttctcacaacacctggcctttattcaaaagtcacccttaatatttatttatttacttatagacagggtcttgctttgtcattcaggctggagtgcagaggtctgaccatagttcactgcaacctcaaactgctgggctcaagtgatcctcctatctccgactcccaaagcactgggattacaggtgtgagccactgtgcctggtttcattcctaatatttaaaacaacaaccctctctattacccttttccttccctctttattacccttttccttccctctttaatttttctccataatgatgatcacaatctacatattttacttattaattttattatcccccagtagtatgtaagcaccattagggtgggagtttttatctattttgtccactcctaaggaactaccagtaactagaactggaccaggcaaaagtaggctctcagtaaatattcgtggttttaaaaaaattatttatatttgagacagggtctcactttgtcacccagattggagtgcagtggcgcgatcacagctcactgcagcctcaacatcccaggttcaagcactcctcctgcctcagccccccatgtagctgggacatcaggtgcatgccaccacgcccgactaattttttgtagagacagggttttgccacgttgtccaggcttgtcttgaactcctgagctccagcgatctgcctgcctctgtctgccataaatatttgttgattctttcctggatcatagccagtggcttagagaggcaacttaagcatagcaattaagttatggatgctagagcctgatccaaaggcaggcctgtcttggttcaaatcttgactctaccactaactagcaagacacctaaactttctgtgccttcattttttcatcagcaaagcagagacaataatagtatctagctcatagagagcctatggggtcattaataagtataaagcacttagaaaaatgcctgtcacatagtaagtgctatataagcattctttgtaattatatgcatatgagatttatattaaatatcagtagtttagattttctaaaatctttcaatgtgttgtcttgcacttgcccatgtgaaaattcgtttcccatgtttctgctcacttacacaggcttgtatgatccccctgtaatctatctccagggacctggctcttcatcagtaaacttggatgtttcctcgtgttctccctcctgcagtcatttcaaagctgttaaatagtaatctcgctgggccccagtttcccaatctgtacaatgagtgggttggactaggtcatcgtaaagggcctttctaactcttttaatctcccaggtgggaggagggacaggccccacctccaactccacctccttggatatgccctctggctgccaaggggaagggtgacagagtcagctgagctcagcttcaaggggaccaggtaggagatgtgccaacgttcttgggcaagggtggcaatggggctcctgggctgtaggcaggcagtggggaaggtgtcataggtaaatgtcatctggagacactgtgaccagggcactaggagaggcgaaggcactgtggggagagacactcctcttccagggatatagctgtgatgacgagtcagaagacactttgggtctgggtatcttcccactttggatagtgctgggaggcctccaccctcttcagccagccaggctcttagggacagagtgagctgcagagtgagtacaacccaaatacacgggctgcctgcctgagccccagcactgcctgctgcccaccacttcccaagctggaccaagggagcttgggtaggggccaggctagcctgagtgcacccagatgcgcttctgtcagctctccctagtgcttcaaccactgctctccctgctctactttttttgctccagctcagggatgggggtgggcagggaaatcctgccaccctcacttctccccttcccatctccaggggggccatggccagtacagagtcctccctgttgagatccctaggcctcagcccaggtcctggcagcagtgaggtggagctggactgttggtttgatgaggatttcaagttcatcctgctgcctgtgagctatgcagttgtctttgtgctgggcttgggccttaacgccccaaccctatggctcttcatcttccgcctccgaccctgggatgcaacggccacctacatgttccacctggcattgtcagacaccttgtatgtgctgtcgctgcccaccctcatctactattatgcagcccacaaccactggccctttggcactgagatctgcaagttcgtccgctttcttttctattggaacctctactgcagtgtccttttcctcacctgcatcagcgtgcaccgctacctgggcatctgccacccacttcgggcactacgctggggccgccctcgcctcgcaggccttctctgcctggcagtttggttggtcgtagccggctgcctcgtgcccaacctgttctttgtcacaaccagcaacaaagggaccaccgtcctgtgccatgacaccactcggcctgaagagtttgaccactatgtgcacttcagctcggcggtcatggggctgctctttggcgtgccctgcctggtcactcttgtttgctatggactcatggctcgtcgcctgtatcagcccttgccaggctctgcacagtcgtcttctcgcctccgctctctccgcaccatagctgtggtgctgactgtctttgctgtctgcttcgtgcctttccacatcacccgcaccatttactacctggccaggctgttggaagctgactgccgagtactgaacattgtcaacgtggtctataaagtgactcggcccctggccagtgccaacagctgcctggatcctgtgctctacttgctcactggggacaaatatcgacgtcagctccgtcag

SEQ ID NO: 12449 - DNA, 6000 bp, Homo sapiens
aaaacagtagggatatcacattgggtgggaggagatttttactttttattttatattctctcactctgtcacatgaacatgttttgctcttgtaattttttttttttgagacagtgtcttgctctgttgcccaggctggagaacagtggtgcaatcatagcttactgcagcctcatactcctgggctcaaaagatcctcctgcctcagcctccccagtagctacggctacaggcacaaaccaccattcccagctatttttttgtagaggtaggatttagctatgttgctcaggctggtcttgagctcctggcctcaagtgatcctcctgcctcagcctcccaaactgctgggattagaggtgtgagctgcagcatctggcctgcttctgtaatttttaaattaaaagctaattttaatgtgctaaaactggaactgggactaaaataaataaataaataaataaatttaacatgctagcataaattcagtcacaaatggaaaaatagaaaatctagaaatatatgctagtatatttaagaatttaatacatgataaagtacatatcatcaaagtcgaagaatgagtaatgaattgtgttagactgactgatttgtattttggcaaaaattcaagttacatatgtatatatatttcacattttgtatatcaaaggaaattcaaaatatattaagagttatgtagaaaaaatgggatatcatctaggaaagtgtggtcatttctaaacttttaatttctttttcttttttgagacagggtcttgctttgttgatggagtgcagtggagtgatctcagtttactgcagccttgacctcccaggctcaagtgattctctcatttcagcctaccgagtagctgggactgcaggcacgcaccaccatgcctggctaatttttgtatttttagtagggacagggtttcgccatgttgcccaggctggtctcaaactcctgagctcaagagatccacccaccttggccttccaaagtgctggaattacaggcataagccaccgtgcctggcctcaacttttaattaaaagaaaatcaaatatatggataatttgagtagtataagcaatacccatattgttcacctagattcaccacttttcaacatttgtcacatttgctctgtctctctccacacacatgcacacacacattatttttgccgagccattttcaagtttattacacttcatccctaaatatttagcacatatctcctaagaacaaggacattctttcctacataacctcaatattgttatcatgcacaagaaattaatattgatacagtatcattagctaatatacaggccacattcaaatttctgctatagtcccaatcatctcctttatagatgtttttttagaattccaatccaagttccagctggggaccatgcacttcatagtgtcatgactctcagtctcctttagttcctttagaacagtccccctacctaaaaaaaaaaaatctttctttttcttttctggtttttttgagacagagttttgctgttgttgcccaggctggagtgcaatggcatgatctcggctcacctgcaacctccgcctcccaggttcaagcgattctcctgcctcagcctcccgagtagctgggattacaggcaagcgtcatcacacccggctaatttttgtatttttagtagagatggggtttctccatgttggtcaggctggtctcgaactcctgacctcaggtgatccacacgccttagcctcccaaagtgctgggattacaagtgtgagccaccgtgcctggcaaaaaatctttcaagacatttgcagaactctagctagttgtcttttgtcatatagaatgtcttacaatctggatttttctggttacatcctcacaactagtttcagggttaaacgtttttggcaaaaatatgtcatggatgatatgtacttctcattgcatcacatctgctggcatataatgtcagtttgccccattatttgtggtgctaaacttgatcacttagctaaggtgttttccaccagatttctccattataaagttactgttgtaggaagaatattggcccccgtgactttttcccttggtgcttgttagagcagtgaatatgtttcactgtatggaaaatgggcttttgcagaggtaattaaagttaccaactggccagtgcagtggctcacacctgtaatctcagcactttgggaggctgaggagggcagatcacttaaggtcaggagttcgaagccagcctggccaacatggtgaaactctgtctctactaaaagtacaaaaattagctgggcatggtggcgcatgcctgtagtcccagctgctcgggaggctgaggcaggcggatcgcttgaacctgggaggcagagattgcagtgagccaagatcgcaccactgcaccagcctgggcgatagagtgagactctgtctcaaaaacaaaacaaaacaaacaaaaaacacaaaacaaaaaaccctaatacaggacctttccctttataattaaactataatctgttgggtggtattttgaggtcatgtgaatattttgcttcccaacacccaggatcatctattgattatccttgcctgaatcagttattactttggtgagtgcaaaatggtggttttctttctttttttccctcaactgaattacattttatttattcattttatttttggctttattgaagtatagttgtaaataaaaattgtatatttttaaaagtgtacaacatgatgtttttatatatgtataatatagtgaaatgattatcataatgaggctaattaacatatccctcacctcacataattactattttttgatgtgataagaacatttatgctctattctcagcaaatttcaagtatatacatgaatatacaatactattaactgtatcaagcataatacagtgttataactataatgaccatgctgcacgttagatccccagaacttagtcatcttgcataactgaaactctacatcctttgaccaacatctaggcaaatttacagaggcaaaaaaattgatttgtggttgcctagggatacggtgaggggattgggagaaaatggggagtgtctgggaatgggtacagggtttctttttggaatgatgaaatgttctaaaactgattgtagtgatggatacacaactctgtgactgtatactaaatcctattgaattgtactctttaaaagactggatttcatggcatttggattttatctctgtgataaataatcaatctcataatccaatcaatcacctaatctaagcaaccagatcatatacactaatatatcgttccaaatatgtatcaagtttttcttgagtactttccatgtgccaggcaggaagacttgacttcataatctcatctaagcatcacaacaaccttgtgaaatatgtatattatgtccagaaactgaggctcagggatgttaggtaatccacagtggctgagctgtgagtttaacctaggtgcaattccaaacacagcactcctaacgtctatgtaataaggtttcagttgtatagtgtgtgttttctttccctagttagattaggactaggagggcaaggattttattttatgtttccttcatagtctcttcattgctgtaccagctactacacatagtgctcaataaatgctcaataaatacttaatgaatgccaaatggagctgcagctggttgaaaataccaattctttcagaacggatttagattttagattcatgggtaatatattcatcatggatcattaaaagaagcaaggatatttgagtccatccttagtccccaagatgtcttggtggagcagggaccacactttcacaacctttggtgctttcttatgagtaagaattgattgggtcagatggattatggatctgacccaatgtgatcattcgtagattcttcgggtccttttctgtttcctagtatctcctagcctaaacggacctaccctgctgctgatgcctctccctgtttgtctttccttgtggccacatccctcttcttgttcatttgaataagatatggtgcctacgggaggcaggcattgaagtccaacaggccaggttttatcaaaggtggtcaacaataattatggtgtggtgtcaaacaagtcatgcctctgagcctcagcttacacatcaataaaatggaactaaacaagcttcctcctccaagatgttggtattgtcagaatttcacatttaatagtttaatatttataggcagctggagacacattatagagagattggggcctataaatcaatttagactggattaattatctgtatacaggtggcttgaaatcatcttccattctcctgctgcctgcattagaaacacccacagctgagcgtgagagctgaagggtcagggtcagatgtgtagacaagaaagctaaggaagaaagactgagagtgaggtggagactcccctgctgtgttccgcttcactcctgacacacacacacacacacacacacacacacacacacacacgcacccaactcccccccatcacaccccacctaccttccccattcctgcccagaatcactggtcctaacagggcacagaggtggaaaatctcatgggttctttggccaggaagcctcttattgtcctgttctgacgaccagcgagacaaatgggaaaagactgccctcccccttttctcgctccccggcacgccaggcttgctagtgaggatgggacgcagtctcaggccccacgcaatccttttgcaaagccaagaagtgtgtgtgttgtgtgtgtgtgtgtgtgtgtgtgtgtgtgtgtgtgtgtgtattgtgtgtagcgaggaggattgggggtgggatcccatgacgttaccggctccgcctcctggtgtatataaggggcgcttggcgcgcaacgaccccaagccgcagctttgaagcctgagcggccgaactcggcagctccaacccaactcggcttaactccgcctcaccgagcccagtccaagactctgtgctccctaggtttgcaacagctctctggtaagcgttggggacccacacgtgtgtcggaggggggacggcgagggtccgggcgtacctaggattctctggcaaccatggcatgcagttgcatcaacggggccgtgacctgttgctggcgagacccccgccccgggagttagggctcccgtctccaccccagctccaaaccatttctagatgggggcaggaaaatctgggacctgagtcggggggcatcgggtggaacccttcctctctgctgagaggagagtgcgagcaatctcgggctgccctggggcccctctgggggcgcatctccaaatctttagatgtcgaagccccgcctcgctgttgatgcttgcaggtcagcctagcagggcttgggaggaagtaggggaacatttgcttactcccctgggcgacagctgcgctagttgagcagtgtgggcttggtgaggagggatggaattgagtcggtgctcacttttaatctgcagcgaggttggtcccctctccctctggggggtctgggggctgtgtctgtttgaagccccgggggaagcccctgggtggagctctgtttaattcccaaatagccacaggccaaggaactgacacattaggtttcaagattcctgggttgagattaggataaaccctatcagtttctggcaagagaaagagacctaatattgattgagcacttactaggcgccagccactctacttcagggggctttcacgtgccatttctgaaattagcccttccaaaaaccttgtaaggtattgtaattcctacttgtttatgaagaaactgaggttagaggtaaagtgacttgcctttgtcccttccatatccccgtcctcatttcccaatagctcctttgcttggtggagggggtcttgtaattcgctttc

SEQ ID NO: 12450 - DNA, 6000 bp, Homo sapiens
tgggattacaggcgtgagccaccaacctgaaggatatttttaaaaagataatttttcttttctttctttttttttcttttttttttttttttgacaaggtctcactcagtggcccaggctagactgcagtggtgcaatctcacttcactgcaacctctacctcctgggctcaagcaaacctcccacctcagcctcccaagtatctaggatcacaggcgctggccaccacacccggttaatttttgctttttttttttttttttttttttggtggagacagggttttgctatgttgcccaggctggacttaaactcctggtctctagcgatccacccacctcagcctctgaaagtgctgggattacaggcatgagccacagcacccagcataaaagaattttttagagcagttttagattcacagcaaaattgagaggaaggtatggagaattcccatatactgtctgccctcacacatagataaactcccccattgacatcccccaccagagtgggccaggcatggtggctcatgcctgtaatcccaccactttgggaggccgagatgggtggattgcttgagcccaggagttctagaccagcctgggcaacatggtagaacctctatctctccaaaagcaaaataaaacattagcagggtttaggggcgggcgcctgtagtcccagctactctggaggccgaggggagagaatcactcgatctcaggaggtggacgctgcagtaagccatgatgaccccactgcacttcagcctgggcaacagagtgaaactctgtctcaaaacaaaacaaaacaaaacaaaacaacaacaacaacaacaacaacaacaacaaacccaccagaatggtatattcgttagagttgatggacctaccttgaacatcattacccaaagttcatggtttacgttaaagttcactcttgatgttattttatacagtctgtgagtttggacaaagaataacatgtgtccaccattgtagtatcttacagaatattttcactgacctaaaaactttttctgctccacctattcatccttccctctccgacaacccctggcaaccgttgatctttttactgtctccatagtttcgccctttccagaatgtcatatagttggaatcctatagtaggtggccttttctgcatggcttctttcacttagtcatatgtatttaagttttctcccatgtctcttcacggccttaatagctcatttctttttgcaccgaataatatttcactttcaggatgtaccacagtttatccataaacctactgaaagacaccttcgttgcttccaagtttgggcaattatgaatgaaactgctataaacatccgtctgcaggtttttatgtgaacacaagtcttccactcctttgttttttttttttttttttttttttttgagacgaagtttcgctctgtcgcccaggctggagtgcagtggcgcgatctcgactcactgcaagctccacctcccgggttcacgccattctcctgcctcagcctcctgtgtagctgggactacaggcacgcgccaccatgcccggctaatttttgtatttttagtagagacggggtttcaccgtgttagccaggatggtctcgatctcctgacctcgtgatccgcccgtctcagcctcccaaagtgctgggattacaggcgtgagccaccgcgcccggcctccactcctttgttaataccaaggaacatgattgctgaaagagtatgtttagttttataggaaactgccaaaccgtcttccccagtggctgtaccgtaccatttttgcatttcccccagcaacaagtgagagttgttcctgttgctccacatccttgccagcatttggtgtagtccgtgttccggatttgggcaatttttttttttttttttgagacagggtctcactctgtcacccagactggagtgcagtggtgcaatctcagctcactgcaacctccgcctcccaggctcaagcagttctcctgccttagcctctcaagtagctgggattacaggaatgcgccactattgcctggctaatttttgtattttttagtagagacggggtttcaccatgtaggccaggctggtcttgaactcctgacctcaaatgatccactcaccttggccttccaaagtgctgggattacaggcatgagccaccatgcccggcctcttttttttttttttttttttttaaacaagagatgggatcttgctgtgttgcccaggctggtctccaactcctgggctcaagcaacccactcgcctcagcctcccaaagtgctgggatttcaggcaaggtgtgagccaccttgcccagcccattttggctattctaataggcatgtagccctgaaggatttatttattttatttattttattttttaggcagagtcttgctctgtcactctggctggagtgcagtgtgcgatctcagttcactgcaacctctgcctcctgggttcaagtgattcttgtgcctcagccacctgagtagctgggactacaggtgagtgctaccaaacgtggctaatttttgtatttttgtagagatggggttttgccttctgaaggattttagcctacagaaagttaggaagaggctaattccagagaaaggaaatgcgtatgacatatccagtgtggctggaattgatcattggagcttgggctttattctgaaggccatgagtagcttttgaagacttttaaattggagaatgccctctgtagtgggttgaatgtggcctccaaaaagatatgttcacttggaacctgtggatgtcaccttctttgacaaaaggcttttagcagctgtaattaaggcaaagctcctaggagagaacaccctggattagggtgggccataaatccaatgacaggtgtccctgtaagagaagagaaggataaaggagatgcagagaagaagaagaggtaatgcaaagatggaggcagagattggaatgatgtgtctacaagccaaggagcaccaaggatcgacggcagccaccagaagctagaagagaggcatggaacaacttcttcctcagcgcctccagaagggaccaaccctggccacactgatttcggacttctgggctccagaactgtgagaaaataaatgcctttttttcctttttaaaaaatttttatttatttatttatttatttatttgagatggagtctcactctgttgcacaggctagagtgcagtggcgcaattttggctcactgcaacctctgcctcctagattcaagcgattctcatgtttcagcctcccgagtagctgggattacaggtgttgccaccatgtctggctaatttttgtatttttagtagagacggggtttcaccaggttggccaggctggtctcgaactcctcaagcaatccacctgccttggcctcccaaagtgctgggattgcaggcgtgagtcactgcacccagccgagagaataaatttctgttggtttaagccactcagtttggggataacttatggcagccctagcaaactaatacatactaaagatacatactaaatactaagctgggccatatagtccagttttcctgagactcccaggcaagtgctgtttttctttgcttaatatcctacaccactttctgtctggtaaaattacactcattctttaagatgccactgaaatagcacctcttcagcacagccttcactaaactatccccctctccatcttggtaaatttagttacttcctcttctgtgctcacatactttgtagtatctctacatttatgctataggacttgttacactatgttgtattacttgtttatgtcttccccacttttctgtgagtgtctagaaatatgaggatgtcttgttggtctatttccagaacataagcacagtgcctggcacatattaaaaacgtaataaatgtttgctgaataaatagtttctgtaagtggcttctccaatcacctctgtgttttcggggaaggtaaaactggcaacaggatgaagaatggattagagagcagagggcctttagaaagggaggccagttgatggagtctagatagaatcatgactagagctaatgaaagactgatttagcagagtggctgtggtaatggaaaggaggaaaccgttgggagaaacaccacagaagcagagtgggttatattctctgggtgagagagggggagaaattgaagctgattctgaggtttcaagtctgggtgactgagagggtgacgataccattgactgaggtggggaaggcaggaagagaagcagagttgggggaagatgggaagcttgaagctagtattgttgttcctccatttctagaatatttttgtattataagtcacacttcctcgccagtctcaacagggacccagctcaggcagcagctaagggtgggtattctggtttggattagatcagaggaaagacagctgtatatgtgcccacaggagccaagacggtattttccatcctcccaaaacagtagagctttgacagagatttaagggtgaccaagtcaaggaagaggcatggcatagaacggtgatgtcgggggtgggggttcagaacttccattatagaaggtaatgatttagaggagaaggtggttgagaatggtgctagtggtagtgaacagatccttcccaggatctaggtgggctgaggatttttgagtctgtgacactattgtatatccagctttagtttctgtttaccaccttacagcagcacctaatctcctagaggacttagcccgtgtcacacagcacatatttgccacaccctctgtaaagccctggtttataaggttctttccaccggaagctatgacagaggaaacgtgtgggtggggaggggtagtgggtgagggacccaggttcctgacacagacagactacacccagggaatgaagagcaagcgccatgttgaagccatcattaccattcacatccctcttattcctgcagctgcccctgctgggagtggggctgaacacgacaattctgacgcccaatgggaatgaagacaccacagctggtgggaaatctgggactggagggggctggtgagaagggtggctgtgggaaggggccgtacagagatctggtgcctgccactggccattacaatcatgtgggcagaattgaaaagtggagtgggaagggcaagggggagggttccctgcctcacgctacttcttctttctttcttgtttgtttgtttctttctttcttttgaggcagggtctcactatgttgcctaggctggtctcaaactcctggcctctagtgatcctcctgcctcagcctttcaaagcaccaggattacagacatgagccaccgtgcttggcctcctccttctgaccatcatttctctttccctccctgccttcattttctccccaatctagatttcttcctgaccactatgcccactgactccctcagtgtttccactctgcccctcccagaggttcagtgttttgtgttcaatgtcgagtacatgaattgcacttggaacagcagctctgagccccagcctaccaacctcactctgcattattggtatgagaagggacgagggggaggggatgaagaagaggtgggttggatcagagaccaagagagagggtagcaagtctcccaggtaccccactgttttctcctggggtaagtcataagtcggttgaggggagatgaggctaggctctggatatctgcagtacccagattggccccactgttcctcttccttccaacctttctcctctaggtacaagaactcggataatgataaagtccagaagtgcagccactatctattctctgaagaaatcacttctggctgtcagttgcaaaaaaaggagatccacctctaccaaacatttgttgttcagctccaggacccacgggaacccaggagacaggccacacagatg

SEQ ID NO: 12451 - DNA, 6000 bp, Homo sapiens
ttcttttcctcatttgtaaggtggagattataacagaaaccactctttatgtgcgttgagtggattaaattcgatgatacaacttaaagcacccagtgcagtgcagtgcagtgcttaaaacagaataaatgcccaataaatattcccttcaaaaaagggaaaaaaagtgataaacataactttaaaacaactacttattttgtgcaatgttctcctaaaatctcaatagtaataaacatgtgtgtatgtgtttatatattcatacatataaatgtatatatatgtttgtttcttctttattcaacattatttcatatatactttcccatatacagtatcaacgcaagtacatacatatacttttcaaataatagctgttgaggtatttcgttgaactgcttttggaatatttggaattattttcaaaagttgcactggtcatggtggctcatgcctgtaaatcccagccattggggaagctgaggcaagaggatcacttgatgcttggagtttgagaccagcctgggcaacatagcgaaccccatctttaaaaaattttttaaatatatgtcaggcactgtcgtacacaccttagtcccagctacttgggaggctgaagcgggaggatcccttgtccaggagcttgaggctgcagtaagctgtgattgcaacactgcactccagcctgagtgacaagagcgagactctgtctctaaaaaataaataaacaaataaagtaaaacgacagaaaaagttgctattattaataacactgatataaacatctttatgcaatgcaccttattttgggggaagggtaattttgggctgcattttttaaagtgtaaaccaggttaagaggtatacaatagagacaagagggctaactgacaacatgtaagagacactaccctacagactccaaacacagacaagttggttaaaagtagcaacaaaaagccccaaagtttttaaaaaatgcatagttgagcttgaaagcaaacaaaggaaatgtctagaggttagaaaacgaagaggaaaatcaaacctatttatcgcctcttccttacagactccaccaaaataacataaaagaataaaacagaaataaatccacaaggataaagagactaggattagagaagggcaatgccgggatcttcaactaagtcattatttttaagatctaaggcaggctgggcatagaggttcacgcctgtaatcccagcactttgggaggccgaggcaggtggatcacgaggtcaggagatcaagacaatcctcggtgaaaccccgtctctactaaaaatacaaaaaattagccgggcgtggtggcatgcacctgtagtcccagctactcaggaggctgaggcaggagaatcgcttgaacccgggaggcgaaagttgcagtgagctgagattgtgccactgcactccagcctgagcaactgagtgagactccatctcaaaaaaaaaaaaaaaaaaaaaaaatttaaggcaagtatcataaaatcttaagctatgactaagctgggttgtaggtacatggtgattacgtttttctttgtaattttcagttatgattcaatatttccaaatgttaaaagtacatggaaaataagttagtttcagaaagtgatacgtgctctaaaagtgcctctcagacttgaatgtgcatatgaacaacctgaggcattctaattaaaattcggattttgaatatttaagtctggcatcgggcttgagattctgcatttctttttttattgctatgtaatagctgtacatattgttgaagtacatgtgatattttgatacatgatgcatatgatatcataaacaatatatacaacaaggtaataatcaaataaagaaacatttagcttttctttatgttgggaacattctctttcttccaaatgtggtgtacatacacaataaaatattgttcagccataaaacaatgaaatcctgtcatttgcagcaacattgatggaactgaaggtcatcatgctaagtgaaataagccaggtacaaaaagacaaataccacatgttctcactcatatgtgggagctaaaaaagtatatctcatgaaggtagagggtagaatagtggttatcagaaggtaagaagagcagaagggaggggacaatgaaaagaggttggtcaatgggtacaaaaatgtagttagaaggagtaatatctagtgttctatagtacagtagggcaggtgactatagttaacaacaacttactgtatagttcaaaatagctaaaaaagattctgcagttctaacaacctctcaagtaatgccaatgctagtggtccatggatcacattggaatagcaagattttaagggaaataacacaaggcaatggtgatacagagtggtggggacagggggtggcctcttcagataaggttctcttggaaagcttctctaagcaggtgacatttgttttgagacctgaaagataagaaaaagtcatttaaaaatctacaggaaagatattcctggtagaggggaaagcaagtggaaaggtcctgaggtgagaataagttctggtattttttagaaacagaagaccactgtggccttcttaaattgctcaagtgtttcttccacatttcaggtgttattaagtgaaaagagcactatgtttggagtcataaaacctaggtttggtctccatcccattagctctgtggcctctgacctagtcacaacttttcttagcctcagtttcctcataaatatgggcatattaataaataatacctatcttccatggtcgatgtgaggactaaatgaaataaggtatgacaaagcggattgtaagttacaaaatactatacacatttaattattgcatacataaagtgctatcatgtgatctgtggttgtagcagctatttatagcagcttttattgtgtatacctctgtctctttaatttatgtcagacagttatgtgtcaagttattacaggctgagttggcctttttgttgctgctcttccccagcagtgtgcaactcttattatgcctcacgttctatttctgggtgccctggaaattttcttcggcttatttggcaaataaatatttgcctcactttagctcatcatagagtaacaacttgggtatttcaatgttattcacactttttgatcaaaacagttggcttacaatgagcactacttttggaaaaaaataatttggctccattcaaagactttacaactgggtggtaagattcagtggcaatattcagccctaagagaaatcattagtagagtctagagtttctctaatgtatactgtagctgtctaacacagaatagatgctgaataaatatttgttgatgacaatatagtcattaatatgaagccattactgatctactgtcaacaatacaataataagctagaaacatccaattagtcactaagtcttgccaattccatctcctaattgccctgcaatcgatctactgccactgctactgctaggttgaggcctttattttatgactgaactattgcattaacttcatgacttcaatatgaactccgtccaatccaaccttctcacttaagccagagtagcttaatggacatataaatctgatcatgttactctcctgattaaaactcttcactggttataggataaagtattaacttcttagaatgaaatagaaggccctttaccatcaggtctctgttcactcaggttaacctcctactactttcccaaactccatagactcctgaacctgaaaatattttcttatgccttcttgcttttaacatgtcatcttctttacgtgtaattccagtcaacctcttcaacttgaattctatttttctttaaataactagctcaagcatccccttgaatgaatcccagaacaaaaaagctaactgcatgggctacagatttctgtttttctttatcagacttactagtccaaagtacctcttcataagaagtccataattatttgtctcttttgtgtgaaaagttggagaatgcagcagtgaatataaaattgcaactgcattattgtctccggggtttcaggtaacatttacaactggaaatgcagtttcctagataactgtaaacatattttgacattttgtttgataatagtggtgacaaaagaatataagcctgtctttaaacatggtcttctctccatacatttcactttaccacccttcagccaacctaagcgatttttcaagaattagggacgctgcaaaaaccaaagcgaagagctagaaagagtgacaaaattagtaaagatgtctgtagtctctctgtgtgtgtgtgtgtgtgtgtgtgtgtgagactgtcccacgagcaacagaccaaaggaaaactgccccaaggtttgcgcaacagagaacaatcagcaaagttaaagtccttacaggacagaaaagcagtaaatcttacagctgaagcctcctcccaggggaaattaacgtctgtagtttaatctttccttaattcagaagggagtgaagataagaatatgcatagggaaaatggagagaggggagcgtgacattgagttggaggaggtaagagagtattatgagagacaagatggggttgacagatttagcagatacaatatttgggacacacgcacgaagagatgattcgttgtttatgtaaaattgaaacttaactaggtaggcatcctgtatttcatctggcaactccaggaaaagagaaaaatacagtgttactccaatattcccggttgtgtaaggaaaacaatcaaagctcggccctaaggaaaaacaaataaaagaggctgtgcgaatgcatccgaatcttcaaacagaatccatttccggtctggggccctgggaaaacaagaagaggagagacaattaaggtagccgaattcagtccgccagtgtcccataatcctcttctctcggttcctctttcctcgctcaagatggcgctgctcgcgatgcattcttggcgctgggcggccgcggcggctgctttcgaaaagcgccggcactccgcgattctgatccggcctttagtctctgttagcggctcaggtccgcagtggaggccacatcaactcggcgccttgggaaccgctcgagcctaccaggtgagatgccactgacatggaagaatagggtgaagggcaaggggacctgtagggaaaaggttgccctcctgacctcggggcagagagagcaccaagaagaaagtcatggctaactgggagcagcagtaagtgaaggaaattaacgtcagtaatttgaggaaagggcgaagaagaaaacctttgagttcagcaaagggaaacggggcaggaggttctgggcagaggacacctggagcgctggaggctctcggagtcatagtttttctctcatattaagagttggggtagacaccattcccagcctgcttgcctttctaaagacgaggaagactggattattttccccaattagtaatggaatttgggacagtttatctgtggttcagattttactcagttggaattagcaattcggagagcactgtaatgacagcaagctatctataaacaggtggcgccagttaactcccttgctgacaggcgtgcttcttgataggccaaaaccgtaactatctttccaaaacatagaccgccctaaattcttgtataaatatgactgtcctagatctgaaaaatacagtgatgttctctgtgcacaggtcattttggaagccataggctacttatccttaacttatgaatgtagctatggttgtagtgcctcctaaaatttgagtccattattacctctcactcaggaacggttttttaaaaaattatttgtacttaactgtactaaagtatatctttttattttctgtgtattgacaagaggtttaattgccaccacgtatttatcactatcactttaaaatattgtcagttttgtatgagaaacaacct

SEQ ID NO: 12452 - DNA, 6000 bp, Homo sapiens
ggaaggatgaaataacattgtttttgttcatcagttacatgattgtttatgcagaaaatctgaaagaatcaacggaaaagctggagctaataagcaattataggaaagtcgaaggacacaaggtgaatatacaaaagtcaatcagttttctataaagcagcaatgaacaagtggaatttgaaattactaacacaatcccatttacattagcacgaaatacttaagtggaaatcccatttacattagcatgaaatacttacgtggaaatctaacaaaatatgtagaagatttatatgaggaaaactacaaaattctgatgaaatcaaagaagaactacataaatggaaaggtgttccatgttcatggataggaagacccaatattatcacgatgtcagttcttcccaatccatagattcaatgcaatcccaatcaaaatcccagcaaattactttgtggatatcaacaaactcgttctaaagtttttatggagaggcaaaataaccagaacaccacaatattgaaaaagaacaatgttagaggactgacactagccaatttcaagacttactataaagcaacaataatcaagacactgtgatattgatgaaataatagacaaacagatcagtggaaaaaatagagaacctggaaatagaaatagacctacataaataaaatctcctgatctttgacaaaggggtaaatgcaataccatggagaaaagaccttgtttgttttgttttgttttgttttgttttattttgtttttaaagacggagtcttgctctgtctcccaggctggaatgcagtgatgcaatcttggctcactgcaacctccacctcctgggttcaagcaattttcctgcctcagcctcttgagtagctggcattacaggcgcatgtcatcacacctggctagtttttgtatttttagtagagacagggtttcaccatgttggccaagctcgtctcgaactcctgacctcaggtgatccactggcctcggcctcccgaagtgctaggaaggatcatcatttttacaaatggttctggaacaaatggatatccacatgcaaaaaatataaatctagacacagaccttacacccttcataaaaattaactcaaaatggattacacacctaaatataaaacacaaaactgtataactcccagaatgtaacatatgtgaaaatccagataaccttgggtttggtgatggctttttagatggaacaccaaagacacaatccatgaaagaaagaattaataagctggacttcattaaaataaaaaagttgctctgctaaagacactatcaagagaataaaaaggccacatgctgaaagaaaatatttgcaaaagacacatgataaagagctgtaatctaaaatacacaaaaattatttaaaattaaacaataagaaagcaagcatctcaaaaaaagggctaaagacctgaacagacacctcaccaaagaagatatatagatggcaaataaacatacaaaaagatgctccacactatatgtcatcagagatgtgcaaattaaaacaatgaaataccactacagacttttccaatggccaaaatccagaacactggcctcaccaaattctagcaaggatgtagagcaacaggaactctcagtcatttctgctggaaacacaaaatagtacagctacttttgaaaacactttggcagtttcttacaaaactaaatatactcttaccacatgatccaacaatctcagtccttggtatttacccaaataaggtgaaaacctacgtccacacaaaaacttgcacatggatgtttatagcagctttattcataacaaccaaaatttggaagcaaccaagatgtctttcagtgagtgagtgtataaataaactgtggtacatccagaaaatggaatattattcaacactaataagaaatgagttatcaagccatgaaacgacatggaggaatcttaaatgcatattactaagtgaaagaagccaatctgcaaaggttacatactgtatcattccaactatatgacattctggaagaggcaaactatggaaacagtaaaaaaaaacaaaaaaaatcaatagtttccaagagttgtggagagggagagatgaacaggtagaacacagaggagttttagggcagcaaaaatattctatatgagattgtaatggtggatacaagtcattatatattcatccaaacctacagactgtacaacaccaatagtgaatgctaatagaaactatggactttggatgataaatatatgttgatgctgattcacagattctaacaaatgtactactctggtgggggatgttgataatggaggtggctatgcatgtggtggtaggggttatatgggaaatctttgaaccttcctttcaattttgctgttaatctaacattgctctaataaataaagtctttaaaaataaatttaaataaatgtaggctttgcatgctatatgacctatgtcacaactactccaactcagcattgtacaaaacagccatagactacaaattgacatgaatgtgttccaataaaacttcattcataaaaagtcagtgggccatatttggcccataggcatagtttgccaatccttgatgtatacacttgaacatggtttgtctctctggttcttggccctccatgctcctttgggtgtgagctatccctgtcataagccccccggccccagactatttgattagtgatcgggctaccttagaagaggaagacttaggcaaaattaatcatgtcaaaacgtgaaagttatcaacttcccccacgaactctgctcttctcacaatagcccctatcatagtgattggcaacattgttcattcaggcattgaagttagaaatctggctgttagctttaacttatctcactcctcacctgccaactggttgacaaattctgttgatttccccaaacactattacatctttcccctcctctccttcccttcatagcctggcttaggcctaggctcttaccatctcttggttagagtactgttaatatcttccagcaaaagcgggctacttgcagtcccccaagtatgttgtgctgtttcgcatacatttgccactacatatttccttttgcctggaatcccctcctcccttaaatcctgctcccatctcttatcttcctggtgaaatcctagtcattattcaaaacccaactgggactttccctttcacacttaatcattgcctcctcaaggctacttggtttaaatagtatacccttgacaatcccaatatacatgttccacaagccccgaattatgaatattggaaaatttaagtatacatgtcagaaacttagggctcaaataattaactaggctactaaatattgtaactaaaatgaactctgcatttcattgcatcatgaatttagtaacatcaaccataaaattagcttaatctgaaaagaaacaataaatcttttatcacttcaggtaatttactgcatatataaccataaataaagaacagagatcaacctcgtagagacacttgctcccacacagtagtcacacagaatgtgaatcacacatgcatctcagcaaaatcacaaatttctccatgtaaaagacctttgggaaaaacagtgagtgtcaaatccataaatgccaagagcctgctgtacttctattattgtacttgtgtcaatgaacaactacagccccaatgagaacatgagcttcttggggtcaggcccactattttgtcattctttttgtaccaaagttgatctaacaggaagcaaccactccaaaaacatttgttgaattaaattacctcctaattgatcttcctacttcaaggccatcttcctttccaaaatcctgccagttatttcacaaaaacatatccctgatgtcactccatttcccccaaacctttgatggctcttcataatctgctttacatgattatgtccccatgccatgctaggacatataagagccttcacaccatggcctcatactcccagtctcattcttagcctctcttcttcacaaacactcttcaagccacactagctgctcctggaacatttttggactttcattactctatgactttgtaaatgctgtttcctctgtctaaaaggtcctcctcctctcatctgcctggaaaacctgaatttattaatatagctcagcttaaatatcgctacctttgtagctttccctgacccctctcagaatcagtctccctcatttgtttttttataccaatgtgtttgttctaaaaacatactaagctgattctgcggggagggaaaagggaaggagggagtgccctgtcaaaggacttacccaagcagcgactgcggcactacgtgttaagcatattgttcaagcagcagtgggaggatggagctggatggccttcatgttacgagatgctatggctcgcatctttcacactgcgtgtgtgtgtgtgtgtgtgtgtgtgtgtgtgtgtgtgtgtgtgtaactgtgggggggggtagcagggggagagaaagagaacgaagggagacagagagactgagacagaaacaaagagggcggacgcagtgcagtaagagcagatgggcggacccaaatttcttcggcttcacgattttgcggaggtctagccctgcatccagccttgaaacagggtggggaggaggcagaaaggggagggactgcactccctctgagcgtgctagctccgactgcctgacggatcacccttccgctccaacatggctagttcctcaacgccgtgactcaagcctgttgtgccaggcagggcgcactcagcagcgcagccccacaggtggcgaaggctccgcgagagggttcccgccaggctagacagtggagtgccgcacagcgcgccttccagcctcgcagccgccaccctagcggttccgacccggcgccagcaggcctgcttggtcgatcttcgagccaaagatgcggcgaggctggaagatggctctgtctggggggctgcggtgctgccgccgggtactgtcctgggtgccagtgctcgttattgtcctcgtcgtgctctggtcctactatgcctacgtctttgaactctgcctgggtaagtggggctgggcacctaaggtggggaaattatactccaatataatcgtttgccctaccttcacactggtgtcccttgtgttctcaagccttctctctgcggttttcctttctctccctggagagttccttgtccccagcctctggcttcccacaatatttcctgcgccctcccaccagggtcccgccgtgtctccatcgtctcccacctagggtttcttatttctttgccctacccacaataatgtcctggctcttcccacgagggctcccttttctcatacagggcaaccatctgcaccttgtgctctccttctgggagcccctactgtaccaagttgaggaaacaacataccctgtgtctttaaactgtttgctcacactaggaatctcaccaatgcatccaactaggagccccaccattttccctcctactagaatcctactaggatttcctactagggatttcctactgagagttccaaaatatttcctctactctcttactagctctcctttttcacacactggaatctatcgttttcccgtgatcctctcacactggctgaagtgcttcatatctttgtccacttgtgatcccacagtgcaccctattctactccattaagatcttccgttttcacacagtggtaagccctccattctctttccctgtgggctccccccatttaatcattttctttaatgggattggtattctataatacatcctctctcacatgagaggccctgattatattatactggagttccctccagtctcctgccttcttgctttgaggagcattcgactccttcccattaggagccccacattattttctgacaccttatactg

SEQ ID NO: 12453 - DNA, 6000 bp, Homo sapiens
ccaagatgccatcatactttagaatagttggaggctttgggatatgcatacattgtagttagtgtcaaatacaaataataaaattaaaattaaaaaactgcaaaacaagaacaatcaaggtaaattctgtaacataaaacaactttggattttatgttctttaagactaaactaggaaccacaattgtggttcaattatgttgaaccacaaacaaaaccaaacatgaaggtaaaaagaatatttggtttaacaatcatatataaaaaatgcaagtgcctgtgcttttattgaatgggaacctaactctgaagctgtcacaaagacagcttactatcacttggtgctatagtatggagcaactgaaccaactgggtattcgcaaaagcattactggcactagatttgagtttctcacttgcatttctcagaactagagttctcataagacctttcagatagctattttaaaagtccccaaagatagtctaagatgagattagaaattttacacaatttagaaaggtgcattgaaagtgcaaacatttttatcagatgtacttggttgttctatgtggcaaaaaagcaaagtgatttttataaattagggtggcacacaacttctcaacctcgaatatataaccacatcattgtgatgggatgatggaatcttttctcatatttaagaaaatgttacatcctcctattatcatagcatactcagtctacagagaaaacgttaaatggcctggagaaacaataatctattccagaaagcaaatgccttctattactttcactggggagcactagctctgctcccaggatcaagctatgtgtacagggaaagagtggacctggaaaatagcctggctctttaaagatctaaaccaaacttttggaattatacccagaaacagatggctggccagctctctgtgtagctgcttcattgttgacagaagcaactggagaactcagaagaaatatgctttaggatcagtagcctatagtcatgggtaggctgggaaagtcttaagaaggtttcaaacgtggttagtcctgaataaaattctaagcaggaatttctgtttgcagtatggggaggagattcatgcttcatgccctagagaatattctgattattttctcctgctttaaaaccagctctcttcttgattttcccatttctttttgtggcagtaagacaatatagtggctaagaatataaacactgactacctgggttagaatttgaccttaagcaagttatctaacctcttggaaattcagtgtctctatcagtgcaatgaagtatataataatacttcacagagttgtggtaaagattaaatgacataatcaatttaaagggcttagcgcagaaatctggcatttactgtgttcaacaaatgtttcatattaagggcactaccattttcccagtctggaattcccattcattcaaaacaaaatcttttttttttctaatgtttctccttcatatgacttattccagcagcaggccttgtaaagaatggctcctagacttctttggaagttgttcttttgttttcagtgtttcaattatcaatatagttcaccacctgtcaccaggaatatagacgagcacccccaactggtttcccaatacatttgctgtcagattaatcttcctaaatagagtgctgcatgtgaagccattgcaaatgtgctagtcatttaaatattcctagtagcattggctgtgggtggacctattctgctggtttgtagaattgttatatcctactccacagcataagcccagtgttcctactacaaaaactggagaacccacgacaagtacatcattgccattggtatagtaatgatgcgctctgtaaggacaagagtgtatctgttttgctcaccactgtattcttatgccaatcacagcacaaggcacatagtagatcctcagtaaatatttgattaatgaatacatgagttaatgggtgaaatggtattatagatacccttattggtttagctttatgtgattgcatttgtggtaatttcagaagatcattcaaagaaagttgacatcattgcttggcattcaattacatgccatgttccattcagaccaacttatgataatttagtcatcatttggcatgtgagaacagggaagtcatttataaacttgaatggtatgcattcagatgtagttaacaatgtgagctagaatcagcatagcagccagatccccattttccaaagacaagaaagtgagagaaattgattctagaaaaaaagaaattgttactgggaaggagagaatacaagaaagagcctagcggagaatcattttttttagtagacggaagtgtgttcattactgatttcaaccctaggagcaagtggcagcttatattttgcagttcaaaaaatattcaggaactatttaaccttcctggaatggatacagacaatgggtgttgttgctattctatgatcctaacacaagtattattttatatattgagaaggaaactgtggtatctgccaatgtgagactgtgcctgcatcacatatgtccaacggtagcaaagacccatacctaaaagaggatgcgttgttaacaaataggagatggccaaattcttcaaaatccaaaagagaagttagatgtcaatttatgtgactattcttagaagtttaaccttttccagtaagacctatattcaggtactgtgggatcttaagcagttctagaatgttaagaatggttgaagggtaaataataagaagaataattcttataagcttgaaacatgcgtatgttacagaataaaataacaatcccaggataacaaaacatttcactccctatccttttcataataatttaaaaggtatttcctcttgcattataccaaataatcctcacagcaacaggacacaaatgaagaaactgacatctgagaagacgaagtgacttgctcaatattatgtacccagaaattgatcacatactcccttgatcgttatcataattttgatctattcatctgaaaaaatgaaaagaatccctctccttctgcccgaccccatttcaggaaagatatactaagataatacatcacaatcccgcccagaaccttgcacttactaagtaaatgtgcaagagcaaccatgagtgtggatcaccgggccagactagcacagaccatagtggagatgtcacaaaggtgattgcaagcggaaggcaactgtaaagagaaacattctaggaaggtgagagttcctcagcttacactaaaggttgcctgataaatattaaattataatggtcaatcttgagcaataataagtgaaagaacataggatgccaatatttctaagcaaactcaaacatcctgctttttaagattctggccctaagtaaggcacaggctccccgctgttcccctccatccaccttcccatctgtggcctatccaagaaaatgaatgctgtcttcacaaaggtcccacagtggaaacaggagacaggcttctgagtcaaggaaacatcagtgggaaaaacgccaagttggaatttttcggatgaaggggtggcgactcaacatatttaagtccgtttcttaggtagatgagtagatggtaaattctgtagcaaaagctgtttctttgttttgttttgtttgatgctgttgttttggtaagtgctactgtcttcacacaacagacctttctcctgtcttctgcagcgggactatttataaactgtgtaccagtgctaccccagtcagcaacctccaaagcctgcattgtacttggtaaggttctctatcagtatcactaacctggaaaaactgactgtgaagaaacagcttgattatactggctgcacatgtaaatgttccaagaataatttctaactcaacccctttgaagttattgttttttcctccattagatcggtattagcatctggctaaattttgtatcctccacctccacctccaccttcctgaacacataagtacttatacacacacacacacacacacacacacacacacacgttttttttttccccctgcaggtttcacagctggtggctgaacagaaacagtctctgggttgagactttacactggtttccctgacctggaagagtgaaaaatctagattatttcaggaatttattgtaagctttccacccttctctgtctcatcatgtcttatctacaaaatggggtgttggggaggcaggagccctatctttctgatctagcatcgccttaggttgagatattaaaatttcaaaacacaagcaagcaaataaaaaaaataacaatttgttgaaagaatcaactgggtaactataaacaggattctaggtgtcctttaaaaggaagatattattatcaaggaacagaacctttgtagaatggcgctttgggggcctgggtgggtccagaactaaggaagtttgagttactgccaagctacagtcccaggccctgcggggagtcaggtccaagtttgagaaaacagtcatagtcaggggctattgtggcctggacagaggcagaaagacacgacacagcaggcttccttcctgtcttgctcttatctgaagttgcagagagtgggtgggagtatgcctgaggtgcaggtgaggcacgtttagcctgagccggccacggactccacttcccctgctcttcccccagtggcaaatccgcgccacctcgcaaacccccaactcaggcacttgggccccttttgggccccctctcgctcctccctttaggcacctccctgggcccgcccacggtctccccccagtttgggactgcgtcataagtatcccagacctcggcttgcagtagtgttagactgaagataaagtaagtgctgtttgggctaacaggatctcctcttgcagtctgcagcccaggacgctgattccagcagcgccttaccgcgcagcccgaagattcactatggtgaaaatcgccttcaatacccctaccgccgtgcaaaaggaggaggcgcggcaagacgtggaggccctcctgagccgcacggtcagaactcagatactgaccggcaaggtagctgtcccagggcgggatgggggaggggtgggcgaaagaaagaaggctggtagcagaggagaaaatgtagcttccctgggagggcccctcttgctcctcttacgctgtctctggggtttacccggtcgcctcggttctgtctccttgcggcaccttctgcttaccgcaccctctgtcactctgcattcccgcgtgtcgtgccatgttctgtctgttccagctcacaccagctgtcctggagggaggtcagagagagtttgaggagatgccctgggactccttgtcattgtctcttgggtaacgtgtagggacctggggatcaaggaggggcatgtcgcccagtccccacctccaggggcgcgcatagtctccccagggacagaggggacacaggggggtgagcaagaccgggagatttaacatttctttctttccttttggtgtggatgaagttctaagactaaatctttctatgatctctgagtgttcgtggaggtggggtgagcagcaaagggcacttttaactccaagcagtatgggttggggcaagtggtctgcttgagcgcgcgaatattttccgtttctctctggtcataggtggctttaaacattagataaagaagctgtcaaaattgaggtggatcttaatgccagtgttgggtgttcactgtgcccttttactgcaagagccttgtatatttttagagtggtatttcctaaagaaaacactcttctcttgtaaaaataaatttgaggatacttttcaattatttttaaatttttttcttgttgaacaacatccccttccctctatttagagatctgaagcaggtccagtgttgtaatttaaactactagctttgacaggaactggggaagctcttcc

SEQ ID NO: 12454 - DNA, 6000 bp, Homo sapiens
cggtgtctggagaaaaccggtcgggccaccgggctcccttgagccaccactctggtgtccacccgcagctctaaatgaccaaaattaaatgatactcattgcagaagcatcggttttctccctgttgttctgggccgaatcacatcctaacgtgaaacagtgaaacgacccccacgcggaaagcggatcaggctccctacgctctccctttggcctcggctacatattcaggggatcgcaatctcactcgcgaaataatttctttctgtaagaggaagccgcctttcccctctcccaccgccaaggtaaaggctgctaaagtagctcttcttggaaggaaaaatattttaaaaagcagctgggttgctctccacaagaagatggcagttttgagaaaacccattatgtgtccaaatgccggtttccttttcttgtttaacgctttttagagggcaaaaatgacgctcatgtgaagcccacaggctcgagccaatgtcgctgggctaattatgagtctgcttatcccactcccaaatatccgagacgactcactcagaagacatttttactcttccaagaattgtgaattcagaagcagcttccccacattctaagagaaaaaaaaacttgtttaacgggcacgtttttgatttttttgccgctggcgaccttaattaaaagcctcagagcccgggtggggaggaatgccccgctgcccccagggagccttcagtgcagaaggcaggatgagcttgatgtcagccctggccacgccggcctcccgcttcccagtactggcacatgccgcagccaccaccgccgcccaagtggagctggcagccccctgggaccgagaccccgcgggaaggctggggcgccctgcacatcggcgccggctcccagctgtcggcgacctaagcggacatgtatggcgtgcccgccccagagctcctgcccggctttgagctctgctggcttggcgcggcgcggcggcgtccgctccaccggctcttctcaaacgtacagtttatttatagggagctaaattctccaacagggtggggtgaggggcaatgaaatgtgtccggccccctccgtagctcattctctgtgccacatatcccatttgattaacaagcaacagacaagagcgaaccgatccaggggccctgctgggagtgcggcacgcagagagtagtgcggcgtctgcccggggtggaaggatgggggtgacggtccgggggggtggcggccgtggctctggcctgatgtgaagacacaccggctaagagctggatgaatgaccacctcaggggcgctttctccttccctttcttccttccactaccagagaatgagaagagaggaaaacaaaaacagacgattttttagggtgaagagacaaggagaaatagagggatatatatatgtgtgtatatatatatatatgtgtatatatatgtatatattatattcaagatatgaagatatgtaagggaggtaaacacgataagacaatcatatcatcctcatctttcctgaaatctctgcaaacatgagaagcgcacagttcccggcgaggctcagccgcagcgccagcacaccgcctccctgctcattcctgccctattgctcctgcctggcctgcctggcctgtctgtccgtcctcccatgaatcccgccagggctccatgggccggggtaccacttggtcccgccggtgtgaagtttccgcttggccccgcccccccgctaccccccgcctccgcttggccccgccccaagactggagcccgctggcggcgcgctgattggccagggcctggcgtagccgggctcggcagcttgagctttctccggctttctccagactccgcggccagtagtttgcggcatccggaggagcagcagcagcagtagcggcggcggctggcgcagcgcggagacggacgagcgggcacagacggcagcacagctcccgtgcaccatgcctggcttgcccgggaggcactggcacccgcgtccctagcccggcgctggcccttggcgcgttgcgctccgcagcattccggctgagcgatttcatccgaaatcctaaacctcctaccccaaacccattgcctcctgcttgctcatactccacactcacactccccacaccacacactcactcttcctctctctctcacacattcacacacagcccgagacagacagagaaagcgagacagacctcccgagtgcgcgagcgcccgggaggaagggagcccaacgcagcgcggccagcgcctctccgggaagatgaaatcaagacgctcctgcaagtaaacttcggcggcgacaaaatcgtcgactgtggcagctgctgaggcggaccccagcgacgtgcaactgagctaggagggcttcctcccgcggcggcggcggcggcggcggcggcggcggaccttggagcgacaccccagcccaaacggagagaagagaagcacccggtacccacggcggcggccccgcctctcctggccggtactgttgttgcctccccttccctcttccccattccccgccacccccggccattagaaagaccggggctttgattttcttggacaaattgccatctccccgtttccacaaacttgacgtggagggtcggactgcgttgttaactttgatttcctagacgaaaacgcccgcagaccctcaactgctctgtggggggaactccgctcccacctcggatcctggacagacgcgcccccaagcccttcgaagccagccttagcgcgagggagcgcgctcaagctctggcagcctctctcccctcccccttcctctgctggccccgggaccgccatccgactcaaccctataaccgggtgcccgcggcgcttgccagtaactgactcccgtctgcgacaccccctttctcccgaacaggcctcgaagaggccagtgtggcccccccagaccccggagggcgcattccaagcgggtactctctccgcagtgaactgggagcgctggggggaggtctttgcgcatgccaggtgcacagacagcgagttcgccagcctcagtgccggtgcaccgcggcgggccgggcagtgcctgaaaggctgcgcctcctccgccctctttaccttcgcctcaagtactgtccggactcagcggtgcgtcctccaggccgcgcagacgccgcccgacccgcagccctgggcggctgccgacagtcgcgcccggctaactttgaaggggtaaaactgagtagccgggctggagggagggggctcggggccgcgcggcgctcccttggcccctcggagcccccggggcccccgcgagcccccgccgcgtccgccgcaacctcagcattggagccgccgcgggtgtcccccgcgcgccgccgggccgccctgggcgggacttctcccgcggcctccggggccacggggcgcgcgcaacaggcggcccgagccggcgggaagctggagcgccgacggcgtcggtctcggaggggtgtggagaggcgaggccaggcagagccccgtgcagccatggagtcgctcctgctgccggtgctgctgctgctggccatactgtggacgcaggctgccgccctcattaatctcaagtactcggtagaagaggagcagcgcgccgggacggtgattgccaacgtggccaaagacgcgcgagaggcgggcttcgcgctggacccccggcaggcttcagcctttcgcgtggtgtccaactcggctccacacctagtggacatcaatcccagctctggcctgctggtcaccaagcagaagattgaccgtgatctgctgtgccgccagagccccaagtgcatcatctcgctcgaggtcatgtccagctcaatggaaatctgcgtgataaaggtggagatcaaggacctgaacgacaatgcgcccagtttcccggcagcacagatcgagctggagatctcggaggcagccagccctggcacgcgcatcccgctggacagcgcttacgatccagactcaggaagctttggcgtgcagacttacgagctcacgcccaacgagctgttcggcctggagatcaagacgcgcggcgacggctcccgctttgccgaactcgtggtggaaaagagcctggaccgcgagacgcagtcgcactacagcttccgaatcactgcgctagacggtggcgacccgccgcgcctgggcaccgttggccttagtatcaaggtgaccgactccaatgacaacaacccggtgtttagcgagtccacctacgcggtgagcgtgccagaaaactcgcctcccaacacacccgtcatccgcctcaacgccagcgatccagacgagggcaccaacggccaggtggtctactccttctatggctacgtcaacgaccgcacgcgcgagctctttcagatcgacccgcacagtggcctggtcactgtcactggcgctttagactacgaagaggggcacgtgtacgaactggacgtgcaggctaaggacttggggcccaattccatcccggcacactgcaaggtcaccgtcagcgtgctggacaccaatgacaatccgccggtcatcaacctgctgtcagtcaacagtgagcttgtggaggtcagcgagagcgcccccccgggctacgtgatcgccttggtgcgggtgtctgatcgcgactcaggcctcaatggacgtgtgcagtgccgtttgctgggcaatgtgccctttcgactgcaggaatatgagagcttctccactattctggtggacggacggctggaccgcgagcagcacgaccaatacaacctcacaattcaggcacgcgacggcggcgtgcccatgctgcagagtgccaagtcctttaccgtgctcatcactgacgaaaatgacaaccacccgcacttttccaagccctactaccaggtcattgtgcaggagaacaacacgcctggcgcctatctgctctctgtgtctgctcgcgaccccgacctgggtctcaacggcagtgtctcctaccagatcgtgccgtcgcaggtgcgggacatgcctgtcttcacctatgtctccatcaatcccaactcaggcgacatctacgcgctgcgatcctttaaccacgagcagaccaaggcgttcgaattcaaggtgctggccaaggacggcggccttccctcactgcaaagcaacgctacggtgcgggtcatcatcctcgacgtcaacgacaacaccccggtcatcacagccccacctctgattaacggcactgccgaggtctacataccccgcaactctggcataggctacctggtgactgttgtcaaggcagaagactacgatgagggcgaaaatggccgagtcacctacgacatgaccgagggcgaccgcggcttctttgaaatagaccaggtcaatggcgaagtcagaaccacccgcaccttcggggagagctccaagtcctcctatgagcttatcgtggtggctcacgaccacggcaagacatctctctctgcctctgctctcgtcctaatctacttgtcccctgctctcgatgcccaagagtcaatgggctctgtgaacttgtccttgattttcattattgccctgggctccattgcgggcatcctctttgtaactatgatcttcgtggcaatcaagtgcaagcgagacaacaaagagatccggacctacaactgcaggtaaagccaagttttctttctttgtcttggatgaataaggtgtgtttatctgtgtctctgtgtgaaaatcctggtgcttttgtttcctacttaaatgcatgcagcatacttgcagtgcttctttttgtagggtgaaaagtttgtgacagtccaagttgatcaattcttttgatctgacaatttgctggaagacaatcatttagtgtttgaatggattctgtcacataatgatggtgagcagaaacgcaattatcattttaaaatttgcatagctgtctccatgaagttatggtagg

SEQ ID NO: 12455 - DNA, 6000 bp, Homo sapiens
acacaaagcctagcacatgccagggtgaagatgctgcgtaaggcctcaatcccactgaaagctggaagcagtgggacagaagggttccagagagaggttaaagaagaaagtgaagggggagaatatggaaatcatagggagatcaaagtaaggggatatgtcagaagagagagacagcattcttgcaaagcattgggattaataatataaagagctcacccaaaacaagtgaggttaattataataaccccaatgtttctgcagcacatactcagtgtgtaaaacacaacgttagatactgtgaggctacaaagtaaaataaaacacctctctttatggtttggttgggaggataagacaaaggtggataaggagactgacagcatccaggcatactcaatttcttaagtttcttaaagttcagtaccattttcaactttaagacttttaatatgaagcccctcagcagtaaataaggtattgttttacgaaatattagatatggaaactgacttccctagttgagatctcaggaaagctcaacaaggctagactagaaacaactttcttagaaaatggacatagaattgtcaattttaataccatttaaaagtatttatggctgggcgcggaggctcacgcctgtaatcccagcactttgggaggccgaggcaggcgaatcacaaggtcaggagatcgagaccatcctgtctaacacggtgaaaccccgtctctactaaaaatacaaaaaattagccgggcgtggtatcgggcacctgtagtcccagctactcgggaagctgagaccagagaatggcatgaacccgggaggtggagcttgcagtgagccgagatggcaccactgcactccagcctgggcgacagagcgagactccgtctcaaaaaaaaaaaaagtatttatcatgtctatgtgtcccaaactgtatattatgagcttttttgaagaaggcaagatcagggatggaaagggaggaaaggtttcacagagcatctgaaaggagtggatggaaaacaagggcataaaaatagacaaagaatagaatttcagagaaggagaatgggaatgcacaagagacaatagaaataaagagatattccattaacgaaatggatttttaaaactgtacatatgaattaactgtttaaataatgaggtatctgatggctgtaacataaaatatgagatattaagaaaataagtaggatgcgcctttaaattctatgataggcacttagccaaaggtaattgaagggatgctagaaaagggattagaaaatgaaaatggtaaagttattatgtgaataagagataagatgtacactcagcgatacagtttattattattattattgttgttgttattattttagtggttcctgagagagagaggaatgtcccaagacattatctaggtactcaatttaattttttctgttttattatagtgtgatactgggatggcttagacatttaattttttatttaatttcaacaatcaatcctgagtaattactatgtggttgctcccagagaccagttatgacctcaatgagcaatcagctcaacagggattggccgagcagaaaatgaactcatcaattgggcattatgtcctagggtactgaggagagtataaaagggggcataggggccctgccacactagctcttcagtagtttctgaacatctagacggtaggatgtagaataggtaagtagaaatgcaaagcagatattgcagtaattgactaaagggctgggttaatgggagtgagtgtgtagttaagacagttatggtgttagagaaagaggtgaggaaggagggactttttactgagttgggattgaactggatattcagtagaagcagaaagtatgagtgaagttgagggtgggcagggactagggaataggacttgtttaattggggggttgatcatactgacctggtacagagcagaaaattcacattggaaaagcagtaggaaatcagttgagattgtattgggatgaggggcttggtagggatggagggaggctggaggtggcacaagggaggtctgacttaacagtgagcccttgtttatgtcatttcccttgcctgatgtctagcaatgaaaaacatttacacctaatcttgaaggttacaggaaattaattgggaaggggggctactaaatgttccatgtaaaacaagcagtaacaatacttaaagtattttccttttttcctacattgttggcatcaaattgtgtttctgtgctcagaaagagggagaaattaagaggttgaacaagaaaaagtactgaactctctgccttaccactctggggcaggtagggttacttcctaggtggctgggctattggagtgaaggcaaaagccaaactcaaccaaaaaaccccaagtgcaaggcagaattggggcaatcattgaggttcttaagcttcagaggctccgaggagtccttgttttaggttaaatgtctgtgcaacagcagtctttactcaggttactctgcgcagaggcagctgtacgtacaacagcagctatgtttcatcacaaagtgggccccatttctgatgaaagacacagaagttgcccaggtttagtcctaggcagcttacttggtctctttcaacctgtttcttcatctgtaaaatgaaggtgctaggtgtgtcaacctcataatagggttcttgtgatgtgtgcatacgaggtaatgtgtatcaagctcttagcaatagtggttggtatacagtcaatacttattatcacagtcattattaatactttaaagaatacatttatctagtggcctagggaaatacttcttaaattgccttaaacgggattagatgcccctttggtctgggtttgtacccaaacccaggcctaggtttgaactaaattgaatttctcggtttggtggcattgtgggggtggggagatggaagtgggtgtagcagagtaggaggcaatggtgcaaggtgttgtagccataggaatatgaatttccatgtcagcatttggtttaatttggcaccgagtgttattcaaacaaagcagcgttgtgagtggtagaggaagggagaggaggaaagtcaacacattcttggaaataagatgtggcttttgctttgctattttgttttttcttcagctacagacatatttctttgctcttgggctcacactgtaaatccctttcagtacatatctaagtttcagagaaacttctctttaagatgacaagaagttatcaagacttcccttgatccttgtttttagtataagaacccttcagttggggtcatttagcctagggagaaatctttgcatatacttagacacccccctccaccatgttgaatatttggtatttcctaacgactttacctcaaagtgtttgaaggtgtatgtagatgtatcgtttatccattctctccatgtatttgtgtattaggcctttcaaattttagtaaaaattttagtataaagcctggcaatgcaataattaattttccaacagttgctgccttgcacctcagacgtctggcaagatgttataggaactggtcctaggtcaatattcgaagcacagggaagctctgtgtgaccaagtcaatggaactttcctgtgttctggtcctgaggtgtatgtttaaagcaacgtttcaagcagaaaagtttgagtattcatctctcctccacaaatgcaggtctttttgcaatggcaatagagtaaatagccacttgtgatattaagcttgtgtcaatgatgaagggttggattgcatagggaactgatacagccttctaaccccgttcctctagagataacacaaactcacttaacactcagtctctgccttcaaagagctgacgctttagttgagaaatcagaccttaacgcacctcctgtgttgtaacaacatagaccaatatattcacaatatataacattaggttttaatctctctgtaatcagctgggttttgatgggaaaaaccaggtggctggaatgtacagtgcctttctgttttaacatttaagaggaggtcacactcaccagggatttttccattgcactctctctttttaaaagtttacagcgaatagctgaacttacatttcactattatgtaaaaatactttccctcaactttccaattacttaggggataaaaaaggagaggaatactggggttttgcaaagtcctgcaggtaaattctaaagtcattattatctttaatacctagcttagaaattctttcaacaagtggtgattattttcctccattcacatctccccttcctaacccataaaacaatgttcacaaattgaaaagcacacaagtgagaaaaaaatcagcctaattccaccagaggtaaatttcactgttcctttcagtttttgtctaagcacacgtgactgtatgtattgctttgcaatccgctttctttttgcaaatatatttcttgtgggtattttcccatgtattttcttaggtcgcttttaacctcttcattcttttccttctctctagggcaccaggggccagggaggcccaatctcagagcgctgcgggctctgctggtgatagaaacaatatggtgaagttataaggagaggggaggggtggggggcgggaaagattccttaggatagaaaaaaaacaatgaagaaagctccacttgaagacctatgaaatttccgacactagaacctttgtatatagttttcggtaaccttcggcagggggcgctctgaaattgttgccactttccggacagcctcccatactttaccctctacaaaattgtacagtgtttccggcccttctcagttgtggacgctcgtaagttttcggcagtttccggggagactcggggactccgcgtctcgctctctgtgttccaatcgcccggtgcggtggtgcagggtctcgggctagtcatggcgtccccgtctcggagactgcagactaaaccagtcattacttgtttcaagagcgttctgctaatctacacttttattttctgggtgagagacgaaggcgcctggggccggcaggggatcccgggcttttagttgtggggggtgtgaccctgagcggcgggagctcaggtcgggaacggtgtggggtttgggcggccatcgcgcctgggaccccgacgccggcgaccagtgactgggccccgaacaaagagctcaggcatctcgccggcgctggggtcggagtgcgggacgaaggcagccgagaggctgagctgggacccagacgtaccagcgttcgagttcgatacgggaggcgaggtggggccttaagcccccagagcacgcagacggtgaccctggacctttgcaaaggcaagcaaggcttgcccggcccctttgagggctcacttgcataatagtgtctttcttttcactgcttcgtaagagaggagtgtttcgcaggtaagtatggtatgcctccactcccgccagtctatccttgggcttgcttttgtgtaccagtcctttgtaccctgtgcccatccctacctggagaggacgggggaagtttctggaactcataaaatcacgttttttttttccccttcaaggttttcttcctaaggttggagtaagatagttaaggaagttttgatccctagggcaaatatgccatgggcttgtgtttacacacaaaaagatgaattttaagaattttgataagatacctggtccacagcctgctcttgtgtgcagatccccccctaaccccttctactcttcccccttgtctgccgtatcccagcatattacacctattgtgccttaaatacctcatgcgttgtgatttgaagatgctgctgtacacagtgcgtaactgtttgtattctctgaattcccacatagatcactggcgttatccttcttgcagttggcatttggggcaaggtgagcctggagaattacttttctcttt

SEQ ID NO: 12456 - DNA, 6000 bp, Homo sapiens
ccatcgttttaggtttgcactggtcagaacttgctcagtgtggcaaaatcggatttcatggaaataatcaagaccaaatctgagattgtgaaagccttaggatggaggaggacacagagagtttcgattgttttggtaatgcattacttcataagctgggtagtgtgcatgtccttgttgttatattattctctatatgtttacatatttttgaaatatttaaaactgtttcaaaagagtaattgctcaatactgaggtatcctgtcacctgggactgaggaaaatcttcatcttttaaagtttgcactggtccaaattctctcaacgtggcgaaatcgactcattgaagtcaatcattcacaatgggtcaggagatcatatactattcatggggtggtaatccatacattcctgtttacatttttgccaggatagtgcctaggtttgctctcattagacctctctcaatgtttagtataagaatttgaacttgtggcagacgaggaggataaaacagaaatgggcagcagtctgcaaagcacagaatgtatgtaaacaggccactgactaactttgcttgggttcattatttatgtttgtctctctgtgcatttgaagcttgtcagtaagactgtcttagagaagaggggtcaaatcctcacatcctctttagtgaggggtaccttggacagtgagaaactgcacacatataaagaagtaaagcttaaaattttgctgaggaataagggagttggaaaaaatgtttccaaagttacttctggctgaaagtgtttccagctcctgccaagcaccacctgcaaagaaggagcagagaagtgcctggtatgagttcccacaggccagatttggggggcggaacacattcaaagtccaaggctgactagagggctctggagggagagctgaattagcaaagctagacagaacaaaaggatttccgttttttttgtttgtttgtttgtttgtttaattttgctttaagttctgggatacatgtgcagaacgtgcaggtttacatgtgccatagtggtttgctgcacctatcaatctatcatctaggctaaggatttccttttcaaagtggcctcacacttcagggtggggcagtgtattgaagggctaaagcataaaaaaaaaacaaacaaaaaaaacaactctgggtagagcctgggagacggatttttactgttttgtctgctagaattaaaatttttttttttttagcttttgaagatttttcaagaatatttaaaaaatattatcaaagccatacatgctcattaaaagaaagttgaaaaagacagaaaagtaggagcaaaactaaaaatttgtttagttccatcatctagagacacccactatctatccttctatctatctatatatctatctatctattttttttttcagacagagtcttgctctgtcgcccaggctggagtgcagtggcgcaatctcggctcactgcaaactctgcctcccgggttcatgccatcctcctgcctcagcctcccgagtagctgggactacaggcacatgccgccacgcccggctaattttttatatttttagtagagacggggtttcaccatgttagccaggatggtctcgatctcctgacctcgtgatccgcctgcctcagcctccgaaagtgctgggattacaggtgtgagccaccgcccactatcaatattttaataaaagttcttgcatacaggtataccttggagatattgtgggtttggttctagaccaccacaataaagcaagtcgcatacattttttagtttcccagtaatataaaagttatgtttacactatactgcagtctattaagtgtgaaatagcattatgtctaaaaaaccaatgaccttaattgaaaaatactttaggccaggcacggtggctcatgcctgtaatcccagcacttttgggaggccaaggcaggaggatcacttaagctcaggagttagagaccagcctgggcaacatagtgaggcctgtctctaataaaatacttttaaaaatatatagctggacatggtggtgtgtgcctatagtcccagcaactcggaggctgaggtgggagtatggctcgagcccaggagatagagtctacagtgagctacaattgtgccaccgccctccagggtggtgacagagcgaaaccttgtctcaaaaaaagaaaaactttattgttaaaaaatgcaaatgatcctgtgagccttcagtgagttgtaatctttttgctggtgggaggtctcgccttgatgttgatggctgctgcctgatcagggtgatggttcctgaaggctgggatggctgtagcaatttcttaaaataagacatcaatgaagattgctgtattgattgactcttcctttcacaaaagatttctctgtagcatgcgatgctgtttgattccattttacacacagtagaacttcttccaaaattggagtcaatcctctcaaaccctgctgctgctttatcaactaagtttatgtcacattctaaatccttttttttttttttttttgcgacggagtctcactctgtcacccaggctggagtgcagtggcgggatctcggctcactgcaagttccgcctcccgggttcacgctatattctcctgcctcagcctcccgagtagctgggactacaggtgctggccaccatgcctggtaatgttttgtatttttagtagagacggagtttcaccgtgttagccaggatggtctcaatctcctgacctcgtgatccgccctcctcggcctcccaaagtgctgggattacaggcgtgagccaccgtgcctggcctctaaatcctttgctgttgtttcaacagagttcacatcatcttcaccaggagtagattccatctcaagaaatcactttcttggttcacacaggaagcaactccttggtcagtcaagttttatcatgagattgcagcaattcagtcacatctctgggttccactttttttttttttgagatggagtctcgctctgtcacccaggttggggtgcagtggcaggatctcggctcactgcaagcttcacctcctgggttcacgccattctcctgcctcagcctcccgagtagctgggactacaggcgcccgccaccacgcctggctaactttttgtatttttagtagagacggggtttcaccgtgttagccaggatggtttcgatcttctgacctcgtgatctgcccgcctcggcctcccaaagtgctaggattacaggcgtgagccactgtgcctggcctctgggttcaacttctaattctagttctcttgctatttctaccacatgtgtagtgacttcctccactgaagtcttgaacccttcaaagtcatccatgagggttggaatcaacttcttccaaactcctgttaatgttgatattttgcccttctccgttgaatcatgaatgttcttaatggcatctagaatggtgaatccattgccttgagtggcatgttgtcatttactgatataagaaatactggaggaggaacaaatttaagagaaaagatggtaggtttaactttggatgtgttgaatttgaggtgtctgcaggacattcaagtggagatgtcaagaacacagaactcaataaagcagtctgggtagagttatagaattagagttgtgaccatatatatggtaattaaagccaagtgagtgaaaaagattatttgggggagggagtatatgtatcctagccctgagaatgtctgactttcagaggtcagatagcagaagagtggcctacaaaggtcactgaggagagggcaaaggagtaggaggaaaagcaaaagagtaaaatgtcatagatgccatagaaagtttcaaggacgaggaaatggttaacggtgttaaatgtaggggagaagtcaagcaaaataaggaccaaaaataccttacttatttatggatttattgacactgagggtcattgtttgtgtatctcattgagaagtttcagtgggggaaggaagccagactgctgagagctaagaaatgaatgagaagtaagggaataaaaattgcaatttcacctgtgaagtacattttcaatacatttgcccataaagaggacctgaagagggacctcctgtgtagggaggttctttttttaagatggtagatacttgagcatgtttaattgctgatgtgaaatgagggggagagggatgggagaggcagggagaggaatctgcaattactgggtaggtataaacattttcaagtctattgatacatattgctcacgtgctttctaaaagggtttttaaccaacatatgctgctatcagcaattaagacagcttgtttggtggctactttgtcatcattaagtgttattaaaaaataaaaaatatctttgccaaagaatctcattattgttctaatttgcttttctttgattactagtgagttggatattttaaccagttgtgtccttgagtgtgtatgtatgaatttagtcaacgcttttgcccaaaacgtttctattttagacagacatttatttgccataaaaggccacaagtcaaaggatcagaatggtattatattttatttactcaaattagatagttcatactcttttatcttcttagaagtgtgagacaatttgacaacttttgactcagctgaacgaaagagacaggtgatttcaccgtctaagagagtgaccaacagatggaagtaagtgggtgaggaggcacgtctagtgttagacccctatcctcagtccccaggctcccattcctaacctggaaggacattcctcttgtgtctcaaggctttgggtcccagagctcccttttgggctgagtggccccctgctaaggagcccggggcgctgtgcggcccctttaagagtccagctcctccccgctccagggaaagttgcagctttttccgcctcccgggagggtgagaagggccggctgccggagctgggttgcgatcttcccggagccggagaccctcccttgaaaccggcactgggacttctcgatctctggaggcacctgttgcaagtgacaggtaggtcaacagccagcggccggcccctcgccctcggtccggtgctccttctggacccccagctccttttcgctgctgaagcgcccccacccccatctcggggtcgtgcgtcttccctacccgctctctggtcccccaatttttccttctccctagctgaccgcgtctcccctctccccgtccgcctctcccgaccgcatccccaggcttggactcccgtctgcttgggcggtccctcccggccacttttctttctccagggcttcttctggccccttccctgacccacccagcactaatgcggtctgtgcccctctgggagccgcctcccctctcctcttcggctcccctcgcggggagtgcccgggcttttcccgccagcccgagctggtgcccctcccgagagctggccctgggggcgggggcggggccgagctcctagcgggaactgcgccctccaaggcgtccagtcaccttttcgtgggttcctctcacagcgctcggccgtcgagcggggtcgctaacccgcactctcttcggacctacgacatcgcggcttctctggcgttggccagtcagccacaggtaaaggctggaggctggttggctggagtcctgcctcagtgggctccctctgcgcttggggctggggacctggctgtgtgctgtggagctgctttatattgccgctcttcaagcaggctgtgagagatctggtactggaggagggtccccgagatctcagaaggggcacagaatgcttctgtctcctgtgttggtttgtaatggggcagaaaaaggtgttcctccaacccttaacattgaatgaggtgggatttggggtggtgaaatcatttggttagaattctggtggcttgaaaagtggtgactttctaatcaagcttttc

SEQ ID NO: 12457 - DNA, 6000 bp, Homo sapiens
atctacctggtgctgatattccccttataaaaagctgacaaggggttgtccatttttccttgagagtctcaagtaataggaaactcattacctctttacttctctgaatacccgtgttggaaaattctgctttatattgaaaaaaaattgtgttactttatttatttttatttttattttttgacacagaatcttattctttcgcccagtctggagtgcagtggcgtgaccttggctcaccacaaccctcgcctcctggattcaagcgattcaagtgcctcagcctcccgagtagctgggactacaggcatgcaccaccatgccaggctaatttttgtatttttggtagagatgggggtttgccatgttggccagccaggcttgtctcaaactcctgaccccaggtgatctgcccgcctcagcctcccaaagtgctgggattataggcgtgagccaccatgcccaacctaaagtgtgttactttagagcctctattccttggttgactccttgggtcacatacaaaacaatctaaatcttcttaaaaaaaatgtagataaactcatgtccccgataaacctctttccaggccaaattccctacactctttaaatcctcctaatataggatgctttcaactcattacatcatcttggtcacccttccatggacaggctttagtttctcttttaatgtgtggtcttgggcacgggcaagtgtttttgtaaaatttacaaatgtaaaatattttcattgctagtgattgactgtctcttaccactccaacttccctctgtcacacttcccctcaggtcaagtgatgctggagtggccatgagcatttctggaatacagataagaggttgttgtgttggtggtatatttagtttggatttaggagaatatatattatgtggttcactgacacttctatatctagttaactgattgatagctgccttagtgtagaaatggcttccaggaaaactcctaccacccactgtgccaatttcacctggcattatgatactaaattgcaggtgtgttcagcagctaatgaaaatgttgtttttatgggttttgtgatgttgaagagatttttcagctttttacaataaatataaaatgtgctgtgcattgcgctatactccttataatgggaacatttcatggcatataaattatacctcaataaatctgttaattgtgctgtgctttcttttctgttttaaataaatatttgcttttgtgcctaaagtaaagtaaaataaaaatatgtagcagtatatctacaaaacctatacaaaacattctacttaagggtgaaatggaagaatcccctttgagattgggaattaggcaaggggatcactacttctacctttgtgcagcattgtactagaagttctagtgagtgcagtaagcgaagaaaaagaaataaaagttataagaattagaaaaaagaaggctgggcacggtggctcacgcctgtaatcccagcattttgggaggccgaggcaggcgtatcacctgaggtcaggtgtttcagacctacctggccaacatggtaaaacccagtctctactaaaaatagaaaaattagccgagcatggtggtgggcgcctgtagtcccagctactcgggaggctgaggcaggagaatcgcttgaacccgggaggcagacgttgcagtaagccattgcactccagcctgggcaacaagagggaaactccgtctcaaaaaaaaaaaaaagaattagaaaaaagaaataaaactgtgtttagagcgaaaaatgtgactgtgtttatagacaatgtaagacaaaatacagaaatattattacaattaataagtgagtttagcaatgttgctgggcataaaaatcaatatgtaaaaacaaattgtatctttaacagccatcattaaaaattaaaattaaaatatataatttacaacctcatgaaaacatataaagttcttagaagtggatataacaggctgggcacggtggctcatgcctgtaatcccagcactttgggaggccgaggcaggcggatcacgaggtgaggaggtcgagaccatcctggctagcacagtgaaaccccgtctctactaaaaaatagaaaaaattagccaggcgtggtggcgggcgcctgtggtcccagctactcgggaggctgaggcaggagaatggcgtgaacccgggaggtggagcttgcagtgagccgagattgcaccactgcactccagcctgggcgacagagcgagactccgtctcaaagaaaaaaaaaaaagaagaagaagtgaatataacaaaggagacgcaagaatttgattataaaatttacatgaaaatgaaaaaggccaagaataaaaacaaaacacagaaccccccctccccccaaaacaaagaaacaaacaaacaaaaagtcaagaatagccaaagcactcttgaagaacaaggtggggaaacttgtcttatcagatgtcaagacttagtaattaaggcagtggcatggaagaactgaatggagagctccggaagaaactcgtgtatatagacatttcatatataatagaactgacattttagatcagcgaagaaagtatatttttgaaagtacttttcaaaaatggctgagcgcagtggctcatgcctgtaatcccagcactttgagaggcccacgtgggtggatcacatgaggccaggaggtcaagaccagactggccagcacagcaaaaccctgtctctactaaaaatacaaaaattagccaggcatgatggcgcttgcctgtaatcccagctactcgggtggctaaggcatgagaatcacttgaacccaggaggtgaaggttgcagtgaagggagatcacaccactgtactccaacctgggtgacagagtgagaccctgtctcaaaaaaataaaaataaaaataaaaagtacttttcaaaaatgatgctggggcaattcgttttccatatttaaaagtagtaaattggataccatacatgaaaatcagctccaggtggattcaaaacataaatgtaaaatgcaaaaatataaaatttctagaagaaaatataaaagagtatcttgatatctgggtagtgatggatttctaaaacaagacataaaatgcataaatcataaaagaaatgactggtaatcagagtgcattaaaattaagaacttccatttatcagaaaacactattaagagactgaaaagacaagccataaacataagcaataaaagattagtataagattataaacagaaccctaagaatctaaaagcaaaagaaaaaccaatagaaagatagaccaaaaagtagaataggctcagaataggctcttttaaaaagagaaaactcaaatggccagcagttgaattaaaagatgctcaaactcattagtaatcagggaaatgcaaattaaaatcataatacgatagttttccacacttacttgaattataaaaacaaaaaagtctggaaaataccaagggttggtaagcatgtagaggaagtagaactctcattcataactctctgtagtatacatttaggtggtcacttcggaacgggtttggaattacacagcaaagtagaatatgtgcaaatctcaggaccctggaattttactcctgggtatataccttagagaaactgtagcatatgtgtgacatttgatcaacattgttccatcatcatatccatcagtagtaggatgaatgaatacattaatgtatattcattcatgcaatggcatattagatagcagtgtaagtgaaccgcaattacatgtacatgtatgaatctcaaaaacccaatgttgaaagaagcaaaccacagaagcatacatacacactgccaggtttcatttacaaaaagttcaaaaacaggaaaaactaaacaatatattgcttagggatgcaattatagttagtaaaaatataaagaaaaataacagaatgattaccccaaatttcaggatagtgattacatccggtggggtagaggaggggaagaagatagatgtgatcagggagggaaatacaaagagctttaagatactggagaaaaatagtctattttctttaatctgagtagtgaacacatagatacttattccttaaaattattctttaagttacatatgtatgttttatatactcttctgtgtatatttcaccattttagaaaagggaaaaaaaatcagtgcccagagctgaacacacaactctagtaaatctatcatactagaagacaatcatctccattcttttgagtgctctgcctctgtttattttgaaccaaagtgcacttttatacttgttaaattttctcttgctctatttggcccttcttttcacttgtccttccagccagtcaagttctccccaaagccatcatcatatatgtcaaccacagatcatcctccaggggaactggtatgctaaagtttctgagctagccaggctgaaatccaaatggcagccggcagatgtggcaacagtttgaaaagtgcactttgaaacagcttccttaccacacacgcttccctccctacttctcctgaagtaatctgtttacagacccagactaataatcttttttatgagaaactttagcaaatcttttatctaggaaggcaatgcttcacattaggtcatgttgataagatgatgagagagaatattttcatccaagaatgttgctatttcctgaagcagtaaaatccccacaggtaaaacccttgtggttctcatagatagggctggtctatctaagctgatagcacagttctgtccagagaaggaaggcagaataaacttattcattcccaggaactcttggggtaggtgtgtgtttttcacatcttaaaggctcacagaccctgcgctggacaaatgttccattcctgaaggacctctccagaatccggattgctgaatcttccctgttgcctagaagggctccaaaccacctcttgacaatgggaaactgggtggttaaccactggttttcagttttgtttctggtaagtgatgtttgacttcctattaattaggaaggattaaggagaaatcatgttttttaatatttgtaaagcaatttgaaagagaaagatgattccatgccgattattgggctcatcaagaccagttagttaaaaaatacaactgtgggtcagatgagaggacagaggcaaataacatgcaattgttcatgttgtcaaatcacaagtatttggaatttcaatctgttttcattttctgtcatctccctttctcttccatctcacttctaactactaccatgagtgctgatttctctctatctttcctatactggtcccatcaagatttcaaaaagtcactgaatgtttgagatgaaagtgatcttagagatcatctggcccagtactgaccactagaaatatagcaaaccacataatgtaattcctaaattttctaatacctacaccgaaaaggtaaaaataaacaggtgaagttaatatttaacaatataattcatttaacccaacatatcaacaaatcctttcagtatgtattcaatattgaaaatattaagaagctaatttacatatttttatttttactgagtctttcaaatctgatgtgtatatatacccacagcacatctcagtgaggactagccacatttcaagtgctcagcagccccatgtgggtagtggctgtggcattgcatagtgcagatgtaaaccaacttattgattgtacaaaggaaaataagacctagatgtcacacaatgaattgactgaattggcatcactcgaacccagctccccaatgacgttcaggccagaacccctttatcaccctttgtatgcacaatccctttctcctaacactctaacacctctctccactctcattcttccatttctgagccacagttgagcctggggctccctgtgtcctttctcactttcctagatcttcattcatta

SEQ ID NO: 12458 - DNA, 6000 bp, Homo sapiens
ttgtatggcatatgagttatttccaaataaagagtattatttaaaaaattaaataatatcattatattcccctccctgacccttctcttccaccaggcaatataaatagagcttgccagctgcctggcaacacccaacatcccaaatgccatgctgcattatgtggcagcacttctttcccttcaagactaatttagatgtcatttctaaccagatttgttgaagaaaaatgctaggggtgagggctgcagggaagttacttctgttttaactccaggcccaaatcccagctatggatgatactgatgagggagtggctcagaactaacaggcaagggtctttgttctcagggagtttatagcaaaaagaaaaataagacctagatgatacgactgattttgcattctgttttttttttttttttttttttagacggaatctcaccatcacctaggttggagtgcaatggcacaatctcggttcactgcaacctctacctcctgggttcaagcgattcttgtgcctcagcctccggagttgctaggattacagatgtgtgccaccacacctggctaatttttgtatttttagtagaaatggggtttcaccatgttgcccagtctggtcttgaactgctgacctcaggtgatctacccacctcggcctcctaaagtgctgggattaacaggtgtgaaccactgcgcctggctttttttctttttctttttcttttttttttttgagacagagttgctctgttgcccaggttggagtgcagtggcacagtcacaactcactgcagcttcaacctcccgggctcaagcgatcctccccacttcagcctccagagtagctaggactacaggtgtgtgtcaccatgcccagctaattttgtttttacttttttgtagagacagggtctcactttgttgcccaggttggtctcaaactcctgggctcaagcaatcctcccacctcagtctcccaaagcgctgggattacaggtgtgagccaccatgcctggcctctagatatcttttaagcattctaacagcccaaactgagcattctttagagggaagccatcttccattctggctattgattctctgggccttgcccatcacctcccaccaataagtgttctgtgactggactgtcagccacttgctgcacatctctgtccttcctctcctctttcctcatggatgccacgcacctcttacacatccattccttggaggcttttgggcagtcttcaggctgcagaggcttggaaagctcaaccccatccctgagccttatagagggattctgaatgctgataaagatgccaagagcttttagaccacatggcttttagatgcgctctttgttcctgttgagtcagtggttggaaatagagtggtaaggagtcagatcttgttcttcccctttcttgcagaattctagtgcttctcaggaggagaaatttatgcttgaacactacctggcattcaggaggcagcctaggtgtcacctcagatgactagtctgtgggagatcagtgcttttaatgggacaggggttcctagagcctcagcagccttatgactgccaacatttccagcatctttagtcccaagaagagtaaagagctggaatcttgagatggcctgagagagcaaagagtgtttggacagaaacagcaaattctcagttagctactcccagcagggcaaaggaacggggaaataagagaccagaggatttagtgacctaaagcgccagagaatcctagggctgaaaatagagaagttggtgggtgagggtgatcagatgacaggaactttacaggtctataccagtcatgggggagtccaacaaaagtacagtaataagggctctgccctcaaggagcccgtgataatttagttggggaataaaaattaatatacttgaaataattttggtgctacactctggtataaacaaaagaatgctatagaaatccttgagaagggacagatcatgtggtctgggaacctctgtgagctgatggctgaatgagacagtgctcattcagccagaggagtttatgccccagctacagtggccacagcttttagagatgagtgtgtctgagtcttgcatggtttcaaggaggaagtatgggggaggaagcgtcatcatcatcaccatttgtcaatcaccattgtcatcaacaagtgccacaataaacagtcattgagcatccttccctcactaactttacatttttggggggaggcaggacaaacacagaaatagttgaaggactagtatgagagagcatgtgccagtagcatgaagagagaaaaatgagggttggggaggtgacagaaggcttcttggaggtgggagcacttcggctgacccttgaaagaaagttatggtttggactaatggagaaaagggtgaagggggttgtaaatcgcatcaacaaggcagaggtgggagtgagcaacgcaaataggagaagtgagaaaactggctggccttgtggaaggagtagtgtgggcaataaaatctgagagggaagtagtgtgatgattatatagagccttgaatgacagacagaaggagtcattttggaacaaagtaggaaggcattgtaaatttttgtatttggggagagacaaggccatggagaagaaggaggaaaggctaaaaggtaaacgttgggattctacattcttcttcttagctttactctcccatgtttttttttttttttatttttaatttttatttttttgagatggagtttcactcttgtcacccaggctggagtgcaatggtgctatcttggctcactgcaacttctgcctcctgggttcaaggggttgtcctgcctcagcctcccgagtagctgggattacaggtgcccaccaccacgcccagctaatttttgaatttttagtagagacaggatttcaccatgttggtcaggctggtctcaaactcctgatctcaggccattcacccaccttggcctcccgaaatgctgggattacaggcatgagctaccgcgcccggctgactctctcatgtttagggggaccaactcaccctatcccagtgaaatgggattaattggtcaccttgcctgagattcaccttgtgaacagttacctagagcagccccaagaggttctgcaccatatactggtggtggagaaccttgtcccagttggaatgtcccaactaataagaaaaagaacactctctgaagttgttctcaatagtgttgacctccttcatgaaatggaaaggagaaaggagcagcctcctagcccagctgctagcataggtgcagaccaagatgcggagtctgcttcagaaggtgacaacctttagatgttgaatctgtccctgaatcagccctggggaaaggaggcagcaatcatggaaaccttaaaaaaacaaaaaacaacataatgacaggacaacctggaggccattattttggtggctgctacttggccactcctcacatagatttgttttactgacttcctgcagcaaaaggagattggcacaggctctgctacataatcatcattattattattattattattattattattattattattaagacgtaatcttgctctgttgcccaggctggagtgcagtggcgtgatctcagctcactgcaacctctgccgtccgggttcaagtttttctcctgcctcagcctcctgagtagctgggattacagtcacgcaccaccacgaccagctgatttttgtatttttagtagagatggggtttcaccacgttggccaggctggtttcgaactcctgacctcaagtgatctgcctgcctcagcctcccaaagtgctgggattacaggcgtgaaccactgtgcctggccttcatctatattattaccaggaggcagatgtgttctctttttctctgaggtttagaattatgcaaatgaagatatgaaaacaaaagctcagtgaggtggggaggattacacttaagaatacaggtaattttcaaagctctttaagacacccctctcagtttttactaacagctctctcttggctctttgccagtctgtttagaatttggcacctcttcataacctttcaaccaaagacctgtaagttcattctaaagctcctatcctggcctcattttgcaagtggagaaatcaaggcataaaatatgagctttcagtgtctgtgggctgaccttgagtcttgacctttatcctgttctatcttccctccgccgaaaactctgaccctattcctcccaggttcccccttcatgatattatctggagggcaataggacctagggaggttccaccctgcggcggagggagacacacctgcctaacagcgtgggtagagtgagtgttgaagcaagtcacttaactagttagggagggcggggtagaagtgggggcctgctgctcctagggaggagtaaagctgtggctcctgcctgggtctggaggtggtggtcagaagtgcttctgaagagcggcccaagcccctttttgtcccgccactccacaacgagcatccctcggctggccgcctgcccgggaactctccggctggttttgtttggccgcagccgtcccgcccatctcgcccgcccccgccgtcccggtgccttagtttttgaagctgccgacctctcgcagctggaatcgcagaccaggcaggaccctggcagcagacggcgtccaagagtttggcgacctccgtccagccaggttggcgccccgcacatcgtgcctctcactagcaaagtttctccgaggagaagcagcccctccagccttttcttcatcctgtagagcgagcgcgctctgcttctgtccctcaacactgcattcggagacagggtggtgacaatactccactcccgggccaggcggtcttgggggcggggcttgggggaatccgaggagctatcctgagaaccctggactcggcaaaggtcctgagagcgcgcaggtgagcgggccagctgatagctacagcctagcaatagctaggatacctaggcactgaactgaatcccctcttctgccctccttcttctgcgcccgctcttctgccctggctcagctctccgctgacttgagaggacacactggtcaggactctttgtgaggagctgctgagtgtcggtgcccccgacagatcggctacaccctgcctgaggggctgcgaaaggagccgccacggaagccgctgttctcatgactcttcacgtccctggagttggactctggatggggcgctgggatgcttgcttttgtcttgttcaagtttcacagcaagtatgttgacgattggaatcggggccaatcaagagtcaagttcaaagtggtactcctgggctttccatcccagactccaagtcgaatctgagtctagaagagagcggtttcttgctctaactagtgaatctctgttcccaaactggacttgacagagctctcctcacctatacttggactgtagcggccatagggttctcttggggatgggtgggagggtgctatgaacacaagaccacaacattcagaaagaacctcgacaatggacagagtttatgaaattcctgaggagccaaatgtggatccggtttcatctctggaggaagatgtcatccgtggagccaacccccgatttacttttccatttagcatccttttctccacctttttgtactgtggggaggctgcatctgctttgtacatggttagaatctatcgaaagaatagtgaaacttactggatgacatacaccttttctttctttatgttttcatccattatggtccagttgaccctcatttttgtccacagagatctagccaaagataaaccgctatcattatttatgcatctaatcctcttgggacctgttatcaggtgagcaacttttaaatcttttccttacccccctaaccccaccccagacttgggcagaga

SEQ ID NO: 12459 - DNA, 6000 bp, Homo sapiens
catgatctctgcctttttagaacttaaaccatgttaaggaaaacaattcattcagttttcaacagcttctgaatactgattatgtaccaggcactctgccagaccctataactgcaaagacaaataagatgctgtctctcttctagaggagttaatagtctagtacgaccttgatctccatctagtgtggtcagtactatagcagaaatttgggcaaaatataaaaagcacagagcggggaaccaactgattctaatctttgaggttgatctaggaagactaggacccctgctatccaaaaagactgcaaaccaatttaataatttttttcaccttctaggggttttgatgtgggaaatttactccctggggaagatgccatatgagagatttactaacagtgagactgctgaacacattgcccaaggcctacgtctctacaggcctcatctggcttcagagaaggtatataccatcatgtacagttgctggcatgaggtaagtgctttattaggatctcttaaattatttccttgaatctacttgcccatttagctggccattcagccaccaaagactgatagctgcacacattcttttttttcctttttttttttttttaatttgagacaaggtctcgctctttcacccaggttggagtacagtggcgcgatcttggcttactgcaaccttcgcctcccagattcaagcgattctcatgtctcagcctcccaagtagctgggattataggcgtgcaccaccacaccaagctaatttttttttttttttttggtgacacagtcttgctctgtcacccaggctggagtgcagtggcacgattttggctcactgcaacctctgcctcctgggttcaagtgattctcctgccttagcctcccgagtagctgggactacaggcacatgccaccgtgcccagctaatttttgcatttttagtagagacagcatttcaccatgttggccaggcaggtcttgaactcctgacctcaggtgatccacccacctcggcctcccaaagtgctgggattacaggcgtgagccactgagcctggccaattttgtatttttagtagagatggcatttcgccatgttgaccaggctgatctcgaactcctggcctcaagtgatccgcccacctcggcctcccaaagtgctgggattagaggcatcaaccaccacgccaggccttgcacacattctctgaccttggcctgcaacttgatcatctgatggccagaggctttcccaggcccactccgattctcactagagtgtcattagtacactccaatgccagctcagctttagggagtgaggtgttgtggggccatgtcatctagcataagcaggcagccagaggcattcagacaagtgaatgggcattacaaaagaaaagtcatgaaagtttgttcattcctttgtgtgtcattggccctttcttctactttattagctgccaaccgtttctggctgaggtcctaaatgagatttttttttttttttttttgagaccgagtctttctctgtcgcccaggctggagtgcagtggcgtgatctcggctcaccgcaagccccgcctcctgggttcacagcattctcctgcctcagcctctcgagtagctgggactacaggggcccgccaccacgcccggctaattttttgtatttttagtagagacagggtttcaccgtgttagccaagatggtctcgatctcctgaccttgtgatccacccgcctctgcctcccaaagtgctgggattacaggcatgagccacagcgcccggctaaatgagattttttttaaaacctactgcttgaaagggaactaaaacaggtagtgggttttttgtttgctttgttttgttttgctttttaatatggtgcatcgtggggtatgtgggtaggtgtggtattttggaaataaggaaatctgtcctactactattaaactgctttgctcctcttacctcgagttcttcccaagatgccttctctacttttcagtagatccttggcaacctaaatttctagtaggaaataaatgctcaactcttcagagtgtccaacaagtgcatatgtgaatctggagccttcttggtgaggtgaaaagtgggtatctggatccgagcatggctggtttccctcgaacaaatgacagatcacagagaaagtgcagaaagggaggactccttctttcttctgtgtgatgcaggattaagggtgattggctatgctccctcccaatcaggaccttcttactctgctaattaaaaatgatttcagacaggtactttatccacagcctgtttaaaggagtggtcaaaattggatgcatatcagaaaccctaaggagctcttaaaaatgcagattactggctgggcatggtggctcatgcctgtaatcccagcagtttgggaggccaaggcaagcggatcacgtggtcaggagatctagaccattctggccaacatggtgaaaccctgtctctactaaaaatacaaaaattaaccaggcgtggtgatgtgtgcctgtaatctcagctactcaggaggctgaggcaggagaatgacttgaacccaggaggtggaggttgcagtgagccgagatcctgccactgcactctggcctgagtgacagagcgagactgtgtcacaaaaaaaaattcaggtaactgggacttttctccagaaattctgattagctatgcctgaagtggaacccagaaatctctttttaaacttcccaggaaattctgatactcagctaagtttaagaatcactgagtcaaggaatcaagaaattgatgaccattggttctaacagattgagagcattctggcatgaatgttccctgaaccactaaataccaaatacctcgggggcttatgggccatggccatcaaaaagaaccttagtcgtaggccgggcgcggtggctcacgcctgtaatcccagcactttgggaggctgaggcgggggaattaccttaggtcaggaattcgagactagtctgaccaacatggtgaaacccggtctatactaaaaatacgaaaattagctgggcgtgatggcgtgcacctgtaatcccagctacctgggaggctgaggcaggaaaatcgcttgaacctgggaggtggcagtgagctgagctcacaccactgcactccagcctggacaacagggtgagactctgtctcaaaaagaaaaaaaaaaaaaaaccttagtctttttgttaccagtggtaaaaaaaaaaaaaaaaaaaaaaaggtcccaggtactcagaatccctgctcagtaatacagcctgtggttttgaaatattaatcactaaaaattatcacatgggatttctgttctgccaaccacttgaacttgtttggtagccatttttcacttgaggatccaaaataagaatgtgttgtatacagttacataatgaacttgccctcaattttgatcagtgtgattgtcagtttaatttgcaaattgttcttatcacactaataacctgagttactaaagatgaaaagtgcacaaagactttatggagagctgctatttcttttttttttttttttccttttgtaatcgacagggcatgctactgggcatagagcatatatttaataaacatttgctgcttactcattgcatttcccttgaattctggattctagccactctaacactttactttttctttggttttagaaagcagatgagcgtcccactttcaaaattcttctgagcaatattctagatgtcatggatgaagaatcctgagctcgccaataagcttcttggttctacttctcttctccacaagccccaatttcactttctcagaggaaatcccaagcttaggagccctggagcctttgtgctcccactcaatacaaaaaggcccctctctacatctgggaatgcacctcttctttgattccctgggatagtggcttctgagcaaaggccaagaaattattgtgcctgaaatttcccgagagaattaagacagactgaatttgcgatgaaaatattttttaggagggaggatgtaaatagccgcacaaaggggtccaacagctctttgagtaggcatttggtagagcttgggggtgtgtgtgtgggggtggaccgaatttggcaagaatgaaatggtgtcataaagatgggaggggagggtgttttgataaaataaaattactagaaagcttgaaagtctttggtatctctattaatcatgcagcctccctgaagcgccctatctcagtattccagaaagctgctgtgtagcattagtttggcatattcctacactgagaactcgacaggatcctccaggtttaagccctcttgttaactcctgcctctgaatcaaagatgcattaagcaaaaacagtgcctgtcacagcacgcatgcaatgttatttgaatgaatctgaaagttgggcacaaactgccatagcctcatttccctacgtcgggagaggaaaactccatcaaaaaacgaaagccaggggcccaggatagccaactaatcgacccagtcaactaactgacccagtgcacaactctggtagctcagaaaacgcgggctaatttggaagtggacaggggcggagctgtggggccagcacggaatggatcacgtggtctgaagtaacttccttttctcctttcttttctttttggagtaacatctcaacggcacctcggctctgggctgtaagccctgcgatctcaaggcgcaaggctgggcgcaacggcagggttgcggggttacgggattgcggggtccggggagtggaacccgccgactccgggaacgaagcaccggcgccaaggtgtgggaggcggcggggtggagttggacgcctgcctcgcgccgacgcagtgcactcacgggggcggtcccagaggcagctagctgtggttccggttccgtcgcggagacacgtgaaggtcggtgcggagttcgtctctgcaagcttggtcgccctgggatggattcctcctcctcttcctccgcggcgggtttgggtgcagtggacccgcagttgcagcatttcatcgaggtagagactcaaaagcagcgcttccagcagctggtgcaccagatgactgaactttgttgggtgaggagcctggggctgggacctgaacactgtacctactttccctctgtccttgtaccgcgggactcgcgacaacgtcggggattcggggtggggggcgggcacctggcagcaacccttgattttctcaggttcctgtggcctagccggatgggagaagggtgactccgcttctctggggactgtcattccggacctcggctttgttggtgtagaggactgggtatcaaagaagacttatgccactggacacccagcactttcaggcacccgaggttgaagctgcctagtgctggtcaccaagactgatcggagcccccagtactgggattttatttttggcagcccgagtcccagagagtcagtgaatcagtgaatctgctattcctggactcctcgggatttaccttcattacccagttctaaccctctccgctgaaaaatgagtggctccagcccagtaactataaaagtggtgtaatctcttccaacgtacatacttatttgctttcttgttggattgttgtgtaataccaagccgttttgggtctgaaggttgaggaattgagcctgccctgtgaggggactttggcaaaagggtggaaggtatttgcagcttgccaacaacgtgttctgcttgccaaggacagatctcccttaatgtacacaattcacagaattcagaggccaaggataattttccttggaattagagggtctgaggcttgtgtacatggcagagaataatgaacgaaatttttgaaccacttaacttgaactatatacagtcattggtttccataggccctttcccataaacttacagtattgctggactatg

SEQ ID NO: 12460 - DNA, 6000 bp, Homo sapiens
tatgaaaaattgcctcttccttccctaggctcctgggacagcagcctctccctccacctcccctcccccgagctatgaaagtctaccatttcctctgaaatctagtcccagatctgaaaggaacaagcgatcagaaaagaaaatctggaatgagagtgtggtttttactttcttaatactttgttatttttgttccgtcctcccccacccccagcctgcattctttttatgagaaaaaaaaatactataaagctatttccattttagaaaaaaatgagtggaggctgaagaatgatgttgggtgatggcctccaaaagtcccacattttctcacttggtggagagtgttacacacttcactcaaagcaatcttaatgtcttctggggcctagcacacagcacagccctgagtgagctaatcagtgtgtctggcaatacgtaagtcttctgactagaccagtcttctgaataggagagctacagactttcacctgcacccattagcaaggaggaggcattaaacccacaaaagccagaacgcagaaaaaaaaaaaactaaggagaaaacataagtgcacagtaggtatctgtgagataaagcatgcacactgaaaaaatgagtgtgcataaaaagaacattacaaaatatgcttgggcaaaatagagaatatcatctataaatgaaataagtattagaggaacacagaccaagacaaaattggctgaaactgggacctagcaattagtatgaaactattttacttactggtttgataaactgaataattcacccatcatcaatgatttaccttttttaaagtaggaaaaggaataaaataattacatcccctcattatttaagttaaccagatttgatttcagttgcttgcaaccaaaccaccttaactaaagcacaacacaaaaacaggtaacaatacaaaaagtaatatagcttttcagaacatagggtcttcagtgagatattcactaatagtttgaataaaaggttattatttgagtataacttttaaaatacacagacaatatgggagtaaatcaagagactgaggaagttgagaacaggcaaacccccaggaaaattcatatctgtgtaacttctgggaggcagtactagaatgtgattgaaatttatttagtaaacagaaaccaaatcaactatatgatcctgtgtttagagaaagatcatgtgtagcaaaggggcttattcaagcataggaatatatgaaaaggacagtcagaagaaagtgttggtatttcccacccaagcactgcctggaggagaaaaagtgttggctaaggagaatggaacatttcactttctctggcagagtcatgcccatgatgtgtaatagtacttcatgcgtcctcagctgaaacccccttcttaaaatgaacaaatacccttgctctgattgcaggctcaccaaacaaccttctaaggttgtggtttcccaagtagtagcttgtctacagggaaagaataggcaggtaagactgacggaaacctccagtaccccctgacaattgtatttctgagggcaaattattcagttgtcactcctgttgaaacagcttcccttgtggtctacttatggggagagaatgcagagatccctaggtttgagcattcagatctgtttatatataagtctctatgaatgggagtctttccttgaggcatccagaggcaattcttctcagcatacaaacaaaatcaggatttggtcatgcaatactgaggaagagaccctgaactgtagacgcaaccttgggggaatcctgtgggagaagccagatggccttggctcaaaggacaaccttgtgcatcaccatttcataaccatacctttctaatgtttagttaatggtggaaattacaactaagatactctgtggcatattatgcccccagcactaccgttatagataaacaaaaggttaattttcaaagtgataaaagggctcctgcaaatcaacaacaacatctgaaacagtttaaatttctccctgggaaaagaaaggaagtgcattttacattttactgaccctattgttttcctcagcaaaagggtgggtattgtgctcaaaacagaacaaccaaaagctgccttactaaaatttcaatcttcattagagagataaaaacctgaaaaccggtggacttatgacatcctgaaaagacgtctatcaattccttctacctaaacccctcggagatgagccttgtcttcaacatttcctccttaagttaaccaggcttgttctctgttgcttgcaaccaaacaaccttaagtaagacacaataccaaaattacacaatacaaaaagtaatataacttttcaagataacaaccttctataatttatttttttcaccctccacaattccattagtgtcaccatttgctggtcgttttttgtttctgggtgctttgtaagttacatatcacatgtgaactgatttaagccaaaagttttgttttggcagtggtttcacagtagttttttgcggactcagaaacttttaacagtagtgtctgaggacttctttaagcattttcctttctcacttttgaaaggtatgtgagccttataacatgtccttaagtaaatatttcttggtagatgtataatggagagcaaagtagttttttttttaatgctagtctccaggtaggaattgatagaatcgtggattagaagaacaaagaggtaagagaattgaaagggtttttataaccatggggttttaggaagttttagacagggagtggattcaaaccaggaaaggtctggcatactgggagaatggtagtgagaagttatacatcggactaactggagaatataccaaaagggtggagatattttatactactgaggagaggtaggagtaaagtttttgtccttgaagcctggctaagtgttgtgaaagtgagttcttattgtaaagccatgtctgtgacaccaagtcatctgtctttattaagctttacatactccttagttttttctaatgtatatattcaaaacaaacaaaagccacttatacaactacctagcagccaaacactgaatgatggactgttgaatctgagagttctgttagtaagccttcataagtataattcacttgtctaggggaagttaataaagggtcatgaaaaaaaaatgaggtaaagatttagagagataagatgtgatattggtgagtttggactataaaaggggaagaccagaaagttgtgacatattgacttctgaatattcaccagcaaggcactaggactccctggcttgcctcctgaaagggcctcctccacacaggagcccctcactggggagcccctccctctggggtgtcatatttcaatgttctaagaggttgcctggagtgtctatatttagagtatgactcctcagcagggacaggtggatgcatgaggactaacttctgcatacttggtccctgagttttgggattattctgaggggcttgtactggtggctcaatgaagttgtaatagaaggcaggaaatgaaaagtcctctttttttctggcaactgcttgagatcctgtgcattgcccttccacttgtgaggggaaaaaatgacacagacatcaggggtgttgcactgattcccagtcacccacagaccctcaccaccatctccactggaaaatgctgaacactcaccactgctagggtagcataaaatacatgaatggcagacaacagagagatcgccaacagtgtcatgatggaaagaaaattacctctatcaagtctcattttcatcaataggataacaggaaattctctaatttctggaagatttataggttgcaccacaaacttcagaatagattgtaaataaagccctgtgaatgaaaggcaggctaatctgtggagtcactaatctgtaaagttcatctgaagatgtaagattcatctgaagttggggtctgcataaaatctgtcctttgaagccagagtgaaagtcacccagcaatcttctatgaagatctcagtcatctgacacctaacactatgagttcagccaggagaaagaaagggacaatagttcacttacttaaaatggtcaaaattagaacactgaccttctcggtatagattcatttatccatcaatttataaatcatgttgaaagcacaactggttttgtttctaagggtgtgtttttacattttaatatgttgtttgaaagctgctatttcctgtgcagtccgaagaaaatatgttcaacttgatacaaactaacttcatcaaatcaatgaggcctcctattaactgggaaatcttgcttatgttatatatatatatatctgtaaaaaaaaaaaaagatttgaattatttcttctccaagtgggaaaagctttattgtttttttccgattacaaaatagtgtagttcaagtcaataaaaaagaaaggacaaaatataacttaaatgttatcaaaatactaattaaaatctcaccactgcctggacttccgtttctgccccctcacccaatgttggtgtagagactgaacacggaaaagtgtagaaatttaagaaaggggctgcagaagtttcagagccaaggaaaggatgagacaattccccaagaagtgtaaatgaagggtagactcaggaaaagatgctgccccttcctaaagatgctgccccttcctggaattagagaaacataaattcaaacaccagaaagacagggccacttctggtttctggtattgttacagaggaaaaaagtgacagggcccactgtgggggttgagggggagatacaaggcaggctggcgcctgccgcactgcttgtgggagtggaaattgggggccagagcgcactggtgacgtggccgtcacgtgaccaagagccgcctagagcacaagtcctgctagtcgcctccgtctgggtaccagccccctattactctgcaggcgtgtgaagaaagaaggaaactagctcggaccgtgcaggtcggtgcgagggtgggcgctgcttgagaggaggtatgggtggaagagggccaagaacgccacagatccgagttcaggccgatcacagctgggtccctttctcgcctactttctaaatactgctacccacccccaccccaccccgtgctcattttagtagagagaagtggcgggtttcgggtgggggtgaggggagtgaatggcgtttccagagactccgagaaaagaaaggttctagtgtcccgggtgctggtccgtccaccaagcactccgtcccctcggtcccttgtctgtttgcaggtttgtaggtctgttggcctgtaggtttcggcacaagtttcagcgagagaaggagaaaactgccttggttggaaccttgcaggtcagtgtgaaggtgggattagcccaggaccatgggtgggggtggcggaggaggggggctgggatatgagagggccaggtccgagtcgccctctcctggccccttctttctccacacccactcccatttcagtgcagggaaaggggtgtggcggcctttgctggggaaatggcggacgacaagtggggcggaggaggcctgcgtccggaaagtcagtagagtatgagaaatattttaaactcaagtgtctaaaattcacaaaaacagaaattgggacctgtgtcctcagttcatccactacactttcatttctccattgccgcctacctgtctttgcatttgtccttctgccagactctatcctctatcaccgtggagggaccactgacaacagaagacaagggaaaacgaaggaatttatctgactttggtagaggttaatgagagaaactgcccttaatctttgggggtggaggtctggtgtaggagactacctgagaggtactcacactgtcaccctcctagctatcatagcagagacccatctcctgcccttccctgtggacccaggaagagaaatgggggctcctg

SEQ ID NO: 12461 - DNA, 6000 bp, Homo sapiens
gccatcaagtctgagttctaagctcggaccattctacagcactgtgaatgtctcaggggtgctcccttaggctagtgagaacacattgagggcaggagtttgaagcttcaatcaagttggatgtagggactgagtgtttagggggaggggaaggaggaaggaaatgaagcttttagcttctcctccttttgcgtggaaaccccaccactgacagacagagcagcagacacagacagacggaagcgaaaaccagacaggaacaaagaaaagacaattcggacttagtgctcagtggatgcaccaacatctgaatgtaggtccagacccagacctttccctgttcagaatccaggttgtcaagcctgtctcttatttcacagtcctccgtcactctgctacatgataaccactttctcccctccacctcctctagtcaccaatgtcaaccatttctgctgctgacactgccctgcctttgacaagtcacaaaatgagaacaagcctgggttcgggttgtccccttggggaaacagagaagtgcctcctaacttgaaaattgtgctgctcccttccacctggacttcaggagtctccaatcaacacccaccttcacagcaacctacaaggatctggatgggtttcctccctgtcctcctccaccttctttggccacagtcacaccacctttaaggaaacagggagctggtagctgaggaggaaccgctatttggaccaacacaccagcatgtcagctcctggtcacgtgaagccacgtcactggtgagtctgggtcccaaatttcccctcccattatttgcaaggcccctcactcccccgccttccctcccaccacctccaccatgcagggcactgtcactcgttttctttttagtcttcgtgcacacaacaaaagtgtcatctttctctgattaccagaagaaacagcatcttctcctgagctactggtcatttctgcttctctgggaaacgggcccatcctcttctctgctcccttcaccacttccatttgggctcactaatgttcatctctgcagtcctgaaaatacctggaaatgaagatgagggagggagtgtcaggaaaggaaacagtaggaatggattctgttactttcttgttaacaccattctgttctttgttatacaaacatgcatttttattattgaaaaatgttaaagaactatttccattcaagaaaaatgattcacttttattaaatggcatatatcataaacaataattctcactgcataatgagttctgcacatgtcactcaaagcaatcttaagttttctacatcttgtcccatgacaacatcctgattaggtaatcactcatttgagagtttacaaatctgatgatatgccagaaccaactaggcttttttctggagtgtaaaggtggttgagtgttggaaagccattcattcatttattcatttattcaacatgtgtactgagcaggtactacatgccatgcattgttcttgatgctgtggttacagcggtgaatagagatgacctaaatttctaacctcatagttcttactttctagtgaaagagacaaccaaccaacaagataaaacatatagtatattgttattaataagtactaaagaaaaaataaatggcaggaaagaagatatgaaaagtcaagatgggatgaacttttagaaagggtgaccaaggaaggactcactaaaaaggtgacctttgagtaaagatctgaagtctgtgagggatctaactaagtgtggtgatgtgggatggaaatacatcccaggtaaggagacgagcaactgaaaaggctctgtaaagggaacatgtccagtatattccaggaacatcaagaaagccaagatgactgagtaggatgagttagatagagagagagaagtagattaggcagaaaagtagtaagattgaacagggtagggccttgtcagttataataaggacatttatatttcctctaaacaacacagtaagtgggtggggagtttgaacaagggacatgtgtctggatatgttgagaataaactataggaagagaagagtgacagggagactggcctgtctacatcattcctgacaacagcaaaccaaagaagaaaagaaacctcataatgaaagcatttgataaaataagtaaccattcctaatttaaaaaaaaagtaaaataggaataagagggaacttcatttatgtagtaaagaattatacgtaatttaatgagtcgttcttagatgaattaaattagatataaaagaaaatatccttaacctgatgaagaagatatcaggagctcttctgatctggcagattcatccctttctctggactatcaagattacagaacttaatgacttgcctccattcactgatagtatttctttgtactacgtgtgtgtgtgcacgtgcgacagagagaaagagagggactagtaaacataagtgaaattagccttgaaaaaaaaatacatcaatcacaaacaacaaaagttatactaaataatgaaacaaaagaggcattcccactgtcttcaagaacaagatcaggaggctcgtaaggaagttctagtcaatgccagtcattaagttctgtgatcttggtagaccacagggagggacgaatctgccagatcagaagaacttctgatatattcttcatcaggttaaggatattttcgtttatgtctaatttaaccaagaatgactcatgcagaagaagaaagaaaagggggcataaatgttggaaaggaagaaatgaaaaatcatcatttacaaatgattatatataataccaagataaaccaaaggtatcactttaaattagaattaataaaacagatcacaaaaatttggaacttgattaataagcacaaacgcactactaatgtgtctaaaaagaaagttggaaactgttgacagtggctgggagtggaaaagataacaaaagtttctttccctgtatactttatatatttccttattgttttgaatatttttaaccactaatatataatacttgtattaccagaacaaaatacaagattcctaatctggactattatatatatataacacagaccctcttggccattgtattagctcttaattttttgcagggcgggggttacagaccccttgagaaactgatgaggtcagtgatctctgttcctgaaaaaaatgcatttaaccacacatataatcccaaacaaagctttgcaggtgaatgcaatttcaggtggtctacagagttgaccgggtgagaacacctactctgggttcatcagtggggattgttccctgggcatacatttggttgagagggcaccaaggtggatgtgtactggcaggcagtaaccttgcaggaaggctagactcttcctaggtcccctggagctaaggaggcagaagtgagaggcccaggaggatgcatctcttaggccaggtggtagtagcagacagtgtttggagcaaggttcactggtaaccacgaataaggacagacagcagtcaggcctgggaacttcccccaacaatcactttttgtgtgatcacaaaaacctttttgtgaaatcacaggtttcacaaatcgtcagctgcagggtcaggtaagaacagcaatcctttctatgcatcaatgggtttcctctgggaacttgggggagggacggaaagagccaaagacatttaaccaggtctgcatcttggtcacttgtctggatatattttgggtgtgagcaactgagccaggtacctgaatgcaggagatgagcggctctggcatatgggagggagtagagagacagcatctccctcctcctcctgacagggcagggaggatttgaccactctgcacccaccacactcagtttccttggcctcacagctcttccttttgcccagagttgaatcattaactggaacctaatccgaagacaggtgtttaaaactgtcatggttacagccatcaaattacaggaggttcacacacagcagtcagcaatggtttgggaatattaaataaatgtgtttctctaacaggacaagacaggatcatttatttatgcaacttaaaagctgtcccagaaggagaaaaaagtagcgtattatttgtccaaaataaacaagattgaagaactgaacatctctctgtggatcaatttacagatcacatggaaataggcttatcttattgagaaatattccattttagatgttcaaataccttagcatattttaaaaactatttcctatgtgaccaaaagaattcatgttctattcggtaaaaattaaccaaaattaacggtgctttccaatggacgcaggaaaccttttttctttacaaaatatgcccaccctttttttgttgctacttcccacattgaattcttgttttactgaattttcttactataaaaataaagcatgatgatagttttgaaaacaaaacagaagtatttgagaagtacagaccccactcccactccttgtctcctttctgacactctgccccttaactatactggaacagggagtcaactgcaaggaaaatcctggggactaggggctgaggaactagaggtggagagatggaagagtgtccagtagcccaggaaaggatgaaacaattccccaacaaaaaagtaaaaattttcagtagccctccgagaagatgcagcccctcccaggtaaccagagaaaggcaaattgtgaaagcagggagaaggggctactttaggcctccaggactacaaagacaaaaaaatgagtgacaggacctgatgtggtggggtgagatgggaatggaagtaaaggagggggctcgtactcttggtgggagtggaaattggggacccaagcttactggcgatgcagccctcacgtgaccaggagctgacgtgggcaaaggtacttaaagccctgaccgtcgttctccgtcctcctctgggtaccaactctattgcgcagctcgctgccgtgcgtttaacccaggcgaggaggaggaggagaaaattcccccagattcgggcaggtgggtgtgagggtgggcacagtctgggacccctgaatagggtaatctagggatgcgggagtcggaggccgcgggtgcctcggtctcccccactcctggccggctttccagacctgaggtgctcaaacgcggctcattttggtgggcggtggggaaagggggagggggaaacgaaaagacttttgatagactttacgaagaatccgcttacttcctttccagccagtgttttttggttttgtttataatattcaggcccgcaccccacattccgtcctgttttgagaggaggagggaagagaaataaacgtggcagcgcatagaaggccagcagggaggttgggaaagggtaaccaggaggcgggggtggggcatgcaatttggtaacaatctgggcggcacactcccaccctgactttccccaccaccgccccggcaccctcccatcccccagccgaccctctgtgatttgggagtgctgggaaatgggtgtaccagctgctgttggagaggtggcgggtttggcgctgtctgggcttcacgggaggtgggggggaaggggcggaccctgagagaatctggtattaaaccgccttgttaactcgcagactgctttccagacacctccggcccacacagccgttcaccccccgtcttttcagtcctggaaaaggaattcgggtatgcaggcgggagaaatggcggttgttggggggatttgtgggaagtgggaggtagagcccatagcagagaaatcgtggaaaatctcgaccctgaacccgaaaaggcagacgttgaggcccctcttctgcaggctaacgctaggcctaggggctggggagcgaaagatgggtgatcctgggaggggaacactgaattgtttggcaggagtcccccataccgcgtcccatccagcttttgctgcaccctcgccccgctc

SEQ ID NO: 12462 - DNA, 6000 bp, Homo sapiens; identical to SEQ ID NO: 3489

SEQ ID NO: 12463 - DNA, 6000 bp, Homo sapiens; identical to SEQ ID NO: 3490

SEQ ID NO: 12464 - DNA, 6000 bp, Homo sapiens
taagggttgatggcaaaaaaatttttgagaaataccaaccaaggggacgattataacatttttatatttgtcctcatataattttcttcttcttcttttttttttggtttttagacagagtcacgctctgttacccaggctggagtgcagtggcactatcttggctcactgcaacctccacctcccaggttcaagtgattctcctgcctcagcctcctgagtagctgggattataggcatgaaccaccacgcccggctaatttttgtatttttagtagaaatgaggtttcaccatgttgttcagactggtctcaaactcctaacctcgtgatccgcccacctcggcctcccaaattgtacaggggtgagccaccacgcccagcctctttcttcttctttttaaaaagaacataagatatattgttcccccgtaaaattctatccagtctaatgtttaagtactttaaaaattttaatgaatggggtaattcaccattcttcaattgctcttaccaaacctttgtttagccattgttacagataagttaggaaagtcatatctcctctttgatgtatatgtgtgttaagcaagtagctatgatattctttcctatgctttaatgaaaatcttgtacacaactaaaatactccatgagacttacaaatattgtaatttatttgactaatgtagaaagggcttttcagaaacaaccaacatttctcagatcagtatgaatttttggtttaatgatattttcttaagaaaatgtttgttttagttaccaaaagtaaccacttaaaagaccctccataatctgatttttttggagaggaagatgatcatatattttgctaaacagcaaaaaaggaattaaaataaattatgatatataatacatgtaaataaaaataataaaaggaaccaattacaagaggtcatagcaaaaggaatgtattaaaatatattcagaaataggtaatcctaaagaaaattattatcttggttcttttattgtagctagaggaatggatttagtcaagtgagattagaatcagtgactatacattatttactatgtaaataataggatatatactttggaggagatgctagatgttttgaaattttcatccttgcaaatatatatttcaacaatctggtcattttcaacctgaacatttttttcaatctgaacattactcttaactagtacttgtacatttttacaatattatgattgaagtttgtaaagatgatccaatatgtcttctgaatcatagaagaattattaaattaggatatgtttttattatttgcaagctggtaatccggtctgttgttgtttctttttcttttaacacttctagactaatcggagcatgcttatcaggtatctaaccttgggctcattctttgatcatctttgacaacacagagtttacactcaacaaacatatagcaaccaacagctgataaatttaagattcatgctattatagcagtgtctatcacaaaataattgtgacttaactaaaattttaacaaatgccacataactctttttaataaaaacataatttttccacaatgaagcacaaacagatatatcttcatttctaatttgatagaatgtagtctgctggtgtcaccaagacagtagatttcaggaataggccagatctcattttaatctgagttaggacagatgttcaagtttgacttaagaggtcttatccagttacatcttaactcactcctgacttccccagagatgggtacgatggctctgcctacaacagagggcctacagagggacttctttacatgatcctctgacaaacatgagctgagcatgatgagtattagggttccctagaagcagagcctaaggtggggcatgattcttgggccagtgatttagagcgagtgctctcagcagcagcggagtgagagaagcaggatatggctggaggaaaaaacctaagctcgctggaaacaagctctagcctaatcccaggaggagctctggagtaggatttacaccacagaattggtcaaccttgaggcaaggtacccttgtactctcatcatcagttagtcattgcttttggctgcagggttgtgtgtgtaggggttggggttattaaacagaaatctcccaggcaatgaacctcttctgcagagtgcaattctgcagagaaggaagcagctgtattcatcagctaatacccacagcagctgggggatggatctatctgccttgtaaagggggcctgaactggtcaccagctgtgtaaaacactatggtatagaaacactgtcatatatatgttaggaccccagaacagctctgaagaaacaaataactgaaacatactgaagaaagcactgcagaacctgaacacttaaattatgtacgtagagcattgcttctaaaaatatgctatgagtacgactaaggatgctaggaacacatctccctttctaacattgggtttacgaacatcctctcccctcaactacccagtttgcttagcagtagcagctggtggtgaattctgccattagggcaagatgcccagcaaggaaagaactgggttggttaggagaatttaaggcagatgaagtctctggaatggggatatggtgtgtagggtgaaaggagctaaaagggaaaggtttctttgtgtatgaaacccactcaccaatctccaccatttgtttatttctaccggccctagagacactcttgttggctcgtctttcctctgccaacacttttgctttgcatcaggatttttctctttcctcgcctctgaaactcgacttctcacagctctaccccttacactgacactttctaatagtttgacagctagaaataatggagaaaattaagtaaaaagtctttccgtgctacctctgttatttttgtttttaaatttggccaagcccagacatgtgtgctatcgttgggtgttgggggaaaaaataaaagacaagatgatttgtctgcaattcaaacccaagagggtttcctaggtgtggagtgatgggttctgaaatgccaaatgagaaagaaggtcagggagctacaaaagaggtacagaggtagggacaaggcagtgcttcatttaccttcagcaaacctggtgatttaccttctccttcagtcccttcaccatcaccaatccttcccctgaaaaaaccattgtggactgcctgatgataagttgggaagtgagagtgggtaggtgtggagcaagaataacaacatcctgggtaccgtacattctgaaggaacagagggaattcctgttttgttttaacctgggacagaggggattggtttgttctctccaggctgaggcagtaattcctgactctagggactgctgatatggaaattactactaccactctgggtggagtcagatgagtatattaaagagtctcattgtactgtcctaaaataagcaagatctttgctaatatccaagctttacagaacggtgggatgaggtgaaggccctgtacctttatccccagtggtcttcagtactataggaagtaatggggcctgtgtggcacagtggagggcaatgagtgagctggttatgccaattcctactatagtcacctccttggctgccagccttcaagggagagatctttgccttagtgggttctgcccttctgcttctgaagagaacctagtctttctgtatgggcattcaggcaattcttggggtggggagttgggggagagagagcacttgaaaagaatttatggtggcctttttctcagtgatatttgagaaataccaagacacatctgaatgtatctgagtttaagtcttggctctatttgttattagctctgtgaccgtgggcaagttattgatttatatgcaatctgactaatctgagttttcttagctgctttaagcagacaaagaggacaggaaagggtaatacacttaagaaccagcaaagggctattgtgaggatgaagcaataacaacaaaatgggtttaaagcacttatcatagtgcgtggtccatagaactgcaaacgttggattttgcttattttaggacagtacaaagagactctttaatatactcttctgactccagccagagtggtagtaatttccatatcagcagtccctagaatcaggtattacagcctcagcctggagagaacagggcaatcccctctatcccaggtgaaatgattattatcatttattatttattagccagaggtcttaggtgagatcaaattcaatcattataatttatatttcaatatactgcttaacttcatgataggcaatgttctaggtgctcctcacatgtgaaattttaatatttttactgcaactctggaggtaagtactattattataccaattctacagatgaaaaagccaaggaatagcatgcttgaatcacttgcccaagatgccatgtttagatagtggtacagtggggattcgaacgcgggagctcaggtttcaaagtctgtgctctttacatatgcagctaaagagtcagacaagaaccaaaaggagatggagaatagagggtagaaagggcacaggttcaaggtgaaaggtcagaaactgcaaattcggagtttgggttggtctagcagcttaaaggcgtcatcatgaactgttcacctaagtaagttaagctcctgtttgagaatgactgataagcttgcaagccaacttacaaacaaactggggaaatgttccaatagatgactaagtcttttaggtctttttacctgtgtttttcggtctctataccagattagtcgcctggctctcccaaacagaccggccaactgacgtagtcgcgaaacggttaatgtcgaggcgggggcgggggaggcggaaataaagagagcggaagcaaagaggattgtgggagctccgttgtgcgtcgcttaagtgagggcggcggatgggcgaaggtccggtgactgcgactgtcgctgctttctgaggccacaggaaaggggccgtcggtcgccgccatgacagcgagcgaggcggaggtttgtagcacttcttatgggctgagggcgtagacacatcctgcttccagcctagcaggcaaacgggaacggaagtgataggggatcagaagttgcgaggggatgaggagtaggggaaactgacaagcggacggacccggcggcgagaattgatggcgtagctgtaggattaaggggcgtgtcaactgtgttgtgtgtgttgacactgagatgtgtgaatcccctcattatttttagctggggacaggcggggtctatgggggagggggcggacggatgaatggaggataaaatcagggcgaaaacgtgttgtctgctgggcaccagtacatctgagtcacatctcagcaggatgattttattggaaagatctaggtccctggtttcagattctgctattgatgcgttgattgatttcccttaccaaaataccaagtacctgctctgtgctgggtactgcactagaggctccggatgaggaaaggaattaggctttttcctcgacatttacagcctgccggttgctatctgcatttggagacaggctattacaatacaaggagacagagatagatcctgtgttatgaaaatctattgggtgccaccgaactcatctgggagttgagatctgggacggctctttgatgcggtgatttaacatatattttgaagacaaaataagcagggcaaaaacgaagtgcaattttcctccaagcaccttccctccctgttgaggtgaactggagaactgagtagcatttaaggcccaaaattagtgtatttctttttttttttctttctttctttcttttttttttttttgataaggagtctctctacttctgtcgcccaggctggaatgcagtggcgtgatctccgctcactgcaacctccgtctgccgggttcaagtgattctcctgcctca

SEQ ID NO: 12465 - DNA, 6000 bp, Homo sapiens
ttatatttaatgatatgcattgtagcatcatttataatagggaaaatttggaaacaacctaagtactagaggaatgattgagtacattttggaacatatacaaaattaaatattctgtagccataaaataatgcataagtgaagtggtaataatgtttaccagattcttttattttaatccattgagcactacaaggaaaatgcctaagacctatgaacttcccaaggatctgccaaaggggtttgaagcctgacaaaagttattggcttcaaaatatgaagataactgcaaaattaaagtctataaatgtctaagtaaatgtcaaaaaatgtaactcatcatttttatagattatttcattttgtgttcagaacaattttgacacattggaaaaatggttggttagattgtatcagttggtaagaattctttagtatatataatctctgctaagaagcataactgataataaatttcaaaggcaaaattttaaaatcgtctcaaatttttagcaaaatatatacttatttgacatgggatatggggtgtgtacatgtcaaagtatatgtgataaaatgtagagtggagcttctaaaaacaagagtgccatgggattagcatggtctaaagaaatgccatgttttgagcacccaccgtgtgcgacacttaatgtacatcattctttttaatccccacaacagtgctgggaaatagttctgtttatcataatttctttcatttgaggaaacctagggctttagggaaattaagtaattaacctcaggtcacacagctagggaatatggtgatggggtttgaaggcaggtcagcttgactccaaatcctgtgcccttagtgagaacataggtatgtttccatgtcaaattaaaaaaataagtttacaaaattgtatacctggtttgagtataactttggaaaaatacaggattcaataaaagcaaaaatttttttctgttttttactgttctgaattttctaacatagttttacaacaatcaggcaacccgtattaatttctaaaaaaaattgatcttagaggagtttgataataatgttaaaatattgacatcttgcggccgcgtggtgtcattacaaccttggctttactttcagtgtgggagctgactactagagggcagcactgaggtttattcgggtcacgttttctgggctgaatgtggcagaaagctgggtcacttctccactcaaaactgaagaaaagcaaactcatttataatgccataaatacacacacatatatgtcaacaaaataacgtatactgtaaatatacagcgtaatacacttcaataacttctttgcatcctgaagcagtatagcaaagttattcagcgtcaggcccaggaactatgctacctgaatttgcatcatggctccaccatgtatcagctgtgtgactttggccagagcacataaacttcctgtactttattttttttttctgtatctctaaagtgagaataagaattttccctacctcttagggatgctgtgagaaataaatgaagtaaggctaacagtgccagttgaaaggagatgctcaaaaattggaaattatcattttgcctgttgcccaaagctattctacttttatgaaacaatatatgccttgttgagtactataagtatttgtttagtactataagcagacggagaattttgttattactactgaatcagaaaaataactttctgtcaggtagggttaggtgaaaaatctaaaggaaggtcgagaatcacagttcagagccctcactggaatgaagcaaaatgtgtaagtttgcctaacatcctttcttgtagttttcctctctcattctaatttatctttgtccatcacctcccttgttccccaggttctcacttcccccaggacaaggagctacttgtccaagccttattctggatgattaactagaagcacaccattctgaatcatttttatacctcatgccccagccctgcatcttagtctccaaaggaatgcaaggatcctaggctaatattatgtaaggccatttcccatgatgtatgtaattaggagttccctgtagtgtttagtagtaatatatgtatatataaaatgtaaaagcgctactttttttctttgcaactaatgttaagaggaaagctcaatcgatgtgactggcttcacagttttgtggagggagagggtgctattttggattctttcattccatggcaccttagggagtaaagatcatacagagaagatgaaattttgtaaattgttaggctttgatattggaaacatagacaggaactgatacgagttccaacaacatgtagtagaatccgtgaacattctggtgttgtaagtccatgagaacactaaggtcaatacttaatcatacagtgtgctgatgtttctgacatagcagttctaaaaggtgtataggaataattcttaagtttgtactcgtgaatggatttgaagtatctgtataattttagattcatgaggaccccaaatggttttagatttctgttctaaaatcatctttaattatactataactaaaacttagagatctaatgggaattcttgagtgtatggataaatccaatgacccccatactgtgattaagaggcagtggttaagagtcctgactctaaagctagagtacttattttcacagatggctccaccagaaactagctgtatgcgcttgggcaaattacttaatctctttgtgcctcagtttttcatctataaaatgtggatgataataatacctaccccataggacagttgtgatgatccattgagctagtatatgtaaagtccgtagagcaacaagtgtttgtggaactcttaatcaaaagaagcaaattcactttagaaattttatttatgtgctaattcccagctacttctacctataaatttagaatcttatgtctattcaggattttggaacattccttgaatgatggtcccttgaacatcctagtcctcatcagaaccttctcataaaatccatactggggttgctcatggcaccatgcagcactacatagagaatgctaactggggccctcacttgcaccagtatttccatcaggtcacctgaaattctacaattagggattgtttcctttgggtagtcacggtgtgtttctggagactctattagagtgcaagcagtctttggagggatagcacaagggtgcattagtggaatatatcaaggataaacgtgagctttcttggagccaaatagtcttgcgtttaaattttctggctctattacttactagaattagagtgtctgagttcaaattctgtctctactgaccagtggctgtgtgatttttggtaagttactgtaacctctctggatgtctgggaattcaaatagtatctatctcgtggggtcactgtgaagatctaaggagacagggcttccaaaaatgcctgtcacatcattggcactcagtaagtatgattattgcctaatttatctcagtcttggcatcctcatttacaaaatggaaagaatgggtaatatccaccttcatggttgttgtgaacataaagatgtacatataagtataatgtacatataaaatgcctgtcatacttaaataaaaaactgatagatagtaacaagtgttggtaagaatgtaggcaaaaaagaaccctcatatgttgctggtgggaatgccaaatggtgcatatactttggaaaacagtttgccaattcaaaaaatgttaaacatagagttattatatgacccagcaattccctgggtatatgccaaagagaaataaaaacaatatgtccatataaaaacttttacacaaaagtaataaaagcagtattcataatagcccaaggtggaaacaacctaaatttccatcaactgatcatgtggtatacccaaaaaagtggaatattatttggccacaaaagaaatgaagtactggtacaggctagaacgtgcatgaaccttgaaaacggtttgtttttcaaacaaagtgtgtttggttttttgttcttgcgatagtttactgagaatgatgatttccaatttcatccatgtccttctttcattcaaacaaagaagccactcgcaaaagatcacatgttgtatgattccatttatatgaaatgttcagaataggaaaatccatagagaaagtaaattagtggtggcctggggctaggaggaggagagaaatggggagtgacttttaaacaagaatggaatttctttgtgggaataatgaaaatgttgcacaagcttgtgaatatactttaaaaaaaccctaaattatatacttttgtggtagataaattatatctcaataaaactattattaaaaaacatttctcatttaatataagtcatttttagcccttaacacctcagttctcacgttgggaatccagaacagggccctgagtgaatgatgcccaggacagagagggacttcttaaggaaaaggaatacatctaaagtatggggaaacaatgtctctgtacaaaggtgtagagggaagtagggagtctctcttgggaggaaaggcagtgaaggcacttaaggggaataggagaaggagacaaaattcacctgctttgaattttgcagggagccagcctggatcaccttttatattctgggctggaatcacagctgatgaatgttttggcatttagaactgtcctggagaaagggcgattggtggttattagacagaatggaacaaggaagaacacagaggcaaaatctgagagtttgtgtctgactttgaaaggtaaaagaaggcagtagtctgtggaggacgtatttatccagaggactctatttgtttgttaatctctgggtcattgcatttaggtcagcactaactctgctacaggtgggatcaatttaaaggattagaagtgtcactctaaatcctaatccaagtcttggtctgcggatgctgaagagtgattttcaaaacatttactaacgctttcaattatttaccccattaatggaatttgtcaacagactggagtccttgacaggattgtgaatgcatagaggatgcaaagaaatggacacactgaggtagctatgccagtggtctgcatgcgcaggcagtaaactgaagacatttgagcggtgaattacttggtgagtagttgacagctcttgtttataagaaagattgtaatggggggaaaaaagacacagcccacctgggagctgagacgctgattgagatacattagttttactgcaatatgtagtaaaaaaaaaaatttaaagaatgaaggaaagaaggaaagaagggttaaagagagccttcgagatactttaagtcaagatttgagctcaaaggctctcatccaagctttcgtttagtttctctcatgattctttttttattgcttcctgatgttgtcttatacaagctgttaacttgattcaggctgtaattagaaagacaaatcaatctttcatagaagtcctcggcttgacaagctggtatgaggagccatttccctcagagctatttgtcatagtctttctttgtacatgtttaacgaacggtggttttctgtgtgaagccaggcttcccatcagattgtaaaaactacctgaaatgaaattatgcatccctatgctctagccgctttccatggaagtctgatcccatgcaggtgttcacacctgagtaacctaggcaatggccccagaacaactgtgggccagtagtattctatttccaaaatttcataccttcaaactttgttttagttatatccacatttcccattaaccccaggaaagactttagtgagctaatttttttccttaaaccaaaatcagcaggtggaggtttagggcatcctccccctatcttgcccctttctttccctccctccctcccttccttccttccttccttccttccttccttccttccttccttccttc

SEQ ID NO: 12466 - DNA, 6000 bp, Homo sapiens
tctgaaatgctgtgtatattcccatggaaaaactgagaagccccagttggattaaggaaccgtctaatttattctcatcagtcttttgagaacagacctactgtggtggcttatggcaaaccataccctcaagattgtgctgctaggaggaggtagagaagcttgcagcatagcctgggacagtgagctcagaccacctggagtcttcctttttccaaacaaggctttggactctagtgcttagagattgggcccagagtctcagttctctccaaattctggctggtcgtcctgcccactacttacccagctccacatcctggcactccctatttgtccccagttcacaaagaagttgtctgtgagagttataaaggcacagactgttcaccgatgtgacttgctcaccgatgtgtctctaggacccagcacagtgcttcacacaaagtaacatgtaataaatatttgttgaatgaatgaatgaatgaatgaatgattccttctcagtctttagttggtgcctcatgaagccttctttctttctctcctttagagcccactgtggctttgccagccttctggactccgacagtgcttaccatctgtgtctgtcctttggcaactagccaaactcaactcagttcaattcaaccaacttccatagagctgcactgttggcaggaagcactcacagtctcaaggaatggggaaagcatttcctatccatggcgcctcaattgtacttttaaaacaaacttggcatggaagagaacctttcccgagactctttgaaagtctaaatacatgattgtaaattacttccctttgtcaacacccttgattaccattttggaaatgagttccaggtgatggataaacagatgattatttgacaggtatggggctcgtggaaaatgggggtggaggggtggtgaggaatgagaaccagtgcccatctggtggatttgcagtttcattaagtgtggtagggaaaggggttagcatctcagccattccaggctggcctggaactgagatttaaaggatgcccatcagcccctagtgtgaaaagaaagccaggatcccctccaccccacacctgttgttttttttggagtgctgggcctttttaaattttatgactattctccgtttctatttccacccgcttttacacatctatccctccccatgccattcttctataaattagtaggttgacttctctctggtagtgatttctttcaataaaactagaagtagcgttgtgtttattaaaacattattttaatagcaaaacatgaaaataacagaaatattacaataaatggcaaagttaaataagttatggtagatccatagtctggagtactgtgtagacaataaaataacactaaggagtcagtatttagaaagggagacttccatgaaattgctatcatattccattttaatccactcttttgatcaatattgcaggatctggatgcattcattgtgcaatattggaaattattcttagcttataactatactgtggctggggaaaagatgttctttaaaaaataaaatttgtaagtgatctactctaaaaaaaacaaaaacaacaacaaaaaataacgctatggagaaatagtaaatgacatggaaaaatttacagtatgtttttaagggaaaaaggccatgaaacatgagagagagagagagagagagatttgagagagagagtcatgagtatgcaccattgataatttttcgttcttttctcttgtcgcttttttgtgttttccaagatttccaaaattttccttgttgcttttttgtgttttccaagatttctgcattgaatgctgcaaagtaaagctcagaagggtgcattgtgaagaatctgaaagcacaaacaggggcatagagcaaggcttctttcagtcaacgaattttgaggaaggcaaaatgcacagagtattgcagaggaactccaggaagatgctgtttttcaaattcaaaggggagaagatggtgtctattggtggtgagaacttaagttccaccacagaagactaaactctgttaaagaatcaatgagtaacaactcctgggtttctgaacatagggctgaattgatagaagtggtgttggagaattattctaaccataacatgatagattcagctgtaagccaggagattctctgtttgcatatttgacctgaggtaatgagaacatggattaagcttgtggcaataaaaccagaaaggaaggagcagagggatctgagacatgctaccaagaatcagagctagagattcaaatttggctaaatatatgccaagtggtaggtgaaaccatgtaagagacactcttcaaggaaatgggtgttgagagagaatagctgaggactgagtctttggggattccaacagttaatgggaggaggaaagaaggggagccagcaaaggaggcagagaatggtgggtcagagagataagaagagaaatttgagaatgcaatgccacaagagccaagggtaggacagttacaggaaggagtgggtggttgatggtttcaaattcatcctcgaggtcaaagatgcaaagggagcagagacccctgaatttgacccggaggtcactggtgaactgacttatagaaagtagttttggcagaaagcactggactctagaaggttcaagaggagggagaggtgggaaaatggaggtagctcatgaataccacccatttgacacaagtaatgtgtgaggactgagaagaagaaggtcaaactttataattccagtcctgctacttaaccagtctgaacctcagtttcctctttggaaaatgagaatcctattagctcataaggctgttgaaattagaaaacaagtttaaatgattatttgtatgttacagtaaaggggtttcttcctcctttcctctcaaaaaaaaaaaaaaaaaccctagctatttctaggtatatgttaacacagcagtcctcaacctttttggcaccagagactggttttgtggaagacaatttttttcatggacactggggaggggtggatagtttcaggatgaaactgtttcacttcagatcatcaggcattagattctcataaagagcatgcaattgtagatccatggcatgcgcagttcacaatacggtttgagctcttctgagactctaatgccactgctgatctgacaggaggtgtagctcaggcgataatgctcacttgccctctgctcacctctttctgtgcggctggttcctaacaggccaaggtccagcagcctgggaggttggggactcctgttttaacagataagagaagtctttttagctcaacagtcatatcactaggttagcagtgctttgaaaattctctggctgtgtcctctggcattcatcctgccaagttgctttaacaattctttcctgaggccctctgaggtgagaatattgaggcaaggtgattagaagggagccagtgtcagggtcatgtggaatgtctctgaggcctgtttagaggctgtgaagcaaggctctgtttgagaccctggatacagtttggtgccaacctcacctgaacacacagaaggctacagcccctgggtggatggtgggctgaagaacggttggggaagaggcatcggaaaaccttccttttttaacccatggcacctatagattgaatggtccctggactgaacggtcttgaacaggcagcattattttcaaggtgtgcctaaggtcatacacttttcttgctttctgctctcatttggcaactatggacaaccagacctagccagcactacctcattttttctaccccaccatctacaaaccaacccttttcctttgtgaagctcagtctgtttccaatttaacatatctggcctgatctttgtcttggtgccttgttttcccctaaaaaaagacagcctttgagaaaaaaatggctgccctaaaagccattagggcctagacctgttaccaagtctagagaggcacacagctgtttgctggcctaactgggagtagggtgagcatattctctagaactggcacttttcagatcccgagatatccacagagtgtagtcaaagggccttttaaaatgtgcatgctactcttattggaagaacttggtttcacttctgggaagatggcttacttacccatgggaaacaggctcccattatgaatagtacattcatgtgctaagatgtgttgacttttcaaaaagtgtcataggacatcagagcaggggtgcttccaagaaggtgtaatatcacttatatcaccagaaaccattttggataaccagggagttctactctgccttggccttctagcaggtgcctgagcactcagtcaccaaattcagcctgagcatcttctgaataagatgctctcctccgacaaggtgggaggggggtgaaaaggggggcggggggaaaaggaaaggaatgaggactagaaagataggcctgggtccctgtatatgggagtaacttccataaaatgtggacaaggggtctctgctgcggaaaggcgtctgccctctcccttgagcgccccaaggcagagctgccttagggggccaaatgctgtatctgggccaaagcctggcctgcagggcaggtggccagaacttggaaggaattctcttccgcagcccagggtccaggcttggccccagcaagctgccctgccagcgtctgctgcctggggcctcgcgcattccgagcccccgccccctccgcccgtctcccagcctcgcccccactcttgtccccttctcctccccccaccagctgtcccctttccctggagcagcgagacagccagagcctgggaagaggcggccgcgggccggagggggcgtggtggggaaggggaggaggggcgggagtgagggaataaggaggccccgccgtcggcgcccccagccactgcgcgctcgccggagagctgggtgctaccgctgtttccgctgctgagccctgcccgccggccggcccgctcgctagctcgcttcccctcgcccagggggaaaggtcagcagcgtcctggagccgccgtgtcactccccgaaagccatgaactgcagcgagagccagcggctgcgaacccttctgagccgcctgttgctcgagctgcaccaccggggtaatgccagcggcttgggcgctggccctcgtcccagcatgggcatgggggtcgtgcctgaccctttcgtgggccgcgaggtgaccagcgccaagggcgacgacgcctatctctacatcctgctcatcatgatcttctacgcctgcttggccggaggcctcatcctggcctacacccgctcccgtaagctcgtcgaggccaaggacgagccgtcccaggcttgcgccgagcacgaatgggccccgggaggcgccctgaccgccgacgccgaggctgccgcgggctcccaggccgagggccgccgccagcttgcctccgaggggctgcctgccctcgcccagggcgctgagcgggtctaaaaccacagccccagattgctggttcgcgccctcctcatctcgctcatccctgggcgcgcctcccaccttccacccccaactcccttccagggttcgcctcatctgaggcccagataatggtgagaggccaggagaccttgtctggaaggccctggaaggagaagcaccaccttacccattcgggccagtttctccctcttcacccctgcgcctccacccctaccccgcacatccaactgcactaaactgcctctgctctcttgtcttcagacagccctgacagcacgctccagccctctgggaactgaatccaacacgtccaacacttggcactgaactgaagcaatgcattctatcagaactctgggccgtctaactggcagctgctccaggggctgccagggactgctcactctgcagagccaacgggcttgccaggccgactgcagcagctccagc

SEQ ID NO: 12467 - DNA, 6000 bp, Homo sapiens
tttgtgtatttgttcaagtttctctgtatagtagagccctgtacatgaaaatgtcaaagagtatatgcattttaaaatttaaaagatactgccaaattgtcttttaaaaaggccagactgggtgcagtggttcacgcctgtaatctcagcactttgggaggccgaggcaggtggatcacctgagttctgagttcaagaccagcctgcccaacgtggtgaaaccccatctctactaaaaatacaaaagttagctgggcatgggggcgggcacctgtaatcccagctactcaggaggctgaggcatgagaatctcttgaacccgggaggcagaggttgcagtgagctgaggtcgtgccactgcactccagcctgggcaacagtgcaagactctgtctcaaaaataaacaaataaaataaaataaaggggccaaaccaatttacgctcctacttagaatatatgagtgcaagtttcttcatattcttgccaaaattgaatattatcaatctaaagatcttaccaacttgaaaagaaaaattaaaaatatttaataatcttttatatctatttctaaaagtaataattattcattcaaacatattgttaaaaatgttttatttgaataacagtaatttggcttgtatcaggtgccatgtagggtccaagtgaagcagacagttttattacagaattttggtttgaagagggatgctttgaataaatatccaaaggtttaatcagtccaatagtcccagtggggactattcactcagtttcagagtgaaatagtcccataattatttaagcataattatggggtttgtctatttcatagacggcattagcaacaggaatatttgtaggattgatgggaatggagattaacttggaggtcagatagtgacttagtgaatgaagtggctgtagaccacttctcaaggaatttgtccttagttgtaaagaaagttactgaataggagaatctggagaaagattgttctggttctagcttcctttttctcatctgtgaaatgaagaggttgaacttggtgattaatagccatcattttatacacacttgccataaatcaggaattttataggcatgatttcatttaatcctccctcagaagagtcttatgaatgaggtaccattattatccccaatttacagaagaggctgaggctcaggaaaatgttatataacttggtctagggtggttggcttaagtccaaacccatatggtttccatcgtgctactctgcatctaagtggcttcccagcactaatagtcgaagattttgagtaagggacattttaaaattttgttattttactggtcttttaagaataggacatattggaagctttttgtatgttaaagggaaagcataataaaaagagatttaaggcaagttatgaaattgatgacctatctttttttgtaatattactaggctagaatcactacagagagtgggcaaaaatataccaaaggcaactttcttacagattcaatgacaaccacaatagatttttcacatactcatggccttatggataataaaaatattttgttatttttgattctttatgggaaggtcacacaaacaatttcaaggataactgtggaggattttatttagagggtgttgtagttatctttaaaaaggacaaatgagtttcatgagagaaaccgaaattaagttccattaaaatcctgctgtgattttgatgtggaccacactgtcttgacggattaatttggaaaaacttgactccatgcaatactgtgtcttcctatctgggtgcactagatgtctatttgttttggtgtttccattaatttaaaaacctgaaaaatgtgccagaatgaaaagaaatagttattttgaaaaaacaaatcatttctcaaaaataacatttagatgtagctactatgcctttgatcatttttgaaaggagtggcttaggttattatttatgttcacagtgagatgatcatctacgtaggtttctgatttcaccggttgtttaacacaagccactaaagacaatatttggcctggttgttgggtctgcaaaaaataaggtttgttaatgacaaaatctaacacaacttgtcaatgcaaatattattatgaagccctgctgcttgtatttagaccacaggagaaaattattattattctacaaacccgtgaagtttaacacgcaaaggcttgttacacagtcaatgaagaacagttgttttctgcccttccataaataactaatgccaagagcagcctggctatctgtttcagcttcttgttacagaataataaaataggcaaggcctaaatatcagtgcctgttaacagagctgtcctttaaattctgtttagcttctaacagactaattctcatgcttttagtacttattacattgcattttgaatctgtcaattgcattgtacattttcctaactcttccatttccatacgtttatctactccatttctaattgggttggtagttctgggtaggactcattacagaggcagcttaatgtagcggcaagcaccctggtctaggagtcataagcagtgtagtaggaaattcaggctctgttactacttagttgtgtgactggacaagacacttaacctgcatctatttcttcatctgtgaaatagggataataataccctatcttcctaactaataaacaacgttgcaaatgttctctttaaaatgtcagacagctgcttgggaaatattttgctcctgggcagtaatttctggaaggtttctgatgacaagaaattaagcaaggtttgttttgactccgaaaaaggaaagctggaaatagcgtggttatacttggtttcctttttggaggtatagttcttctttcctcttcaacttgggtgcagttaaatgtggaagaaggtgagatgtggtaggtgatgaagacagccagaactgtacacactaatgaatagcttaagtaataagagatcttgaaaatccaagtagtttcttggtctgataaacatatctatatgtatatcatacacacatttgtataccaaaaaacggatagtttcaggctatagtgatttctttcctttatatcttgtagagctggaggaacttcagtaagctgaagactctgttcagaggaaattacctaattgaaaatgtctgggctaagagaccgacaataaaggaaactggcaaaagtactctttaattacaagttctttttcatcttcatccagcacactgatttatgtgctacactgggtttgtattatatctatattttaattccacaactagacactaactttattgagaacagcgatattcatttcttcaatttcatttgtgttaacccaactgtaggtgatagtgctctgtacatcatagttacccagtgaattacgtacctgacatatgattgcttatttctggtattaaaacaagatttcataaaataaacatgacaattaaactcgttgtttgaagtactgaactttgtaggtcaatcttgaaaaaggaagctacatgactgtcttagcaatatttataggtatattatatgtaagtgggtgggtttcttggaaattgaattggtaatatggctttagagtagtaacacaaaaactatagctctgtgctctcagctaaccacttttagtgtcacctgggctgcttattaaaaattcaaatttcttatccctacccagatcagaatcaaaatacctgggggttgtagctccaggtacctacatttcaacaagcaccccagataattgtgatgcacactgaagaactactctagcttgtaatctcaggtggtaaggcattttatatatacatatatatatacacacacacaagcacaaatggtaattctatgggaaaatggaaatcagcaagtgaagtgaaatgtcaattaccatcaggaacaggaagctagttcaccattacgcatcagggaactggaagaattcttgagatttatttttttgggtgatatattcttggcagtttatcaggcctcatttgcaattatggtctgtcccttttgaagccctcagatagttcgctggcattttaattttaatagcaatttcttgcatctgttggaacagcattcgtatgaccggcttataagcaatgatcagggctagtaagatgtcacaaagctgcggtgacttttccttatcagttgggggtttttttgccatgataccatcgtggaaatgaaagacaacgtgaaaatcctgcgtccttgtgatatttcatcagtgggagtgagcggggatcttaacgcagtaagaggcaagataaacggatgagaggcattagttcaggcttacaggagcaagatgcttttagtcaaagtgttcaagatagctctcttaaagaggagcagtgaaacccaaaaatgagtgtcttttgagggcagctggaagatgacccgaggggaacttttatcctggggtggagtcctgcgaagcaagccgcaggtgagggcgtgggccaattctgcgcctcactgctgttaggcgcaaggacatcccgaaacacactcaacgacaccagcagcgagactgacagaagcggatcgccagcgggagcaacaacttgaggcgagccgttagccgcctcgccttcctcgcagcgcccctcccgcgccccgggaagcccgttcggctccgccttttcgactgacgtcccgggcgagcgggggcgggcgcgtgggtgggccgagccgtctgcagccagcgattcggctggctctgccacaccaccgcgcgcccccgctccgcccgcccctccgggcgcgtcttttccgggctcgcgctgagtcccgcctccgccggctgtccgggtgcgcgcgcgccgctgcggctttttctctggcctccgccgcgcgctcctcctcgtcccagcgctagcgggcacgcggttcctttttgcgagctttccgagtgccaggcgccggccggctgcgaagacgcggtgggccgcccctccggtgagtatccctggatggggaggttgcggccccggcacccctgccctgtcggtaccagggccccatttccagagggggactggcgtacctcacctgagccgggaggaggttgggtgggcattccagctcctggagtcggctcgcttttttccttgagccagggctatctatccgctcgcctccgctggggccgggaagattcccgaggtcactgtatctgctcctgtgatggactctggggtcctcggaaccccagcctgcctcttcctgccgctcaccgcatcccgagggccagaagtcatcttcctgatcggggtactaggctttgccacggccctttccggaggagaccatgaagtgcttgctagacctccaaacgacctttagggtgcccctaaacctcaactccattttgtcccctcccagtcgctctgtaactgagggctagggagcctctctagccctagaggcatccgccctctcgaatttgagggatgccgtcgcttccgatatcttccttgcttccgatatcttcctagcttccgtaggcttaggtttgttagaaaacagctggatcctggcgaagcgtgctttccttccttcccccacccccgttctttctgtctacatccctgccttcagtgggtgctatatatttagtatgagctttattcacttcctcttcctctcgtttgagtgcctgaaagaactgtggctgatgtctatagacatagaaaaatctaggagaatatgattcattgtctaaccccatcaaggggttacatattttaaataagacgtcatttctcctcttcactccagcatctcctccttcaaaggcatttttcaccctcttgaaattaatacgctctattcgctcttttcacctaaaaaaaggtcaatcgtcgctctgagaaacaacagtgagatgcaaaataagggtaaaatggcattgaaatgaatc

SEQ ID NO: 12468 - DNA, 6000 bp, Homo sapiens
tggctgaagagttggcagccccttgagcccactgtgacctcgctgtggggttgagcgatgaccatactgtcatccagacagtagatattaaaggtattatccagaaaaaagggacatgccagaaggagaaaggaaaaagagggagggtaggagaaactaaaaaaaggatgagtagggaaaggaaaaatggggcagataaaaagataatgcaaatttaaaaagtaaagatttttggtggcaaatagatgacaccaatacctcaggggcactcatttatttatttttattatttattattattattttttgagacagggtcccactttgtcaccgaggctggagggcagtggcgcgatcttggctcactgcaaacttcgcctccctggttcaagcaatttttgaacctcagcctcccgagtagctgggtttaaaggcatgtgccaccacacccagctaatttttgtactttttgctagagatggggtttcgccatgttggccaggctggtcttgaactcctgatctcaagtgatccatccctcttggcctcccaaagtgctgggattacaggcatgagccaccgtgcccagcccatttatttaataactatttattattcttccattctaaacttctgcacctttaagttcatttcctctgctcatccccacatttcattgtctatcatttaccaaatctgatagggtcatcatttcttacaccattcagtatgttgacatgtagggaaatgtttgccaatgatttcctgctctttggccaaaaagtcatgcactctcaaaggtgctgaaaagagtcttaatctacctatgatggtaggggacagtgtggggggactgctgaggagtttgtgcactggggtggtatgaggtatattcaggagcgcacataaaagcaccctagatacagcggtaccaacaatcaagtcaacctttgtgaagcttagatcggaggggatctcacagatttcctcaaacactaaccccagtctcacgtatacatctgcatctaccaccgaaagccaaggaaaagctccttcaatctggggcagggtaatgggagactgtataagaaaagggatctttctcacagtgttttttggagaaaacattaaacatttctgagtatggaagctcagtgcaaacaaagacttgagaatttttagcctatttatgctgacaaaatacccagcatgtatctacaactttcaaaacattgttgtgtctcacgacgatgcctgtcccagtcaaggagccagcatttgtatttgcctgaggaaaaggttgtgatgggggtgagggtggatttcgcttgtaaggctgctcatatttcactgtgtttatttttttaatttgatgacaccttcaagagataaagggcgacaatttattacaccagatatttgacaaattgggacagtattttattttattttaattgttagagacagggtctcactcatttgcataggctggagtgcagtggcgccatcaaagagcactgcagcctcaacctcctgggctcaagcgaccctcccatctcagcctccctggtatctgggactacaggtgtgcaccaccatggctggctatccttatatataaatatatacatatattttcagagacagggtcttgctctgtcacccaggctggagtgcagtggtgcaaacatggctcactgcagcctccacctcctggacttgaacaatcctcttgcctcagcccccaagtagctgggactacaggtgcacgccaccacccccagctaatttttaattttttgtagagatggggtttcaccatgttggtcagactggtctcaaactcctgagctcaggcaatctgcctgctttggcttcccaaagtgttgggattacaggtttgagccactgcacctggccaattttaaataaatgagcatttactcacatagaatccttgaattataaacctgatgccaacttagagatcatctgaggcccaccaatattgttttggggagttttgagaaaaacaccatgcccaggcctgacttcagataaactgaatcagaatctcaagggatgggaccaaggggaattttccacttttaaagctccacaagtgattccaacatgcagccaggatcaagaaacagctctagtctcattatttcattttaccaataaagatatagaagttcaaacagatgaagtgacctgcctaagatcacactgccagtaagtggtgtctcacaaccaactcctctgactgctaacccaatgttctttccactatgttctttttttgtttcttcttatagaaagagcttagggttttactgaacattaaagttatgcgatttacaattgaaagagaagagctagagtccaggaagtattggtggggcatcttcagagggctcaactcagttgtgggttctctgaagactactatgcccaggacatagctcctgccaagtctcattgatggcagtcaaaagacattttgctaaaggcaatgactaacactgtatgcagtgttcattagtcttgtgttgggtcacttgttcacaaattagtttcacctatggtagtaaacattcattgacaaatgttctcactttcaggaattaattacattaaagcaaacaatagtggggcagatcggtgcttcttaatatttgaattagggtaggggttagggcaaggagtcacaggtcccattggagaactagtgaaaactacaaacttccccacaaaaatacacatacataaatgttgcatgtaatttctgaggattcaccgacacctctcccatcctgtctaaactcatacataaactccagattaaaatctcctggactagatgattttgaagctctctttcagtgtttttctcaaagtgtggtccatggaccacagaatcagaatcacttggggtgtttgttaaagaagtgattaataagactgccacagacctactgtttcagaatctctggggaatgaggtacaggaatctgtatgttaaaaaaaaaaaacccaaaaccagatggttcttttggaaactaacacttgagaatcagtgctttattccaactcaagatttttaaatgctttcatctgttgaatattttaggttttgtctgttcatctatcaagtatagcaaacagtatgcttagtatgaactcattacagaatatttgtgtgtatgtacataggaaaaatatctggaagtatagatgtgggtgtgtgtatatatgtgtgtaaatatatataataatgttaatagtaggaatacagatgatctctatttttccgctttatccttctgttttatttctctcatttttttcttcctgtgtttaaaaaagatgcttcttgtttctgagctcaattcccccacctgagaacagggtgctgtaactaggtgaatttcaagatcatgtcttgttccgatggtccgtgactccatactaccccctaggttccctcgtccatctcacagcatgaactgcataggtaacaacagtgtttggagaataagcatgtattatttttgtatgtattacgtttgagatgcctagcaaccgtttttgtgcccgcaaaatttttctcttctttgtcaaggagccaaaacggaaatagtctactatctacggccctcaaaagttcctcctctctccttagccttagaaaataccgtccgccataggcatgggcaaagacctcatggctaaaacaccaaaagcaatcgcaacaaaagtcaaaattgacaaatgggatctaattaaaagaacttctgcacagcaaaagaaattagcattagcgtgaacaggcaacctgcagaatgggagaaaatttttgcaatctacccatctgacaaaggtctaatatccagaatctacaaggaccttaaacaaatttacaagaaaaaaacaaccccatcaaaaagtgggcaaaggatatgaccagacacttctcaaaaaaagacatttatgcagcaacaaacatgaaaaaaagctcattatcactgatcattagagaaaggcaaatcaaaaccacaatgagataccatctcacgccagtcagaatggtgattattaaaaaatcaggaaacaatagatgctggcgaggctgaggaaaaataggaatgcttttacactgttggtgggagtgtaaattagttcaactattgtggcagacagtgtggcgattcctcaaaaatctagaaccagaaataccatttgacgcatgcacacgtatgtttattgcagcactatttacaatagcaaagacttggaaccaacccaaatgcccatcaatgatagactagataaagaaaacgtggcacatatatgccatggaatactatgcagccataaaaaaatgagatcatgtcctttgcagggacatggatgaagctggaagccatcatccttagcaaactaacacaggaacagaaaacaaaacactgcatgttctcactcataagtgggagttgaacaatgagaacacatggacacagggaggggaacaacacacacgggggcctgtcaaggggtgggggccaaggggagggagagcattaggagaaatacctaatgcatgtggggcttaaaacctagatgacgggttgataggtgcagtaaaccaccatggcacatgtatacctatgtaacaaagctgcacattctgcacatgtatcccagaacttaaagtaaaattaaaaaaaaaaaaaaaaaagaaagaaaaagaaaaagaaaatgccgtccgcgcatatctctcaggagcataggaagggctgtgaaccaaaaagccagggcgtggtcgccccgcccaccggccgctacatcaccacccctctcgccgctttcaagcgcggagattggctgtaagcaagaaagagccccgcccctagtcttatgactcgcactgaagcgccgattcctggcttttgcaaggctgtggtcggtggtcatcagtgctcttgacccaggtccagcgagccttttccctggtgttgcagctgttgttgtaccgccgccgtcgccgccgtcgccgcctgctctgcggggtcatggtgtgcttccgcctcttcccggttccgggctcagggctcgttctggtctgcctagtcctgggtgagttgtcgggccctcccgattagtctgtccgcctgggcccggggcaccagttcaaagctacaacctgaaagactggtccgagggggagggggttgagaggctcagcagctaacactgggcggcggcggttggcccggggaggcaagcggtgacctagagaaggcctgaccgacggatggcggggaagaagggcccaggagagtaagaaggggccggtaacggggggtggacgccgagggagtaggctgggaggagtgaagcgtggagagggtcagcgtggaaagagtaacttggggaaaacactgaggagtgagcgtaggagggtggtacatgcagattttgggcgccagagacaattaggagagtcttggtttgctgagatcagggaagagttttgaagatggtggaaaaactatggggtgagataggaaattaagagagaagaccatgcctgcctggagtagcttgggagaagtgtgtgggtgggggacagatgggacagataggacagtagagcctgaggggcaggggcagtgacagggttgggcattttgaaggttggaatttgagactgtgaagaaaggatgattcaagagattaggagtgatgctgggtttgagtttggtagtcatagttttaagggcgaaggaacctaaggtagctggggcaatttccaggaaagaaaacttggacccaacctctggagactaaggggttcagggggaactttgatggggagtgcacatctgacttggaggtattgaggatgtcgattttctcccagttttgctacttcctcccagccagacgctgacaaaaaaatccccagacgtttcagttaggagggcctcccag

SEQ ID NO: 12469 - DNA, 6000 bp, Homo sapiens
cttggaggctgggatcatgtcatatacttccttggtatttcccatattgcctagtacaggctgagcaaactatggctgttgcttaatacatacttcatgattgattgataaactggttctatttttgggctgcacagtgattgaggtgagctcttggaatgagagagctgggcagagtcagagactagggctgtgccgggtcagtatcagatgctgtcacttgcacatcaagtttagaccgtaatctgagaatctaaatgtataaagcacctactacaatccctggctcagaggaggtccccaataaatgatttctattgctgttatgattctcttttaatgagaggattgtcttagggctactgttgagggttcaagcataggacctaaagccatcccaggcagagtcagaaatccacagtccagagatgaagtcaaattgggaaccagtgggagcagccaggcatctgaggcagaaacagagacctgcgtttgggcagttcacttgcattgtgatgaacactttcctggccatcccaggctgttttttggggggctttctgcatgtttggctttcatgcaaaagtatcttttttgtttgtttttgagacggagtcttgctctgtcgcccaggctggagtgcagtggcgcaatctcagcccactgcaacctttgtctcccgggtggaagcgattgttgtgcctcagcctcccaagtagctgggattataggcacctgccaccaagcccagccaatttttgtgtttttattagagtcggggtttcgccgtgttggtcaggctggtcttgaactgctgacctcaggtgatccacccgcctcagccccccaaagttctgggattacaagcgtgagccaccgcgcctggccatgcgaggacatctttaaggtgctgcttagttcccaagagaagccaacaatctcagcacagggctgtgaacataggaggtgctcagtgaaagcaatcccatttaccttttgcctgttgaaacagataatgtggcaggaatgtcaatgatttacttgagaagaggaggctaaggatcagccattctactagaacaagattactatccaggctttccccagtcccaggtggggtagggggctgggaaacccagtcagataaggattcaattcagtgatgaatttagaggttatgaaaacgtggtggtacatggatgacaaggactctatacagtgaagaatgggtctcattttttctacctctctaccccagtcagcaggatggctaagggagggagatgggagggggcagtaatggagatgtcattataacatacagcattgactgtgtctctcttccatgccagacagttagcacacaattccctttataactccatgatataggtattagctttattttacagatgaagaaatagtctcagaaaggataaattacttgccacaggttatacaagctattacgtagcagagccaggatttgaaccgaggcctgtctggccataaggcttatgtgctttctgagctacctaccatcctggatcttctatgtcagtgatagcagcccaggcctcagagaaacagatgttgcttaagaatactagctcatcatgcgtgggtagggcattccgtggttcattcttttgttcatcaattcgttctacacacacatgcatttatagccagaaagcagaaagagatgtgcaagtcagagaggtggggtggaaagggctgtgtgtgtggggaggagggcaaagtgacatgacaagtttgaggctacagaaaatagagaataaaggagctatcatgagctcaaaagcaggatgggggctgatgctttatgtctgctcctggatgtagtactgaatgggtctccgggtggttacagaagagtctttgaagcaacactaacaggaaagcttcaacccagtggtggcactcaggatcaaacagcacattacacctacacctacacacgcctacacacacacacacacacacacaaacacacacacatgaagaataaatgtggagacaggtatttttaaacaaatactccagaacatacatgataacacaaggagctgtcttataaactggaaggctataccttgatttttgtggtgtttctagtgctcatcacatgactataaccccttttcttctctctctttctttctttctttctttctctccctctctctctctctctctctctcttagatggaatctcgctctgtcgtccaggctggagtgcagtggagcgatctgggctcattgcaacctccgcctcccagattcaagtgattctcatgctcagcctcctgagtagctgggattacaggcacctgccaccatgcctggctagagatagggtttcaccatgttggccaggctggtctcaaactcctgtcctcaagtgatctgcctgccttggcctcccatagtgctgggattacagacgtgagccactgtgcccggcctataacctcttttcaaaagagccaacactgacttggatgtaaaaagtgggaagtctgttgaaaagagaagagaaaagaataggaaaaaacagtctcagtttatagtcacaatttagttgtgtgtgtgtattaagactttaaggattatataaaatgatgtaactacataggaggaagtactatgggatgtttgtccacataaattttccttatttttctttgagtgttgagaataaataataacagattgtaataaaacaagcctgactcacatagccacttagtccgagagggaatgtgacccagagcagggagggacagagctcaggaatgtgtcaccatgacacatcgattccaggactcctcaggcttcacctgcacctgagctatggacaaaatatgtttgagtgctacagaggcttatttttcactgctccatagtcagaaggatggcagctggggtgaccatactattcctaagggcatctgatatacataggcttggaaatccacagggctgatgaggtttagggaagttcttctccctcccataccaagtgtgtgcaataccagcaccctccagaattcaaagcgggagaattggaggcaatgatactgatcgtacacttcatgaggaataaactgttgatcataatcagcatgagtgctaaggaacaatggaagctttataaagacaaaccttcctttgcaagttaattacaacacatctcagaattacctagtgttttttaaatcctttaagaattttgaagggtgccatgaaagtgtcaaatgtaattattatgtagctttttgtttcatattgtgtgggacacatatactgtaaaggaaaaatagttcttgaccatgtatgtggtccttcaactaacatacaactgccttaggaagagctttggcagtctcttctgtactaattccaaataccaaatctctaaaactttgaaatttttatcacgcttaggaaaacctaggctggtaatgtaggcattctcctccaatcttcaaccttttctcttatctcctcttacacttggaaaggagatgccaccttcaaccttttctcatatttcctcttatatttggaaggcaggagccatactggtgaaaacagacctagtgtcttttaaagtcaccctatagtataatactgtggttctcaattgtttccccccttcaatctcaaacttttttttttttttttttaagacagggtctctctctgtcgcccaggctggagtgcagtggcatgatcttggctcactgcaaccttcacctcctgggttcaagtgatcctcctgcctcagcctccctggtagctgggactacaggcgagtcccaccgctccccgctaacttttgtctttctagtagagacgggttttgccatgttggccaggctggtcttgaactcctgacctcaggtgatccacctgcctcggcctcccaaagtgctgggattacaggcgtgagccaccgcgcccagcccaatctcaaacttttaatgcatgcaactcactcggatcagtagcagtggctcatggtggcagtaatgcagagctgggtggcagaaggaaaaaatcaatctggttggtgggtgggaattctgccttggattctccccttaatcatcataagctttccaaaccgaataaaaatttacaacctttttggcaatctttacttcattacctacctggaagaatttatgtcctcagtggagtttctttaactccattaatgtcaattagttgttttaggtgctgcaaaatgataatacgttcttggggacatttatcctttacaacatgctttttatgcttgtttgtgtgttttgatttgaaagacttagagatgcaggctagggtgactgggacagatatggggtccctggctactgaatgagacttgggaggcagatgacttgtttttatgccgataaagagtaaaatctcaagttgcggttgattttaaaatgcaagcagggctggagaggcccatggcagacctagtttggggtgagcacccggatctgtgagctagtgttgcttcagcatctcactgtgtgtgtgtgtgcgcgcgcgtgtgtgtgtgtgcgcgcgcgcgcgcgtgtgtgtaggctggttccaccctttgctgtcccatcggcactacccttaacctccgtctctgcgtaactatattaatagaaggcaacacttcacatactggcgctcagaccccaaagagaggctggcagtggcttggcaggtgggcatgcagcagggagatgggtggaggagtgggcggaggcatcgtcgagtggcgttaggcaaaaccaatggcagttcgggataggggcggccggggcggaggcgccgaggccgatcggccaatagagggcgagcaactactggagcgacctggtgacgtgaggagcgttccatttggccagtggtgggcggttgccacagctggtttagggccccgaccactggggccccttgtcaggaggagacagcctcccggcccggggaggacaagtcgctgccacctttggctgccgacgtgattccctgggacggtccgtttcctgccgtcagctgccggccgagttgggtctccgtggttcaggtaacgaggggtgggggcgggggtctcctgggctcggctgcagggtgggctgcctccccttccgcggcgcctggaggcggggacgtcggcaccgcccttctcaactcggcagccgccgagcccctggcccggggtgactacacgtggcggggcgtgtgtgagtgtgtacgagcgtgtggctgcgtgtgcgtgtggatgtggcgcgcgtcccaacctgcctggggcggtggtccgcggcgtggcggagtcagggcgggcctcgagaggccgcgcccgcggctcggccccggactccggcctccggcctccggccccccgctggggagccggtcgctgcttcccgacggattttgatctttgttcttccaggccggctcccccttcctggtctcccttctcccgctgggccggtttatcgggaggagattgtcttccaggttagttttacacaaaggacgggttctctgcacctctgggcccccctccccttccccgaaccttctaccttctcgtttccctgctccgctcctaggctgtttttggacctttgccctctccagcccgcgagttggctgtttctccctccgtccgtcgggctgcaggcttccgcctcagtcctgccagcgtggggcatgtggtgtcggtaaatagaggccacaacaccacacctgagcggaggagaagggtagcagaggctgagaaactctgggcctgggaattcaggatgctgagtagagatggtacttaggacatgtcccagaaagcgcccttgtgacttttcttagctgctgccattccccaccccccaaccagccatcagcagtcaccaaccattccagaatctctcctgcttaagtcagcctttcacctacaggtctctg

SEQ ID NO: 12470 - DNA, 6000 bp, Homo sapiens
gagagaccaatttgaagcaaaatctactagttgaagttcctgggcttgaagccccatgtgaaccattcagctaagctatctttcttatttcaagatgagaggaaaatctttggcagtcaagatgacttcaaggcatttgtcagtaaaactcccaaactattggttttgctgaaaacagctgcagcccagggagaagatactcgcggagataagtgactaaattcactttcaaagccacatttcttaagagagtgtagatcttatttttataattaattgcgtttttgccagggtgattagcggaaaaggaagtaaaaatttacggttgtaccaagttgttattatgtgtgtatatctatagctatacacacacacacacacacacacacacacacacacacacacagaatgcatgggaaaggatgataaggaaagttcaaaaaggaaaatgggaaagaatgaaggagggataaacgggagggagaaaatgaaaacagcaagataataattaagcatgagttggatagggagacattgaaatatgatagattaagaaaaaaaataatttgtattgtctacctgaaagcaatcaattatatgaacttaacagacttttatggagaaagtatttcctcatcttctgtcaagggtacatgaatctttcagaaagtctgaccatatcctagatcacaaaacaagtagaattggaagagatgcatgtatatttaaataattgcctgtaaactgatgtttttaggaacagattataaacagttggtaatattgcaatgatgagtttttaaattgctaatttgtgttgctcttgcagtttagccatctttacttaattttaatcatataattgtttaatcatacaatacgtaggaataaaagaaccaaattattgacttctatagtttcctttggacaagtgattacgagtaaataaatattagagagaccagttgtgccttcccaagcggcattcccccctccccccccatccccccaccacaacacacccattcccacccctgccccaccatgcaaatgcctacaatttggacacactgggggcaagtcagactctgagacagaaaaaggctttcctggcactggtatctggaagcatccttcctggatcaggcctaaactgcttatagaacctgtgcctgcctgctctaggcagtgaggctgagcctacctcctttcattctggagccaccaacttcatccaacacaggaaaagggaatactgaaacactttgaagcccactttcggagctctcctgcattttggatatctgtctctgaacaccctcccccaccatgtactcagatacacactgttcctcgtataaacaaaagccatattgtgatgctaagagaattgtcatttggagacagtggactagtagattaccttttttggtaaatggtacataaaccaaaaagaactttgtgattctgctaacactgaaacacacacacaaaaatcctcattttctccctccacccattaaacttgttaaaatcacctaggtattcacattgttggtttgctttgtgacaagcacccagaagcctgatcatccaggcctctatctaatgtctaatgccccactatgagtgttttgattaaataagttttagttctaattcatcacttgaatttggtttattctaggaagcttcctgcacactcctgaaaatgccctcagttatagcttctggaaatgacttagtgccccaaactctgcccttaataattaaagtgcttgacaaaagataagttgaaattcaagctctgtgagttggccccagctttcctttgcagctttgacctccccacctccaaagcctaaccccctcctcatcaggtcttgccgttggaacctaatctgtctggttggacctcctccctgccccagaacgccacttgcttagtcccagctgagttcctcactggtatactccacattgcttctccattgcagaaagggatggggcctgggactggctgaggagtggggtgggatgctaaaacacacagtcaaactttgaatgcacagacctctccagagatctgacacagtcctcagatggcttactagagtagtgaggttggggacaggggaatggagcacagtgctcataactttcttgagagtgtatgaaacttaacaggatccttgagcagtttggaaaccttcctgtttcccagtaaaaatcactgtcctaaaacataaaactggaaaaaaagtggtttgctagtaaatgtttaaaaacagctccagagatgtgaaggttgctgggagaaacttgatttgtagcatttacttcttcagttgtgaaaattccctgactgtggtgaaaattctctgaccatggccactttcaagctactaccattatgtcattgaatgctgggatgagataagatgtgcacattgggttctcctgaaccatacagagctagccaacatcagtacaacactgggaagggatcaggtttgccctgggcttctcctgtttgggatatataaaacagagttaggtttaaaaaatatcatcatcttacattagactcgcttatggagaaaggcttcccacaacaccctgtgaaccttggtgcttcacctctatccttcaagctccactttcttgaagctcttctatactgtaaatgttttgaaaattggcatggatgttttcaccctgacagataataactattactgttgtcttccaaacaaccatcaagtttgtctaatgttgccttctcaatgttttgggaactctgaccctcccctccttctctgctactgctccctagtttaggcacacagtacaagcaaagtgcttgcaattatccaaacacatactatcatgacttacttgatgatcttttctattgcaatcctctttgattctcaaggctcctccttctctggctgcctcctacttcttctctagtatgatttatccttagactacaaactccttaagaagagaaactgtcatcctttctgaactgtcagcatctagaacaatccctgacacaaagaaagtacttaacatttgtgttgaatcaatggctgcttgctgtgtcctaggtgctatgtggtggcttacaggaaggtttccattcaatcctaccccaaacccttcattgtagtaagtgcaattattatccccattttacaaataagaaaactgaggcttggaggctaaataacttgcccagaaacacatctttttattcatatgcctattctattcattacacaataatctatagtttataatggaagccacaattgatatcacctgatgcatgaagatatgataatcaatttggctgtaaaagagctgttactttatttttacacagtttgttcttgaattaaagtgtttttcattagataatttgaaatcttttatgcaggtagaaaatgtacataaaaggctgggcatggtagctcacgcctgtaatcccagcagtttaggaggctgagcctccagaccagcttggccaacatggtgggaccccgtctctactaaaaaatacaaaaactagctgggtgtggtggtgcgcgcctataatcctagctactcgggaggctgaagcaggagaattgcttgaacctgggaggtggaggttgcagtgagccaagatcgcaccactgcacgccagcctgggcgacagagtgagactgtcttaaaaaaaaggaaatgtacataaagaaaaatttgtctattttttagccaattagtctatcatgttgatatttcttatcaattagtctgtgagcccattggatgctatactttaatctcatcatatgttatatatcaggagctttgattagtgtcttattcatacattatcattataaaaagtctttcataatcaacatttgtgaaaggttgctctatattattaaaatcatgttactctaagacatttggggaagggcttacagattaatagtagtagtagtagtggtagcagcagcaaccactaccatttattgagcacctactacatgctaggcctattgtgctgttagttttacttacatcatcccattgaggccttgtgaaataggttctgctgttttttgtttgtttgtttgttttttactttactgttggggaacctgggactcagagagtttactcacttgcttgaggtcacacaactattgaatgtaaaatgtggactaaaatatacatttgtatgtctctaaagcctgggcttttaccccaagatggactttgaaggctgtccaagttacttaaccctctctgagtttccgtttcctcatctgtaaaactgaggggagtaacacttattttgcagagttgctctgaagatgagaaataatggatcccagggcccaggggcacacagtaggcacttaaactgtggtgatgtttatgcataaatggggcgttaaaatgggcaggggaagatctgagatcccgataaaggtattggggagctggagagaaggatctacaaatcttcttgagagctggccttctcccccccacaatacagtgacccagtgaaactctgagagacaggcgagggggcaggggcctgaatttggctccagcaacctctgcagggagtccggagagaggcggggagctgggaggggcgtagaaatccccgtcgtcagaggactgcaggtgccaggcagagttggtgtaggtgggctccccgagcccggcgcagggaggggaggaggttggggcgggccggcaggcgggcgggggagagaggaaggcggggctcagagccgaagaggctgtccttagacagctcttctcatgccgggcagtttgctgcatctggaggagctcactggagaatctccaacatcggagcgggccttcaactaccgtaagtacctacaaatgagcgcatagttcagtggctgaatattaaatactggccaccggatcctaaacaaaaccccgaaagagtctccttgctgtaattaattgccgtaaatcaaactgctccccagtctgtccccccacccgcttcattcctgcctttctcctttccttcccggatcccagacctgcctcggtgagaatctctgggcactgtagatatctccccttttccttctcagtcttccctccaaaccctcagctgagcatgtacccggcaccccgccgagcccaacccctttgattcctggagccctcaaagctatgcagggggcgagccattagacatttcagatatgtcaccctcaaaagcactgcggcgctgcctaagggtggggaaagtgcttggggtggagtaggagggaagggtaaaacggctaggcagccaaagttgggggtgggggtggggtgaaaggccaaaatgggcgtggccaactaacccaaggcttggggctgttctcatgttcccccggtataagattcatcatctgggctgaatataaatggtacaatttccttagtgattgaggaggggtcagccatgccaaaaagcccagcttccctgactcccctcaatcccccagtaggcaaagatcctggtttaggggtccaagtggcaaggctgaaacctcagatggcatttcctgggtgtaatcccaggttgaacctctcccttggcagtggaacctggcttcccccaaaaactcctggcccaaagccccagggtaacaaagcaacagggtagcatccaagctttggcctggccctgagaggagtgggagcaagggactgtaggaactgagatggaaagggcatctttagggccctacaccagttggatgccccctttgaaaagaagaaaaaataagcatctttttaaaatgtaatgttcactatgtgcctggcactgtacatgtattatctctaacccaacacaacaataatgttaggtcgatattactcctccactttacagataaggaaaattcagagtgggtaatctgaaaatcctttgatacaaagtgaaaa

SEQ ID NO: 12471 - DNA, 6000 bp, Homo sapiens
tttttctctttttttgagacagggtctcactctgtcacccaggctggagtgcagtagtatggtcatggctcactgcaccctcaatctctcaggctcaatggatcctccaacctcagcctcccgagtagcttggaaccacaggtacatgccacgacgcccagctaatttttggtattttttttttttttttttttttttgtagacacggggtttcactatgttgcccaggctggtctcaaacttctgtgctccagcgatccacctgccttggcctcccaaagtgttggaactacaagtgtgagccaccaaaccgagcccaggatattttctaagagtggaaactgaggcccaaagaagtgagatgactattccaggaacagtctggcctgctgcctatggttgctaggccttggcttattgtagctttaaaagccctgcatgagctgactcttccattcgttgtcagtgaaaagtgggaattttggctgggcacagtggcccatgcctgtaattccagcactttgggaggccgaggtgggtggatcacctgcggtcacaagttcgagaccagcctggccaacatggccaaaccccatctctactaaaaatacaaaaagtagccaggcatggtggtgcatgtctgtaatcccagctacttggaggttgaggcatgagaatcgcttgaacccaggaggtggaggctgcagtgagctgagaacataccactgcactccagccagggtgacagagtgagactccatctcaaaaaaaaaaagggaatttcactgctagtgaaatggtgggaacccttcatcagtagagggccggtcattgggctgcttgttcacagggttgggtctactatgagccccattccagtgcttatcctaccttctcagcacatattcatttagcatatacagcaccctggcacctccttttttttaactccttgagccccacgttttgttaggctagaaaaataaaactcagtgttctgtgggggaaactaaatgactattgagagtgatgcatataacacacccagcctgtttataatattaaagcctgaattgccggacagtgttttcattaagtactgctattcattccgtttggagagacacgtaagaacagaaaccagtcaactcagtagtttgcatgccttccatctttgtgacagaattgcctattattgagagtatgaacgttttcacaaaatgagagacagctagaaagccagggttgaagagaatgctcaggatgaggggaaggcataatctatgctttctggaaagaatgtcatgctttctttaatatgaagtttccactatttctgttctaatttgaacagggtaccctgctgtcacccttgtaatatgggcccagaacaactgcagctgctgctggcctggtgggatccagtgatgcaaatgccacagaatgcaggtagaaccaggtctaagtcattccccccgggctaaggccctgagtctttggcagtccttcagcctttgaggaagacagtaaaggtaaacatgtgacaaggaatgtcagatcagggaagtgcctcttgaatcacaaagtcaaccttgccatctcacagataaggaagttgagcccaaaagtgagcaagtggcttcctcagggtcatatatatatatatatagtctcattagtgtcagagtcaagacatgagcccaggtctctggactcccaggccagtgctcttgtaactacctcccactgttgtctcagattacaggaaccaaatgcatgtctggccttgtgctgcttcgcatgcaagccaggctgacctttatgctcccagaatcatcagccttttcattggaaaccatggaaggacggttctgggaaaataatgaaaatcataccacaccatagagacaaccagaagccctgctcagatgacagagttctcctcgccttccaggtactgaatcccaaatatatgcatacacagcaactccagttggtgttagaattaaggagatggaaaaccgaacacttgacagttcggccagttctcttcccttttttttttttttgcctcctacccccagtctttccccaaaaggccaaaatctagagcatttgagcctttgtcattcactgcctgagaggaactggctcctgggagcagagaccagccgagattacaagaagcctcttcaacatgcagccaaggcccagccttggcctcgggagaacatggctcttgggacacacgtaggaaaaattccctgcttctcagcaaaaagcctcttcaatcctggagggatcttctgaggtttgtgggactccctgctccccacaaagactgttttcttatacttccaggagccctgatatatgaattcctgtatgagagattcatttctttgttcctcacagcatgagggggtggaggaagggcttctaaatgcaaaaatcctagtgacatattatatctcagaaactgaactttacagccccaccttgtccctcttgctctgcaactaccaacctcactggccctttctctgaaggttggactgtgagtgtgtgtgcaggtgtgtggacaccttccttttcacaactcaaatgagtaaaacctgacttttccccccgtactgtttaccacctcccccttccctccacccaaggcactttcttgtgttccaatgccactaatccctcttacagtagaaactccgtagtttagctgctgagggcttgaatttgtgacccacctgtttcagaaatattttcctagggacccaatgaatgccattacatacaaaggtggtgtaatggcagggaatctttatgcgacaccatgaggagagccacctattgggtaggctaaagaggttgactgcagtgagtggccaagcagaaggcaggggcagctggcaagcagagctccggggccacccccatagcttcccactaccctggctcacaccctaagctgccctcagggggagcaggcctaggactaccagcctgggcaccaggggagctcttggggaagctgagaggtcaaccttgtaagttactgcatctggcttcttcgcacaagttcattgggttttcagagtgttcctggaacctcaggacaggagatgctggagtgctagaaattcaggattcccaaaaaatccactatcccttatgtctgcactggacaaagggtccctcacggtccccagtaggtttgggggcacgtagaagtctagccagggctgggaattctagggggtggtaaagacagggtgcacagccacagaattgcctgagaacggcctgttccttatttggcctgtgacgcagttggcacattgagcttagagcaacaggtaaacacagcctcacatttggagtggcctaaaggtttctacatttcatccccacggtgactcagttggtcaaaacaggggacataattggtcctatcttacagacaagaaaactgaggctcaggaggggcaagtgattatcccagtgctgcccagggacagatttcccaggacttctggactattcttaggcttgccgcttcatggcatagatagaacaggaaacggatggagcagagctcagcaagggagatactgggagagcctgtctccaggagggacatgcccccaccccaggactcagctcgtggtctgcattctcccactcagtggccccagtgccaacagcactgctcagaaacactgctgccaaccggtgccccttctgtagcagtgggactggagggagttgcacactcagtcacggaaacaccagtgtcctgatgtacagcaagcccctttgatcaatcagatggggacagactgactcctgagttcccagggtccttttcctgaaggaacatccattctttccctgttaaaccctgcattcctggtccagcagcagaaaagagcctttcggacactggagcttgaggaagatctgtgcctatttattagagaaggtggtgttagtatcaggaaataggtggatggtgctgggtttcttgggttcaaaccctggggctctgctgtgtgaccttgggcacatccctacccctctctgggcctcagtttcctcatgtgtcacattaccttggattagacggtctcactctgatggagtttttagttatgtatccattcattcaacaaaccttttatgagtcaagccctcctgcaggcacagggtttggtacacaggattcagcaagaagacagtctgtgctctaaaaaaggtcagattctcattctgtaatgctttttggtcctgctgtctttttatcatgctgacttaccttttcagaaaatgcccccgcttccgctggagaatggaaattggcaaagagagacggaaaagctccaatttgcgcctttgctattttaggagaggttgaaattacgagccaaagtggagtgatgcgctaagcggagtgacctccgtactccaagaaaagagaaaacccaggttctctgcttgtgaagtggctcgagctcttaggcgtgaggcattattatataaattcaagctcgctcgtgatccttagtaccctgagttgcctgaaggggggaatggcactgcctgcgtgtgcagtccgggagttcgagccgccgcggcaaccggagcgaggagcgcccgtccgcaccacctgtccccgccggcattccagagtagaggccgaattggcagcgagccggcccgggtcggtcgccgcctcagttcgcgcgggccctcctaggggtgtgtctcacggattccacacccggccgctcctggacaagccccgaaaggcgtcttcttccctggcgggagccgcgtgcgccccgcttttcgcgctgctgtcccgggggcgccgcaggcggatgcacgttctcaggcgacgctgggactgggctccctctgccgggccctgctcactcggggcctggccgccctgggccactcgctgaaccacgtgctccgtgcgatcttctccaaagaatttcggccccatggccaggtacgttctaggtgaaaaccgggtcgcgcctccaggcaggcgcaaggtgctgttacggggagggaaggcacccgcggggtagagaagggcgtaagtttcagctgccattggtggcccgggctagggtttccggaagggtgcggcgcaatttgccaacgccgcggatccgttgtaaatgttccgcggcaaccggcagggcaggttctccgatagcaagttgggtgccgccggctatatccccagggtaatatgagccccgggttccgagcttccttggaggccgcataccggatgaccaagcgggcgcgggcgccggcaaaaggagggtttcggggcatgcggggagaaacccggacagaggtgtgcgctccaaagaggataggggcagaagagcccggagagtccggcggacgaagcgggatggggatgggagcgggagccaccgagagtggagcgagacacgcgggggcccggactgggggcgtgagttgaggagtggggcgactgggcccggaggggtcccactggggctaaaccccgtggaggggctccggggagctccggagagctctggcggggggagggggcgaacggcccgcgggaaggagtcggggtgggggtgtgtgtgtgccgcagaagccacagcgctgagcctgccgggaaggaaggaagcggggaagggagccgccgccgcagccgccgccgccgtggagtactcggtgcggaggggagggggagaggggcgcagcagcggctccaggggaagggggcggtgcgggggcacgacgagcgcgggctgagctgcgggattgacgtaacgagcttgggtttcccccagcgtcgggaacatggatgagaaatccaacaagctgctgctagctttggtgatgctcttcctatttgccgtgatcgtcctccaatacgtgtgccccggcacagaatgccagctcctccgcctgcaggcgttcagctccccg

SEQ ID NO: 12472 - DNA, 6000 bp, Homo sapiens
gttttagccacatcttttggtctccagcccttgcctcaaggtaatgggagaactaggcaatattccccactcctctcataaggcccctctcaaactcacctcagctcaaaaatagcactcgtatataaaggctatgaacagtaggctctcactgagtcctaatcccaagactgccagtgccaatgcctagcggactctgcatctttcctgaagtaactaacacaggctttactaaaagggagaccattcaccctttttgtttgtttgtttgttttgagacaaagtctttctttgttgcccaggctgttgcccaggagtgcagtggtgtgatcttggctcactgcaacctgcaaaccctccagagtgtaacttgtgatataattggaaagaaagcaaatgtatcttaaatgatgcaagaacaacacaaaacaagatgcccacttttgcaaaagaagaaatcttccaatttataagatctgaagagataacaagcccaagggtagtctaaagcaaataggagtcaaaagcctcccagaggtgggagacgtgtctccttttggaaattcagttgttttttatggcaccatacaatttttctatactggattattattattattatttttgagacggagtctcactgtgtcgcccaggctggagagcaatggtgggatctcggctcactgcaacctccgcctcccaggttcaagcaattctgctgcctcagcctcctgagtagctgggattataggcgcctgccaccaggcccggctaatttttgtatttttagtagagacggggtttcaccacgttggccaggctggtctcgaactcctgacctcaggtgatctgcttgcctgggcctcccaaaatgctgggattacaggcgtgaaccactgtgcctggccttccatactggattcttatgtgagctgtaccagttacattttccacaaccgcatattataccacaaaccagtctgacctgcaagggaagtacaagcattggtccttttgcaacgccctgctgcctaaccagtttgtatttgcaaaagtgacacatggccagtttaagttggagatgtcctagggaagggtggatggttgttgtatgaggccttgcctagggtcctttctgggcctacttagggcttcagatgcaatggagatgacggattttatttcatcaaatggtattaatgtcatttctggatcaggcattgtgctggcatcctgaagaattcatagtctaggtaggagagaaaggaagatatacatgtggctagtgattacctaagatgaattgtaaagcagaataagcaacattctatggtgatggagcaggagttaatagttctcatggaagatcctggaaggttagtggaggaaggagcatttccactgggccttgaaagataagtaggtattccaaagacagagaagggcattataaattgaggaaatctgtgaacaaagttatcagaggcatgagcttaaggaagatctactggcagcctgggtagggcaactggggagaattctttgggcctttttcttatggagaggggatcggtcaacacttcaccttactcttcctgtgagcatcaatacaatttaattttgaaaattgtatctttagttatactccaagggacctatggaagttactgatagtgtggcctcctttcaagggagagtatttgaggtagccagtgctggttgagttgtcccagaccctgctctcttctacggatggccaaatgtattgggctagagtatagggtacatcagaagaggattgcagtgctttctttggcagcacatatactaaaaatggaacaacatagagaagattagcatggcccctgcacaaggatgacaaacagattcatgaagcattccatatttttttaaaaagaagaagagggttgcagagatcctgagcaaaaagaacaaagctggaggcatcacactgccttacttcaaagtatactttggttacaaagccatagtaaccaaaacagcttgctaccagcataaatacaaacctgtagaccaatggaacagaatagagaaccctggaaaaagtccatgcatttacagccaattcgtttttgaaaaaagatcccaagaacataccttggggaaagaacagcctcttcaataaatggtgctgggaaaactggataaccatatgcaaaagaatgaaactagacccctacctctcaccatatacaaaaatcaaatcaaaagaaagacttaaatctaagacctgaaactatgacaccactagcaaaacatattggaggctgggtgcggtggctcacgcctgtaatcccagcactttgggaggctgaggcgggtggatcacttggggtcaggagttcaagaccagcctgaccaacatggtgaaaccctgtctctattaaaaaaaaaatacaaaaattagccaggtgtggtgatgggtggctataatcccagctactcgggaggctgaggcgggagaatcgcttgaacccaggaggtggaagttgcagtaagctgagatcacaccattgcactccagcctgggcgacagagcaagactctgtctcaaaaaaaaaaaaaaaaaaaaccatattggagaaatgcttcagggcaaagatttttttgagtaagattgcaaaagcacaggcaacaaaagcaaaaatagataaatggattacatcaatcttaagagcttctgtacagcaaaggaaacattcaacaaagtgaagagacaatctacagaatgggagaaaatatttctacccattcatcaacctctcttcaatacacccttctcccctccccttcccagcctctaataactaccaatctactctctatctttatgagatccacttttttactcccacaatgagtgagagcattgaatatttgtctttctgtccttggcttatttcacttaagataatgacctccaggctgggcgtggtgccttacgcctgtaatctcagcactttgggaggtcaaggcgggtggatcacatgaggccaggagttcaagaccagcctggccaacatggggaaaccccgtctctactgaaaatatcaaaattagctatgaatgcatgcgcctgtagtcccagctactcgggaggctgaggtgggaggatggtttgagcccaagaggttgaggctgcagtgagccaagatcccaaatatcttttctcattctgtagattgtctcttctcttcgttgaatgtttcctttgctgcacagaagcttcttagcttgatgtaatcccatttgtctgtttctgcttttgttgcccgtgcttttgcagtcttacccaaaatatctttgccctgtcctgaagcatttccccaatatgtttttctagttgtttcatagtttcagaaggaatgagagctagtattcgatacttcagtagggtaactatagtttacagtaatttattgtatatttcaaaataggtagaagagaaaaattggaatgttctcagtataaagaaaagacaaacttatttttttttttttttttgagatggagtctcactctgtggcccaggctggagtgcagtggcgtgatctcggctcactgcaagcttcatctcccgggttcacaccactctcctgcctcagcctccctagtagctgggactccaggtgcctgccaccacgcctggctaatttttttatattttttagtagagacggggtttcactgttagccaggatggtctcgatctcctgacctcgtgatccgccttggcctcccagagtgctgggattacaggcttgagccaccgtgcccggccagaaaagacaaacttctgaggtgatgggtatcctaattactctgatttgattgttacacattatatgaagatatcaaaatatcacctgaactccgaaaatatgtacaacctctatttttcttttctttttttttttttttcagagagcatctgactgtcacccaggctggagtgcagtggcacaatgatattggctcactgcagccttgtacctcccagattcaagcgattctcatgcctcagcctccagagtagctgggactacaggcatgcaccaccacacctggctaatttttgtatttttagtagagatgggttttgccatattggccaggctggtctcgaactcctggcttcaagtgacctgcccacctcaacctcgcaaagtgctggaattacaggcgtgagccacggcgcctggctaatttttgtatgtttagtagagatggagtttcagcatgttgcccaggctggtcttgaactcctgacctcaagggatctgcctgccttggcccactttatataccatgctaaggtgtcgtaggtactgttgagactgaaagattttaaggagaaaagtaacgtggtcatgtgtacatcttagatcgatacctctggctgctttctgggagatggtttagactgaggtaagagtggaagcagagttcaaacaggaggctactgaaggagtccaagcaaaaagtcatggggcctaaacaggttctgaggatggggtggagcctgaggcggtcaacaagacatgtctcggaagtatgaatagaagccactagccttgagtactcactgggtgcgtgtgtgcaggagagtgagacaggacaggaggcaagagggactgcctaaggagcgcagacagagatggccctctgtgagagcctccagtctgtctcttcaaggggaggcgggaggggaggggcagatcagaggacagagaaggaagaagtttagagcatgaatgaagaaaccccaagaggccaggtggcaaggccgaagccccgccccaggctccggccccgcccccagccccacctcttcttcctctcgcctcccacccccgagccgcggctcatcctctagggcggagagaggtggcatttgagtcctccggtatcccagcaggcagtgcagcctagagacgctgacaaaggagcggaggagcagtcgcagctgctttccgaggaagccggtgttgccgaggtgagagtcccccaccgtcccgtcacccacttcctctgacttcgggaaaatgtggaagttacgtggctgagagccccccgccaaagaatgacccatccgcacagccggagcttggctctgtgattgacagcggggctccgcggcgccgggatgcgggtgggcggcggggaggagacggaggggatcctttcctgtcccgtgtgtgactggcggtggctccgccgcccgcggcgcccggccccagggtctggccagctggtgtgtagctcgctcctgcccgggcaaaggcaggctcgggagcctctcggtgcctgcccgacggagttcggttgccccggggatgcggctcgcgggacaactcttcggtggatgcaccgaggacggctgggggagggaagttgactccccgtttggggtgacaccgtcctcgcccttcctccagcctagccggttgccccagcgagcaactggaaggaaatcggcagggttggagcgaggcgtcccgggatagcctcagctttactctctttgcctggagggagatgaaagtagggtggagaggcggggaggggagagcgaacgccttcttggaaaaatggggtagggtgtagggggtgcgtggcctgtatccttccccctccccagacctctgcacggatcttgatggttgcaccagctgctctgctgtaaacaggctcacatgaccggtttcacatggagcggccggtgtggggacgtgggctgggaaggctgggccccagtcaggtggagctgaaatcctaggacagtccattttgtactccctctccagccctcctgcccttaatcaatgttctgcggtttccccctttgaaagaaagtaattgacatctgccctctccagctgaagtagcagatctgccccagtagaatctgagagatctcacgtcggggaacgagaggacaaatgctaagtgaaaatt

SEQ ID NO: 12473 - DNA, 6000 bp, Homo sapiens
gtaaattcttataatggttctagataccccctatgtgtgctttagaaataccccattgctattttcagtcatacacttgaatagaacttctaactactgtttgtcttatttggtaaaaaacatttgttttgtggaaaattgtttggtttgagggtggtttggcctttagtgtgagtggtgtttttgtgaagtcatgcgttttgaatgtatccactctaataaaaattatttcaaatggctttatctctcctccctgtccctgtgtgtgtgtgtgtgtatgtgtgtgtgtgttttcattttacagcagaaatcctgtgtataggtaagatttgtattctaagaggtttattaattttaaaaattgccctcatggtagttaattctaacctgatttacttgcagttgtttgtaccttggttgctgggaaatggatttcattctgttttatcagaggagtaaacaatttccctagggtaataggcacatttgagaaggcattcattttttcacatttaaagattaccattaagtaaattgctactgtggtgctttaagtgggcatcttaaaagcctgaaagaaccaatgtaccctctagtgtaccaaaattagcaccttgaaggagttttatctagtcagtttgtacttaaacattttttttaaaggcattagcacatgaacctttccctggactttgtgacttttcatgaggttttatttatttttccctccttttctgctttgaagcctgaaattgtttttgtttgtttttgttttggagagagtctcgttctgtcacccaggctggagtgcaatggtgcgatctcggctcactgcaacctccggctcccaggctcaagcgattctcctgcctcatcctcctgagtagctgggattacaggcacctgtgaccactcctggctaatttttgtatttttagtagaggcaggttttgccatgttggccaatctggtctcgaactcctgacctcaggtgatctgcccacctcggcctcccaaagtgctgagattacaggcatgagccaccgtgcccggcccaaacctgcaattttttattccacatatattgtcttctcgtgtgtattagtttgtaagttactctttatcctgaaacagggagtaatttcttcctcacccttgaatgctttttttttgttttaggggactaggctgaaacaggtggcaagtgatgcaacatccaaagccacttttcaagctttttttttttttttttttttttttttgagatggagtctcgctctgtcacccaggctggaatgcagtgatgcgatctcagctcactgcaacctccgcctcccgggttcaagtgattctcctgcctcagcctcccaagtagttggaattacaggtgtgtaccaccacgcctggctaatttttgtgtttttagtagagacggagttttgccatgttggccaggctagtctcaaactcctgaccaagtgatccacccacctcggcttcccaaagtgctaggattataggtgtgagccaccacactcggccggccacatttcaagttttattgctagaaagtccgtccccactagctgggtgcggtggctcacggctgtaatcccagcactttgggaggccgaggcgggtggatcacctgaggtcaggagttcgagaccagcctggccaacatggcgaaaacccgtctttactaaaaatacaaaaattagctgggtgtggtagtgggcgcctgtaatcccagctattcaggaggctgaggcaggagaactgcttgaacccaggaggcggaggttgcagtgagccgagatcacaccattgcagtccagcctgggtgacaagagcgaaactccgtgtcaaagaaaatctggccccactttcccctgcttcattttagatcagattatttagtcaagtcctctccaagttacatatgaagaaaccaatgccaggacttccccaagacacatacagaccgattgatggtagaaggctattaggaccttgatctcctggtttcttgcctctctttattaagctttagaagcaaaaacacccacctgggatcatagccaaatacttaattttatcaatttttggcatacatggatagaaattgtcacaaatacaacactgatctcacctcataaccttgagtgctttgccagtatagctgattgtgaataccatgtgttttttctaccagtggactctagcatagatgtagcccagatatgtagacatgtttgctgagataagaggtatattacagtagcattgcccaaaacatgttgtacagaatgtgatgtcactggattttccttgtgggaagaaaagagttctgtggtcaaaaaattttgggaaatgctgacttacacaaagttaaaagaggtttcttcaagactttatggagcttttactacatgggtatgcattgtgaataaccaggaggaggggtgggcttcccctttctctaaggaacctcattattaacttgttccatgtaattcagtctggggaacattgagtgtggtgtcctgatattcttgccatttatcttactgtggcattcctagttggcagtactcaaaggcacattaaaatttaacaatctaaacaatttttatttatatgtaaggcattactgaatatttgtcgtgctcttctttttatgcttcaatatccaagttatacattacatttcaaacgtcttgctaatttatatagtctcttttaagcatgttttaggaataattacaatcagatcatcagttatatttatagcagcatccagtctttatagtgcacagaagcttcaaatccaaagctttggggagagggaagagatgatggagagacagtgtcaataattccagtgcagttcccaagtgcctgtgtactctgccacaaagggagaaacgaattcctatttttactgtcaggatgtcagatcaacagttccaaaatactaacggtatatgttctggacagcagcctccataagctcctccagtggccctcagttgtcatcaaacatggcacttgtcaagctccctggctaactctagtcctcttcatgaacactgaagaacagtgttttcaaaaccaagcactctctgctagtggaccataattcatcctgcccctttaggcaggggtagcaccaaaatttcccgtgcctcttctgtagagccagaaactttcttgctttaaataaaacatttacatgtgggttatgttgaggacgttgcctagttccatgctggcccagttgctagagtttcaatattcctatagtttgttaacatctgcaaacctcatcctttgttcctgcgaatagtttacagtcatttaaagtgatttctgggtgtttctgttaatcctgctgtaagcagtctcttacgttatgtgaccttattttatagataaggaaatgaggctcaactaagccattttctccaggtctcattttgaagaaaaaaaaaatgtaaataatatttctcagagtcataactgtcttgctttccctgtcctctccagattttgccctgaaagccttccctgtaggaagaatgtttgtttttttttaaagagatggggtctttactctgttgcccaagctggagtgcagtggtgatcatagttcactgtaacctcgaacttctgggcttaagtggtcctcctgcctcaggttccctagtaggtaggactacaggtgtgtgccagcatgccccgctaattaaaaaaaatttttttttcgtagagacaggggtctcactatgtttgaccaggctggtctggaactctgggcctcaagcaaagcattgggattacaggtccaagccactgtgccaggtccaggaagaatgcgccccccgccccgaaaccctttactttcttcatttattcaactaagccatgctccacaatggaaacttgctttttatctacctcttttgttggggatgttaagaaaagttatagcctggatgtgctctttaaattaattacatttacagctcgggcagtttttaagccagtttgctttttgtatggtatttaacagtttacttggaaaaatgcattcattggttttgctggacacactccaacttgtatttgaactggcagacctttctaggaaacatcacttttatagtaatgacactatcactgaaaaaagaaataaaaccctgttcaggtcgtcagacaccagttttacaatattttttcttttgctccagctagagtttcttatctcttcttaaactgtaataaaaattcttctgtggtgatctagaaagtaatttttggatgagaatttatctcttctaggtaatgatgctggtcaaggcatttttctccctaatatccactggcttttttccttgcgattgctagatattactgttggctgctgagatataactttcttacctctgagatatctaaatagtgagaaaagtcttccatccctaagggacctttccacataaaccatctgcttaggcctttgttgcatatatttttgaagcttgaatttactgtattacagtgactcttagggtggagaaactgtatcatagtgaatacttagattatgtctcttcctcttaaactacaactaaaagttcaattcaactttcctccgaagcttattgtttagccccactttttattgtggtccatttattgtaggcagggattagaaaagaacttcccaagatgaggaaaaattactgtgtggtgtaagatactgatatttaaaataataacaccttaaaatacagaagttacaaaggcaaatcaggtctttggagaagaataacaaaaagatatgaaatggtgcaataatggggctaaggccgccagagtactgctttgagctcttaaggaatagactgtcatctgatgcttcctttgctgcctcccatggaagtacaggaactaggcaagccataattggctcacttcccaagttctgggaaactttacaaggatcacaggggttggtacaagttgcttgataatctgcagcattctctctgagatttagctgccattgtgttgccaaatttctgcatgtcagtatgcagatggtcccatctctccctccagcctctgaggtttgtaatctatatttatttctcctcttttcagccaggttgggttttgaggtcttggggcctgctttattcctgctttttatttgcatgtatatttttatccatttcctgagggtaatcgtaaatggttagctggattttcagcctcactgctcctatctttaagagttaagaatctccttatttagagttttaaattttgttaagtgtttggaatgaaaggctgtgtgtagagatgggtagggtgaaagtgaaagggaacttctgaggttttgtatacttgctggttaagtttctgtgcatattgtcaggctttgggttaggaaagattctgttaataagggaagttgagttgctgagaccccaaaggaacactgagagtcgcaggttacttcctataaatggaagaacctgaatcattaaaagataaaattcctgttagaatcttgaatcacagaatgtttacagtatttttgatccatcaactttctattagcaatcctttaatgaagctgcatttcagtctttagagccacaatttctgagccctgaagttcttggagtaagggcatggtgggggaagggggatcagattgggaatacttagaattgattgtccctggtgaaattaaactgctcagtggatcactttgagataatgaaaggtccactctgagcttccaaacaaggcattgttcttatccaaatcctcatggtcagtctttttcttaagtgttgtgcttgctgatttaggtgtttgtgtgaggcttaatatccatttcctgtagtagtttttttttttcaattaaatgtgaagccattgggtaatgcctaattagagaaatctttgtgtttagggataaac

SEQ ID NO: 12474 - DNA, 6000 bp, Homo sapiens
gtggcatggccacagctgatggcagccttgacctcctgggctcaagtgatcctcccgcctcagccttccaagcagctggggctacaagcatgtgccaccatgcaccactgatttttgtatttgttgtagagacgatttttcccatgttgcccaggctggttttgaaatcctgggctcaagtgatctccccacctcagcctcccaaagtgctgggattacaggaatgggccaccatgcctggtcacttaacctcatttttaaaataagtatgataatcccttccttgttcatagaactaagtgaaataatatttgtaggcagcacagcaaagaagaggcactcaacagacagtagctactattgaatgggttaattatgatctgaaaacttcctttcatgttctaaattccagaaaatttgtaaaaatgggctattagtatgtttttcaaattatatagatagaaaaaagggttccattgttaagtaagtctgtgaaatgccacatgccatatcccttttcccttggtaaataaaagttcatttaaacataattaattgtgttgaaaaatcccaaagtaaaaataaaatgtttagctttacggaaccaagggtcttttaaacttatttgatcatggaaacatttcttcccagaagatatattaacatcctaagaactttcttgtattccacttagagaaatagcaagtgtgtgaccggacgcggtggcacacgcctgtaatcccagaactttaggaggccgagatgggcggatcacctgaggtcagaagattgagaacagcctggacaacatggtgaaactccatctctactaaaaatacaaaaattaaccgggcatggtggcacatgcctgtaatcccagccactcaggtggctgagggaggagaattgcttgaacccaggaggcagaggttgcagtgagccgagatcacactaacgcactccagcctgggtgacagagtgagactctgtctcaaaaataaataaataaaaatgaaagagaaatagcaagtttgtaactgttaaaatgccagaatataaataaatcttcaatattaaaatacactgaatcatctgtgatacctggatacgaaaattaaggctgatttgattttgagcagcagcctaagacaaggcaagataaatgaggaatacagtgaaagtgaaagaccgctgactagggccaagacttggcattataatcactttcggttggtagtgttttaatgacttaattccaaactgccttcggaacgaagggtatacaggatcttgttgaaattcttagtgcagttgtttttttccctgatggagggagacacagtatatcagtgtagacctacgattctggttgtactcctaaaaagtcaagatgaaataaggtaaaacatttggaggaagaccgtgagagtattgcaaaactcacaatatttgcatgcttacattttaggaagaacatcaattttgtttttctttcaatggccataaatagtgctggagttttcttaacacttttatttatgtatatattcacttcctttgttaagctagcaattctgtgtcatttcctactgttctattgggatgtcacctgtagttctaggggacggaaaagggactgtgggactaaaggattgggttaattactttgaaagcaaaataagcataaaacatggaagttgttacttctgttttattttatgagtgtccactttatctttttaagtagcaaaacattttattttaaagcattcatttaaaaaagttgaatattaatcacagataagttcttaggaatattatgaattgtaatttatcgatgatctagctacagtggctttcagatttgtctccatatccatatgaaaaataacatttcacagttattgcagttaaatatagccaagtctcagaacagtttctaaagttgaataaagataggcatttaaatcatctgatatttactgtccaaatctggccttttcagttatcacattacttagaattttcaggtaaactttttttgctcattctattgactcttgttaacatttgtagtaaaagacaaacatttcacctatctggataaaatatattcagcttcctgaattgttagcatttagaataaatgccaacttgttttgatacccattactactttcaaactgcattacacaataaaatgcaaatgtgagttattaattagcaggatctgttttgtccaagtgtgcaagagtagagggatttttcaacattctgcagctgttacctatgaaggaaacatcattcactttgctaaaaggagctgcacaattacatacgctgttatagacaaatattttagtgtttccttaatgctatttcataatggatttcacattgaataagataaattttaccaatgctgcccaatttctgtctctaggttgtttgtaaaagagaggatgattacagttttcaaggcaatgtggagtgaaggtagagaaagagttcttcatgaacgacacaatatttagcaaggtcataaagaaatatgcccatacacgcatatctatttaagtattcatttacatattgtacgtgcatctctgtatacatgttgtgcccggtgaacatttgtgtgaatataacctgacggaagtcccataaaatgacaaaaaatgaaaaacaatgaaacatgtatatgaatgactactatagatgatacagaaggtagaccattattcacaaataatgtaataaatcctttgcccatcagatgtttctacctagatttggggcctttaaacatcaaccaattatggtaaatgtttaactgtaggagttcaggcagacagccaaattctggtttcaaagctgttgctagttttagcttaaagatttttttttttcatttttaagcaagaacatttctggataccggttgtgctctattgtggctagagccgctgggatttgaataagtaaattgggcaacacactggtcctgaagaaatgggcctggcagtattacctgaatgtggcaaataataggctaccaagagtcctagggaaatacttcccatttataacttagctctacttacctaaagctagtttattcccacagacacgaagagagagagagttgtttttcttagccaagctcctacaaaaaacagcaaggttgggggatgggagcacatccaatgtttatgccttttgtttaggaaagccaggtatctgaaatacatacatgatagccaactcctctctgctcccctcccccaggtttatttattttcttaacaagcttattaacgaaattatcaatttgcatgaaactggtttgaacattggcccttcctcagaatatttcttatctcttgtggaagcactaacaaaaagggtagaagaaggggcctagacaatccacacgttggatttgcagccactggatatttcagattcagctgctaaagcctctttggtatacacaatgaggggcgactgaagtgacttttcttagtccatttcctctccttctccccgtctcccgaaggtactccgtgggtcccttccctttctctcttcacagtccctcctgagcagtcccaaagcttcaaaccttgttctccaaccccctttccctaatgtctcccaactaccacccccttccccagtcaaactcccctcccggtcaccaccaaagcccggagaagtggaatgcacacaatgcctcccttatagggcttgagctgggaactgggcatgctcagtagccaaagtagatttttttttttttttttttttttttcttttggtctcaagtgcggcatctctcccagtcccacgcctctctttcctcaacccctatcccctatcccctatccccacccccagctccaagatcatccggcttaacccattctgcaccaaaggcccacggagttctaaggtgcggataattaacccgtctccttctaacccggctaaatagtctcactttaggctaaagcctcacactttcgccttaaagcccctggccccttacgcgcagacaggtagggggagtgcgaatactactggatcctaggaaattggttcccaagaaggctccttccaggatcgaccgctacggagaagtattccaggagccctccgttctgcggggtgacaattagccaaaggtaccgtacccgtgatacaaaatccaagtatgattgttgcatttgaatgtcattgttgttgactcattcccctccatcctgtaattattcaattccgcgtagactcgacgaccctatcgatctccctcggcccccctcccccaggctctccagtgtttctttggcttttcctggcttcttggttgctctctcaaaggaatgccccgtgtgtgtgtgtgtgtgtgtgtgtgtgtgtgtgtgtgtgtgtgtgtgtgtgttccttcgttattaggggactggaagagaagaaaagggctcgagtgtgtgtgtatgtggtgggggggatggaggcgagtgcgcccttgttagaggactggggtctccacgcctgaggaaaggggtcgctcctccctagggaatgttttaggcaaaaagagggggcggatgccgggaggaaagcgcgctgtctttctgggtgtgtgggtagaagaggaatcaaatgggcatgtctggatgggggacgggggtaggagctcaggaatgtgagggggtcaaagtggtcgagtgtcgggaggaaggactgcttgtgtgcggggtgggggggggtggtggagagcgggggcggggattcagcgcgtgtatgtaaaggtgcagcccgtgtgctaggcgctgggtgcgcgcgcggtgtctgctcgggtgcgcgcgcgcgccgctgcccgcctgcccgccggcccgcctgctcgcctgctggggctgctccgtgggtttgacgggcgagcgggcgcggaggagctctgtccggaatcacatagataccatcgtggaaacagcagcgcaggtcacggcgccgcgggccctgcaccagacgctgggctctagaggtgggtgaattttcagcgggggctgcacaagctgcaccgacacgcgtgctgcctcttccccgctcagctcagtagcgcgtgtgcctgcgtgtgtgtgtgtgagagacagagagagagagagagatctcgcgcgcgcgcacgcgagccgagggggcaggtagcttattatttttagtttgggtcctgttggtttggggccggttgagtggccaaagtggccgaggtggctaatcctgccctccacctcccacttgcctgcctacgacgcggtctcatgccgctgaggaccggaaaggatccgggtgtccttggcatcgctgcccgcccccccccgccccaccataccccaagcggccagggcggcggggcaagttgtacaggtctcgggtggctccggctgtcgggccgctgggctgggttgggctttatttttgcaccccactcgcagccactttccgcagacgtggatctgaggctcggggcagtggcccgcgggttggtcggagattgctagcgctcggcaagactaggaataccagaggaagagccggtgggtaactctaaaagctctgcaaagccaggcgagcgctgccagcgcgactttgcaaggggcctaaatgttgagctgatttctggcatggtgagagcaggatttttgtagctggccagggagggagaacaggcaagggggagcctgggccgccgctcgcagccacaaaaccacagggtcactctgcccgtggcaagcaggtcagtgactccctagtgccaacgtcttcgaggcggcctgatctggcctctcttcctcctcacccaccgcacgcctgggtctagagaggtccactgaaactccggcagctgccccttgtgggacgggagcgcgcggagaaatgtgtgagcggcgggactgaaggcccccgcgacatcccgcgcggtaccccgcctccgctaca

SEQ ID NO: 12475 - DNA, 6000 bp, Homo sapiens
caactcataacgacgattataagatggcccaaagtaggccttcttatgatgaataaaaaggagcaattactgctgaacatctaagatgcaccttctcctgtacatggtaatatttctgaaagagtacagatcttaagatgcataagtacattgattcatgcagggttttacccttgaaaatctgttattaaatagatggttcatctcacatcttagaactgtacaagcatggtataagttgttttataataagacacaaaaaacctcaacatgtcaatgatttgtaggaaagtgggagtgtgggtacccacataatgtctgcagctattagaaacttggaaagaaagggtcatttttcctgcagacacaagttgcctggtttgaggcaagggatgaggaagaactgcttttttgtttgtgccctgtgactgtccaacatcagcattcatttcatgaccattgcctgagcacctactgcatgccaggatccaagaatacaggggcatagtgggaagcatcatgggactccaaaactgactcctccaagcacagagagctgagagcacacgcacagctgcctgtaggcagagtggggtggtgggaagggaagggaggatggttgcagacaatattgttctccaaaatggtgcacctgcctccattcactgacttctgtgtttttacaactgttgtttactctgcctggaacctcatttcctctcttcctaccttacaatgttattttttcagctcagcggttccctcatccccaatgcttatcgtgcacaatgctgtgttttcattattcatatctgtgtgttcccagtgccttccacagtgcccggcacaaagcagacactctggaagacatatgtcagatgaatgcaactaaaggagtgaaggttacaggctacccaagatgaaaggatccattaggggaaggcaagatgaggaagagcacatttgattagttagggcagagggccccagaggaatgtgtcagaaatacagtgtggaaacagaaagggagaaagacaagcattgagtggagattcaggaatgagagcaggttgggaacaaggagaaaaaggaatcatgtgggcagctggttggtgacctttggcaagcatgggcctttttgtctgccccgtgtgcttggccacacacacttgacctgggctttgcatacacagcacactggaggagtgtggcacagccgggaaggcttcctggaaaccctggcatcaggagaggtccagaggagaagcacagggataccgtggtggtttgctggcccaggcaaaggctccccattctgccttccaacaggaaatggcccctgcttcctttagcagaaagcttgctccatgagggatgataaaccacccactcccagggctaccctgggtgacaggaggtccactggggccttgggactgtcctccctccctcttctctctcagtaactgtaatttgcctacctgagggaagactccctgaggaggtggctccttctgggctctggaaggccataggggttgctgcaagtccaagcagaactacagctactacctctgtggtcccttcagttgcctccctgcaatctcctcctccagttctccaagcccctaaatctagccccgtatttaatcaaatccctgtctagactccagacccacccacctcccagggagatctcagatgtgtatccaagttaggctaaagttgcctgaaacaaagggttctgtcaggaagcaggagattgcattctgcaggtggactaattcccagcatcttcagcaattctctaattggtggcattcaaagtgtggactttagggaacctagggtgaggaattccaggctaagaaagccttgcaggctggcacctccatgtttcctggctaaagaacttgtcaatctgacctccgagaagctctttatagtcccataggccttgcacgggactggatcccagctggccctccctccactggagcaagggtgaaactggtgttgagttcaaatctactaattccacactctctccattctactgctgcagccagggaaggagccttggtggtgtgtggagggcggttccacggccattttcttcccctatgccaggtctccccagtccaagtgtctaaattcaccaggattctcttcaccagtgccttgctcttcagaggagaggcatcctatatcaccacattgaagccaatgtgaatattgaattggacaagccaccagcttatcagaagggtggtacaaatccaagttagtccttaaaaccatggtcagatatacactgattcttctggaacactgtaacctaagcccaccccaaagtcacaagaatatgctgtctggcttatttgggggtcatactttttcaatccagagccatttctttcctttgagtgaagaatgttgggagcccctagcaagatagccctggaattttttggcaagtcaaggaaaagataaagtcaaactctgctagtggagaagatgtgggtgtcatcttctccactagtcatacttagccttgatgtatcacctttcttctgagaatgtagaaacatttaataagtggtaattaagcttcccagcactcctggtgcctgcatatgacccagggtctttctttaatgtcaggatcacttgtgggtctgtctacacaggtcattgaggctttggacctccatctagggtgggacactgagtgagggctctgaagtgagcagcaggttgtcagtagggtcttttgcacttgctggagagaggaccagatggccatctggtttctggcttttttttccccatgagagcaccagtagcataaagggttgggcttccagaatcagtccaggtaatccacctcttgaagactggggatgtgaagccttgggaaagtccagttcttcctgtatttcctcacagacaggttcatatgttcctcttggcaatttaccttgtcagagcaaaagaacacactgacaagtaatttgtgcatcagtgtcctgttgcctttgctagatagcttccagggcctggtcaactctggaagaactgctaaaattgaacttgtgggcctgcagagcagtggttcagctcccagactccctgggatctcattaaagtagcgtctgccctcaagattctggactctgaggagcctgcctggtctctatctatgaagctcttgaaagggcagtgatgcctgttattcaagtgtctgaactggcagaccatcttctcatgcctgcttggggcacggtcactggtaatgaagatggtgctgtccaatctgaccactggcaagcacctctttctaacagtatgggctgcaggttcagctagaccctgagtttcatctgtgctccttcacccttacttgctggctcgctcagggcctgttatacaagcttctctgcgccttaattcctcgtctgtatttgagtgttcattgagaacctcctctgggctacacattggactttacccagaggatgggaaaggaagatgggtgaaaaagtctgggacagggtcctggtgcttcagcagatgaaaacttgatttggattactcaaccttaaaatcagctcatataataatatccatttcccagtgggtgttgggaagcttaattaccacttatgatatgtttttacgttctcagaagaaaggtgatacatcaagactaagtatgactatcgcaattgtgattctctcaagctgcccttggggctaaacagtataaaattgtcatttgtgaaactctgctattgcaacaaaggatgactattatccataatgatagtagactaatgtttaaggcattgttgtgctcatgaaaacttaaatctgcccaaagtgaagatggtaaactaggtcacctgctatgagcttgtcctgctcttggattccaaaagcaaacaaaatccttgaggaggttgacacctgaaagagtaccagatagcaacagcattctttgtacacctagcatgtaccaggcagtgtgttatgcacacgatctcactgaatcttcctaacacgcttagaaaagaggtttttatcatttccattctgcggaggagaaaaactgagactcaaagatgttgacttgcccaaggaagatgaacctggtacttgtaagtagggcagcctggagtggaggcagaggtcaggtgtgaagtgaccacaaagtttagacaggatccaaggaggctctgaactgggttagaaaaatgaggatgatttccacgtctcctgcttgaatacccccctgcgtacgaataggcctgctgctaagggaaaaagggaacccaggaggggaaggcggttggcacgggaagtgactttggtgctaggtaacttgagtagggaatagccagcatatctggacacgctggcttgggaattggaagggaagttgggacccaaactttggagtcgttgacagatgtgacaggtgaagcctgggatgacatcgccaaaaatgcaacgtctcactcattgtcactactcccagggctcagtcgtcactggggaaaatctccagaaggtagcgcgggccaaggtgacaggtgtctgccaagatctgcccgccagactcccgggcggcgcgctccctccctgcaggccttcagcccgtcagcatccccttcctcggggccctgctcactcccagcctccatccccctgccatctcctccgccggtcgcgtgcggacacaaggatggggacctcccagcgaggagcgctctgggcggggctccggacgcatgcgcggccctcgtacggaagcccggaaggaggggcagggggcggtggctcaggtttctccgggcggcggcggcggcggcggcggcgacggcgacggcgacggcagcggggacggcagcagtagcgggagcagcagcgtggacgcggctggcgctggcgccatgaacccgctgtaaggcgcaggctgtgcagcacggggtgcgggggaggaggaggaggacgccgcggtgaagttctccgccatgaacctgaggggcctcttccaggacttcaacccgaggtgaggcggcgtcgttggcgcccccgggagtccgcgctgcgggctcgggcgcgggctggtgttcggctccggggaggcacggcgggcgagatgctgcagcccgaggacccgggcgcctgcccgagcctccctgcgggtgcaagcggtccccaggcaaaacagtcggcctcggcgcccgcccgcttcctcctcccgtgcccggtgctttcagcccctgcccggccacggccggaagggcccggccgcgagccccgtcctgccccaagggaaccccattcttttctgcttgctgtccctcattggtgtcccaacttcttcgtctcggttccatcctcttctgcgccgctgcgggccctccattctccgcgtcagggccgtctcactcgacccaacacccctacccccaccccagctgtttcctccagttcctcgcagtccttggggttttccttgggtttatgcccatccctctcttgtttgcttctttgttgaacggatacctgaaacactgttgaatccttggagtcagtgtcggggtatggcaataccttatataatgcatttctgggtgagcctgatcattttccatactcattttctcatcagtcttcactacaagtttatttgcaggaagtagatattgctgtccttcttttccagatggggaacacccagtggacagtgtggagaaaacactggctaagcactcaagcgcctgtccttgcacttgcccgactgttttgtaactgttctttaccccaggctgtgagctccctgaagctgagaccatctcctgctcatctcagtgtccccagcgcctcccacccaccgtatctggcacatagtaggcacatataaaatgtttgtggaactaaactgagcccaaagacttggattggagacgaggccatatgtaactgggtgat

SEQ ID NO: 12476 - DNA, 6000 bp, Homo sapiens
tcttaataatgttgaaaattagtggagtctgtaagactaaaggccaaaggagctacacagaagtactgcactgtaactgatacaaggtttgtttgtttgtttgtttgtttttcttatggaggcacaacgttatgggttaccaaatccaaatctgctgtatgcacatgctggtattaaactattaactaaatggttagtggatgatgggagacaggtttctcacggatggagtgatagactatagaaaaacaagaagagaaagctagaatgatccttgtggtaacggattagagttgaagacctcagtataaaattgtatttaatttaatatataggcaaatgtttacatatataaattcaacagatgtgtatatacgtggtatatacaaacatatatttcattgttctcagcagagaagcctatgactaaaaactactctgtagcaacgagcacacctagaacccagatgtcgattcccacctagaaccatttcccaatgaagcgaaccagacctctggagaaatagcttagtttagcactggggcagggcataaacaagatgaaccaggagcatcttgtagccctagaaatgaagggctgaagaatatgataaaggacatcacagtgttgcattcagcaaaacccagactatggaaaactgcagagagcgcaagatctgtttctttccaaaaacaacaaaacaatggcagggaaacaggtccagtggaggggacctacagatgacgaaagagttaagggttataacgacaaaaaaaatcactgtataataccgtgtttgggctctcattcaaataaacatacttttacaaagtgtaagtctgccagataagtgtgtaaatcagttaaacatctgataaccatttatttaatttttttagaaatgaaaactgtattgggattttagttaacataaagttcttaacttttagaaaaacatattgaagtatttagagatgaaatggaatgatgtcttagatttgctccacattattccagcagctgagatacaagtaggtgagcctcaaactggaaccagatatgacatgtattgaaggttgttgatgctgagtgacaggtgttctggtttcattatgttattctattattcaaggtttttgaggcgctccctaagaaaaagtttttatcgcaaatttcacaccgtttaaagtgaaatcctatgtgaaactgaacactttgcagaaataaaataaatacatttccaaattggtccaaaaaggaaaagaaaacttaaactatacaaacagaaatggtacaatattcatagctcaagccaccctcaaatgttccagtctaggcagtcttggaggccgattgaacaaaatgatcaggaaaaactaactaccatcttacctcaactcttccaaggcatacaaaatatagactatcgttcaattccttctcccagacttgccctcttggatacaaaaaccagatgaggaccacccccacccatggacaaaaacacatcaaggaagctctcatacataacaccacatatcctacataagttagtagcatattaaatgaacaaacaggctctgcccaaggaaagaaaatatgatttattgttacaaaaaagaaacgtatttcattgtaattccttacatacaaaatggagaagaaaaagataagtgctcatatcactgggtataggaaaagcttttgaaggaaattcaatatgagttcaaagtaaacatatttagttaacttcttttgaaagagaatttccatttactaaaatcaacagcaaacatacataaatgctaaatgttcgaggacttattattaaagagaggaaaaataattagatgtaaggtattatctccagcttttaaatcagtattgagacacaaagtcagagctataaatatcaacataaataaggagtatgaatagtggaaaaaatatataatgtttagtgataacatgatcagtcttgaaaattcaaaggagtaggcatgtggaagattcaagtgaatgggccttcagaatgaggtatacaacagattataatagcaaaatcaaaatctttgccagatgaaagcaatcagtaactagaacacttaatatacaatatgcctttttcaatagcatcaaaatccaagaattacctgaaaagaagcctagtaaaaatgcagaaggtctttatagaggcaacaatcacagtatactgacagattcaagtaaaaggagtttgaaattaatacatgaggctgggtgcgatggctcatgcctgtaatcccagtattttgggaggctgaggcgggcagatcacctgaggtcaggagttccagacacacctggccaatatgttgaaaccccatctctactaaaaatacaaaaattagctgggtatggtgccatgcacctgtaatcccagctactcagtaggctaaggtaggagaatcacttgaacttgggaggtggagattacagtgagccgagatagtgccactgcactccagcctggtagacagagggagatgccatctttctctctctctctctctctctctctctatatatatatatatatatatacacacactcacacacacatattatagaggagcatagcatattcattgatgagaaagagaacactgtaaaaatgtcaaatgtgcttcaattatgtacaattatgtacaaattatgtcttacctgtggctgccaacgtgacaatcaaatttgggctgctgttctctgcttcacaaatcaaccctggaaaattatagaagggaaaaagaaggagaaagacacaatatcagcaacaaagtctaagcaacaaaatagagaaagccctgggtgatgctgaagacggttgaactggtaattgtgtttgacacttgcagtctcggttggagggggggtggcagcagggatactggggaggtctgtaccctgcctagactgcagttgacaaaatggttacaatgaaagttttcaaatttccacttcacatcattacacagtctgaggcagctcctcaaaacatgatgctagtagccctagggcaacagcaggacaccagttaaacagggctggttaagacagtatggatcaagagttccactaataacaaccagacaccaacatagtgggtgagaaattgtgtttcaaaaaaaattatttcaacagaacgtaaagaatggaaaagaagtagaataggatataagagtgaatcatgcatactactggtaggtattctttcctagaaataaatacatatatatatacagctacctacatatatccttggaagatacgaaaagtgtatttctttttcattttttaaattttttgagacagagtgtcactctgtcgcgaggcccacgctagagttcaatggcacgatctcgcctcactgcaaactccgcctccaggtgcaagcgattctcacgcctcagcctcctgagcactaccacacccagctaatttttgtattttgtgtagagacggggtttcactatgttggccaggctggtcttgaacccctgacctcaagtgatctgcccgcctcggcctctcaaactgttgggattacaggcgtgaaccaccgtgcctgggagtaaaacatattactttgaggacaaaaggtttgccaagtgtagctctggctggagagaagcccccgtgggaaggtgtgcgtcttctcccagaggtcactacaatcgcgggagctgccactctgcagggagcacctggcctgggacctgcagccattctctgcaatgggtgcagctgggcaaatgctcagagatggcagaaacagcatctcccgcccatgacttcaacaaagtgccaggagctgggaggaggaccttcctgagtggggacagagggtccactctcccgacgtagatgggccacagaatgcagctcagcccctcctgtcagccctggaagaccctggcaatgttaccacgaccacaccccccctcccattgccacctcatgggactgggggccagagacttggtgggagagaagcagacacaatcggcagagaatatgggtgtccagattctgccaggcatgaaagtcaggaccctgaggggtgaccgagggtcccccaaccccacgcccaaccccactaccaccaacacgacgacttaagccccggggcaccactggcatccctccccctaccacccccaatccctccctttacgccacccatccaaacatcttcacgctcacccccagcccaagccaggcagaatccggttccacccctgctctcaacccagggaagcccaggtgcccagatgtgacgccactgacttgagcattagtggttagagagaagcgaggttttcggtctgaggggcggcttgagatcggtggagggaagcgggcccaggctctgtaaggaggcaaggtgacatgctgagggaggactgaggacccacttaccccagatagaggaccccaaataatcccttcatgccagtcctggaccatctggtggtggacttctcaggctgggccacccccagcccccttgctgcttaaaccactggggactctgaagtcagagctcgtgtgatcagggaagggctgcttaggagagggcagcgtccaggctctgccagacatcatgctcaggattctcaaggagggctgagggtccctaagaccccactcccgtgacccaacccccactccaatgctcactcccgtgacccaaccccctcttcattgtcattccaacccccaccccacatcccccaccccatccctcaaccctgatgcccatccgcccagccattccaccctcacccccacccccacccccacgcccactcccacccccacccaggcaggatccggttcccgccaggaaacatccgggtgcccggatgtgacgccactgacttgcgcattgtggggcagagagaagcgaggtttccattctgagggacggcgtagagttcggccgaaggaacctgacccaggctctgtgaggaggcaaggtgagaggctgagggaggactgaggaccccgccactccaaatagagagccccaaatattccagcgccgcccttgctgccagccctggcccacccgcgggaagacgtctcagcctgggctgcccccagacccctgctccaaaagccttgagagacaccaggttcttctccccaagctctggaatcagaggttgctgtgaccagggcaggactggttaggagagggcagggcacaggctctgccaggcatcaagatcagcacccaagagggagggctgtgggcccccaagactgcactccaatccccactcccaccccattcgcattcccattccccacccaacccccatctcctcagctacacctccacccccatccctactcctactccgtcacctgaccaccaccctccagccccagcaccagccccaacccttctgccacctcaccctcactgcccccaaccccaccctcatctctctcatgtgccccactcccatcgcctcccccattctggcagaatccggtttgcccctgctctcaacccagggaagccctggatggcccgatgtgaaaccactgacttgaacctcacagatctgagagaagccaggttcatttaatggttctgaggggcggcttgagatccactgaggggagtggttttaggctctgtgaggaggcaaggtgagatgctgagggaggactgaggaggcacacaccccaggtagatggccccaaaatgatccagtaccacccctgctgccagccctggaccacccggccaggacagatgtctcagctggaccaccccccgtcccgtcccactgccacttaacccacagggcaatctgtagtcatagcttatgtgaccggggcagggttggtcaggagagggcagggcccaggcatcaaggtccaggcatccgcccggcattagggtcaggaccctgggagggaactgagggttccccacccacacc

SEQ ID NO: 12477 - DNA, 6000 bp, Homo sapiens
aatgagagaacaaatccagtccatctaaaagatgaccaagagcagagcatctgcctgggcatattgacagctctcggcactcactcccaccttgtgggctctgcatggcagaggctggaaatgttccagactccagagcagctggactttgggaagcaaatttagttttgccaattggcaaattggcaaatttgccaattgccaaattgggtgtgctcacatgaagtttggatgactgaaggaagggaagccacacttctgctgtgtggggctgcgtttctgctggacatcaaagaatttctggggtctaaccttcacttcttggttgttgaggggcacttgtggcagcaatggcttcctggtcccagcttgctgatcctcaggtcatgactttggtggtgtctttttgaactcaaaggttacactggccgcctcccaatcccccatcttgtggatggtggcagaggtagcagctcccttgaggagccaggtctgcactggtgttatcaacacctagcccagagtccactcctttggcccatccaatggtcaggtaagcatctaatcccttctacagaatccctttctgttcatgatcacgggaggaatttctgcttcctaccctgaacctttgagaggtgaagccagctagacttcctgggtgatgtggggacttggagaacttttctgtctagctagaggattgtaaacacaccaatcagcgctctgtgtctagctaaaggattgtaaatgcaccaatcagcagtctgtaaaaacgcaccagttttctgtgtctagctagaggattgtaaatggaccaatcagcactctgtaaaatggaccaatcagcactctgtaaaatggactaatcagcaggacatgggaggggacaaataagggaataaaagctggcccccccccgccccccacaagcaacggcaacctgcttgggtcctcttccatgctgtggaagctttgttctttcactcttcacaatacatcttgctgctgctcacactttgggtctgtgccacctttaagagctgtaacactcaccgcgaaggtccgcggcttcattcttgaagtcagcgagaccaagaacccactggaaggaaccaactccagacacaccttcactgatacaatgtgggggtgaggccaggtgcagtgactcactcctgtaatcctagcactttgtgaggccaaggcagtggatcaccacttgagcccaggagttcaagaccagtctggacaacatagtgagacctcacctctaccaaaaaagaaaaaaaaattaatcaagtgtggtggtggcacatctgttgtcccagtacttgggaggctgtggtgggaggatcacttgagcccaggaggtcgaggttgcagtgagccatgatcacaccactgcactccagcctagggaacagagtgagaccctgtctcaaagtaataacaacactaataaaaaataataaagtggaggtgggggagagagatggggaaagcaggacaaatagaaagcaaatactcacctggcgtgactacatccagagatagcagcagtcatcaccgtgtgaccagctgacctgcacagttcaaagacaaaggcaggttcaacatcaatctaccacttgactgaacaatccactcctaagcggttaccttagagaaatgaagacacacatttacacaagcttgcatataaatgtttagagctgctccatcataatcacacaaagctggaaactacccaagtgtccttcagtgagtgaatggctgaacaaaccctgatccaaccaaacaatggaatactactcggcaatcaaaaggaaatatactgctctctctcgcccgcatgctctctctctctctctctcacacacacacacaaacacacacaccaacatggatgaagctcaaaaagtatgctgcgtgagtgtgaaagaagccagacaaaagaatatatacggtatgattccatttataataaaatttagaaaagacagaaatcagatcagtggtggccaagggcagggggtggtgggagtggttggctgcacacaacattcaccaaaactccttgaactgtaaacctcaaaaggatgaattttactgtatgtaaattatactccaataaagttgatttttttttttttttttttgagacagggtctcactctgtcacccaggctggagtgtagtggtgtgatcatggctcactgtagcctcaacctcttgggctccagcgatcctcccacctcagcctcctgagtagttgggactacagacatgcaccaccatgcctaattttaaaattttttttgtagagacgtggtctcgctgtgttgcccaggcaggtctcaaagctgatttttaaaaagacaagaattgttagacagaatcaaaccaaaccaaaacccaactatgtgctgtttccaagcgctacacctgagatatgaagacacagaaagattgaaaggagaacagagaaagacacgtctggctgagcccaccccgcctgcctgctggcacttccttactgccccactgtcgtctgtggcttctgcgtcttctgcatgctcatcacagggtcagagtctggggcttcccttgtccagtccactgtgtctatgagggctgggtcacagggagcagggctgtgagaagcacttgacgttgaagggaaagagacagtcatctgtctacttggtgtccccctaacctccaacagcaagcacatggcagtgggggggtggcttgcctcttgttcagggccagtccctcctgcttctcctgggacttgctctgcccttggtcttctgtcactcttgctcttgctcccattggctcctccacttcattacatggaagtgagaatgggcatcgtggtcaagcagaagggaattcaagtccgagttctgccatttaccttctgggctatcttgggtgggtcatttgacccctctgaaccttggtttcctcatctgtgaaatgggggcactgatagtgccaatttcttcctggttgcatgactgcccctctctggaccttgggtacctcactgggagagtgaggataataacagcaccatcatctggggtgtgtgtgtggatgcaatgagccagtggagagaaagagaccttcctaactgtgcttgctggacccagccttgagctctgtgggctttggttttctcatctgtaacgtggggcgaatgcttcaacagacctccccaggttggtgtgcaatttaaatgtgcaggaaatgtaacgatggcaggtccatggctgtgctcaggaaatgtgatgtcgtgtaatcctagtaatgaattttttgttaccataaatggacccatcactacacattagcaggtgcgtataaacgggctctattccctgcttacttcaccatcctgatgggcatcaaaccctagattaggtaaaggatttgcagaagttggggcttggaggaaaggctgggaacgtagggagtgagtggaggcagcaactggaaaggagagaggcctatcagagttcagatcagcaaaggcaggaagctgaccacagctcagtgcctcatggaaagtacgccctcttggcccagctcatgagcctgctggcctcgtgacccaggcgggctcagtttcctctgctgtcacctgaagatgccctgcaagtgcccccactctggaagcagtctccctagccgtccgtcttcactcaggtgcctagtcttgtccattctcctcctaaaggctgggcaaacatggcatccagaccctctctgagcacagatgggtccaccccaagcttcccattccaggggaactgaagctggcactatgggggtggggcatccaagccaggatgccagggctgctcccatgtgggccctccagggccccacaccacttggggagtcttgtgagactgagtcgagggcccctggaatgcttcactgggcaacaggcatgcccataaaaataccgtggccgccagatctgcaatctgccatcggggccctaggccttcctagccctgaggctgcagccagctcgccggctccggaattcttaccccctccattttgcttcctcgcctgtgaggtcatggccttgagcctaggagggggcactggggaggagctccttccttctcgatcctgtgcagggctgcgggggagagtgggagagagtggagtcggcgggaaaggtcgaatggggccaatcccgaggacaaagaaataagacaccagagagctggaggaaaatctgggagttgggggtggcagttcgagggataccctctcccagaccctgtctcccctgggctcgcctcctaccctgccgcccacctgggctctggggtgcgcaggagccggtgctccgcggcgcctccccaacacgctgaggacgaagcccccgcacccctcccaacaggaccctgactgggccctcaggatcggggggcattcgggagaggtcccgggagtcctgccctgtgtgtgtgtgttgggggggcgttgcgtgcaggtgcccatcgctggccggcgccgtcgagggccaggccgaggctaagggagcatccccttccttgccggactcctctctccaccgcccggccccaggcctctgggagcactctcgccccgcgattcccgctccgagctttcacagcgggctcccttgcgctggggctgaggacactctccggccggagactcccggtctgcggggaagggggtctggcgggacccgtcggctggggtcccgctgagctcccggagtgggctgcccgggggcccccagcccaagccgcgctcggctggcaccaggggctagggtgcggcggggcggggcggggcggggcgggcggccggggaggtgatctcactcctccctccctctcctccccggcgctcccctcccccgcccctgcgcgcacgcccgccccgccccgccacagccgctgctgccgcagcatcggcatcgcagacgcgctcgggcggcgggtccgaggccggcgtgcgcggaggctgggcgggcagcccgagcggtggccgcagcgcaggtaaggcgggctggcctccccgtgcgacccgggccgcggccgcgatcccccggcgacaccacaccgctctgcccggggtgcacggaccagggagtcccggcccggtccggcccgcggtaaccggcgttgctgccggagccccacccatgccgggcgtcgggctccgggcaccgcgggctgtaagcggggcgggggagggatgccgggtgcccgagcccgacaggtgaggggtaacctgcggggccccagatgctggcctgggcgggagaacagggcggggggcgtcaggcagggtctgtgtgggcaggcgggggctgaagttggcgggtccccgtgcgtgtgtgcgtgtctgagaaaggaagccagatcgggtcgagcgctcccccacaggccgccgtggggtgtggccctgggcgtggctgcccctcatccccagccgagagctcagtttggttgaaaatcccggctgacagcgtggtgaggggtagatcgggataagccgcccctgcaatggggggaggggagtgaacgggactgggcgctgcctgcccctccgccccaaggttgggggggctttgttctcctccttcttctttccaaatcccagcctgggctcctccgggctcacccgaaaacctgccgcagagccaggggctcctccccggaggcgtagggcgcctctggagcccgtttccacaggctctgtggccagtcagggctggagtgggtgaggtcggttcgggcacccactgctgtgcctcccgtgcatgggtgtccatcaggtagggtccatcaggtaggggtgagggaaggtgggcctcactggctcaggcggtccctgcgcactgcaggtcttttgcccactgccacatcttcctatctctgtgcggttatgggaggggtcagcgattcctattccctccattccagg

SEQ ID NO: 12478 - DNA, 6000 bp, Homo sapiens
ttctgataaccatagcataggacaagggaaaataaaaaaagaaaaaaaagaaaaaaaaacgacaaatctgtctgctggtcacttcttctgtccaagcagattcgtggtcttttcctcgcttctttcaagggctttcctgtgccaggtgaaggaggctccaggcagcacccaggttttgcactcttgtttctcccgtgcttgtgaaagaggtcccaaggttctgggtgcaggagcgctcccttgacctgctgaagtccggaacgtagtcggcacagcctggtcgccttccacctctgggagctggagtccactggggtggcctgactcccccagtccccttcccgtgacctggtcagggtgagcccatgtggagtcagcctcgcaggcctccctgccagtagggtccgagtgtgtttcatccttcccactctgtcgagcctgggggctggagcggagacgggaggcctggcctgtctcggaacctgtgagctgcaccaggtagaacgccagggaccccagaatcatgtgcgtcagtccaaggggtcccctccaggagtagtgaagactccagaaatgtccctttcttctcccccatcctacgagtaattgcatttgcttttgtaattcttaatgagcaatatctgctagagagtttagctgtaacagttctttttgatcatctttttttaataattagaaacaccaaaaaaatccagaaacttgttcttccaaagcagagagcattataatcaccagggccaaaagcttccctccctgctgtcattgcttcttctgaggcctgaatccaaaagaaaaacagccataggccctttcagtggccgggctacccgtgagcccttcggaggaccagggctggggcagcctctgggcccacatccggggccagctccggcgtgtgttcagtgttagcagtgggtcatgatgctctttcccacccagcctgggataggggcagaggaggcgaggaggccgttgccgctgatgtttggccgtgaacaggtgggtgtctgcgtgcgtccacgtgcgtgttttctgactgacatgaaatcgacgcccgagttagcctcacccggtgacctctagccctgcccggatggagcggggcccacccggttcagtgtttctggggagctggacagtggagtgcaaaaggcttgcagaacttgaagcctgctccttcccttgctaccacggcctcctttccgtttgatttgtcactgcttcaatcaataacagccgctccagagtcagtagtcaatgaatatatgaccaaatatcaccaggactgttactcaatgtgtgccgagcccttgcccatgctgggctcccgtgtatctggacactgtaacgtgtgctgtgtttgctccccttccccttccttctttgccctttacttgtctttctggggtttttctgtttgggtttggtttggtttttatttctccttttgtgttccaaacatgaggttctctctactggtcctcttaactgtggtgttgaggcttatatttgtgtaatttttggtgggtgaaaggaattttgctaagtaaatctcttctgtgtttgaactgaagtctgtattgtaactatgtttaaagtaattgttccagagacaaatatttctagacactttttctttacaaacaaaagcattcggagggagggggatggtgactgagatgagaggggagagctgaacagatgacccctgcccagatcagccagaagccacccaaagcagtggagcccaggagtcccactccaagccagcaagccgaatagctgatgtgttgccactttccaagtcactgcaaaaccaggttttgttccgcccagtggattcttgttttgcttcccctccccccgagattattaccaccatcccgtgcttttaaggaaaggcaagattgatgtttccttgaggggagccaggaggggatgtgtgtgtgcagagctgaagagctggggagaatggggctgggcccacccaagcaggaggctgggacgctctgctgtgggcacaggtcaggctaatgttggcagatgcagctcttcctggacaggccaggtggtgggcattctctctccaaggtgtgccccgtgggcattactgtttaagacacttccgtcacatcccaccccatcctccagggctcaacactgtgacatctctattccccaccctccccttcccagggcaataaaatgaccatggagggggcttgcactctcttggctgtcacccgatcgccagcaaaacttagatgtgagaaaaccccttcccattccatggcgaaaacatctccttagaaaagccattaccctcattaggcatggttttgggctcccaaaacacctgacagcccctccctcctctgagaggcggagagtgctgactgtagtgaccattgcatgccgggtgcagcatctggaagagctaggcagggtgtctgccccctcctgagttgaagtcatgctcccctgtgccagcccagaggccgagagctatggacagcattgccagtaacacaggccaccctgtgcagaagggagctggctccagcctggaaacctgtctgaggttgggagaggtgcacttggggcacagggagaggccgggacacacttagctggagatgtctctaaaagccctgtatcgtattcaccttcagtttttgtgttttgggacaattactttagaaaataagtaggtcgttttaaaaacaaaaattattgattgcttttttgtagtgttcagaaaaaaggttctttgtgtatagccaaatgactgaaagcactgatatatttaaaaacaaaaggcaatttattaaggaaatttgtaccatttcagtaaacctgtctgaatgtacctgtatacgtttcaaaaacaccccccccccactgaatccctgtaacctatttattatataaagagtttgccttataaatttacataaaaatgtccgtttgtgtcttttgttgtaaaaatcaagtgattttttcataaggttcttttactattggaaaagatgggcagcacgcagttttattttatttttgtaagttttttaatacatgtgaaagcaaagaatactcagcatgcctttctaagtgacgcgtttgcaccttttgttgggaagtactgtatcctgtgctgttagcattctcgataaatctctctgtgaaagtgactcaaggtctgggctttcattataagacagaagtccccctccagctcacatgacagcatggtgctgcgtttcctcattggatctggctgtccctggacacaggtagctgccttcaggcctgccacgagcggccaagggaagcctcctccatatgctggcctcgctggcccctcagcttcttccaagccagtgctctccaggcacactgctccagcgtgtgacgggaagggcctggcatgagtcagcctgcagcacaacctccctgctccagacccgtatggtaggggcaccccctaggtctggatgtgctgtggtgcttttggacacccccacccccgcaggctgtggctcctcctgtgtctcattctggccaggaccctcacgtgccctctgttgactgctaacgtggttctctgaccaggcaagggcaggctgaggggtttgcccaaagggggcccccttgttactggcttccttggctctcaggagcagcctcaccaggttggtaaggggctggaggagacaactgctcaaaggagtccagcttcacatgcacatgctagaaggtaccctcggaaggcctggccttcaaaggtagatcccagggttgaaaagtcaacttgtatgcattgagcatctcgtatgccagccctgttccgtgagctgatgggcctttgtgtgtaagtaggaccaagtgcccccgtggaggttagcatgggtgtgcagtcatttcagatacttgagttggtacatctcagtaaagtctgtcccgtgagaagccatgggtttcatggtatggttggcatcttccttgggagtggccacagtggtggtggcttcaggaaagagactccaacaggggccagctgtgggccttgggcacttctcgtttctaggaaaagtcctaagtctgtagggctaggggtggggaaccccttcgctgtcaggatcaagagggcaaggggaactgtcgctggaggagacatccagctggagaaacaaaagagtaagtctgcgttgctgcttgtggggtcttccccatctcagggcggggaccgggggtggcggtccagacaagtaatcaaggacgatgcccaggaggggacaggtacggggtggcaggagctctgccggcgggctcaggaagccttcaccacagctgcctgagctcacccttgccaaatgagggctggggcagcagcaacgcatacactcacggctgtggcgggcagcgttctcggcatatttcaggacacctaaggagactgaatggctcaaggctgctgccgtgtgcagggggctagacgtggggcgggcaggcagggctcctggtaacagccctgcaggccgcagtggagagcagggttccggcagggccgcccaggagctttcggaaggcccggccccggcccctttccgagcagcccgggcctccgccctgccctctgtccccaacgccgggagccgccgttcgtcctccagagccccgcccgggcgagcccgggaggccgatcgccgctcgcggaacccgccgggacccgggccctccccggcgcggggcgcccccgtgtgacccagcgcgcggccgcggcgcgcaagatggcggcgggcccgggcaccgccccttccgccccgccgggcgtcgcacgaggccggctcgaaggggaagtgagtcagtgtccgcggacccggccggcccaggcccgcgcccgccgcggccctgagaggccccggcaggtcccggcccggcggcggcagccatggccggggggccgggcccgggggagcccgcagcccccggcgcccagcacttcttgtacgaggtgccgccctgggtcatgtgccgcttctacaaagtgatggacgccctggagcccgccgactggtgccagttcggtgggtggcggcgggctgccggggggcgggaggcgcgcgggctcctggcgccgacgcctgacgccccccgccccgcagccgccctgatcgtgcgcgaccagaccgagctgcggctgtgcgagcgctccgggcagcgcacggccagcgtcctgtggccctggatcaaccgcaacgcccgtgtggccgacctcgtgcacatcctcacgcacctgcagctgctccgtgcgcgggacatcatcacagcctgtgagcgcgggactccgggcaccccacggctgggaggccggcgggccccacggggctcccccacccgggcctcaaccttcctttccttccttggcgtcccagggcaccctcccgccccgcttccgtccccaggcaccactgccccgaggcccagcagcatccctgcacccgccgaggccgaggcctggagcccccggaagttgccatcctcagcctccaccttcctctccccaggtaagagggcccggttgttaggctcggtggacccaaagaagagcccaccttgaccacggccacggctgtagaccctgctgctggtctctgcctgcctctcactggtgtctttatgaagcttttccaggctcccagacccattcagggcctgagctcggcctggtcccaagccctgcttccctgtggcctccaccgccatctccagccccttcttctaccaaggtaggtgtcccctgccccccagggaagattcgagacaaggaggaaggaattcagcctttgatgtagcgcagagccccagtcagccaagctgggtcagctgggaggcagctgtggtggggagagcctggagccttgggcagaagggaagagacagggaccccacctgatccaggctctcttcccacagcca

SEQ ID NO: 12479 - DNA, 6000 bp, Homo sapiens
gccaacattgcgccactgccctccagcctgggcgacagagcaagactccgtctcaagacaaaaaaaaaaaaaaaaaatactaaaagtagtagattaccatctatctaccattcaatccagaaattccactactggctatctacccaaaggaaaaaaagtcattatatgaaaaaggtacatgcacacacatgtttataggcagcacaattcacaattgcaaagataaggaaccaacctaagtgtccatcaaccaatgagtggataaagaaggtggtgtatatacaacatggaatactgctcagccataaaaaacaatgtattttgcagcaacttgggtggagctggaggtcattattttaagcgaagtaactcaggaatagaaaaccaaatactgtatgttttcacttgtaagtggagctaagttttggagtgatataacggactttggggaggagaatgaagggggaaggtaggaaggaggtgagggataaaagactacatattggggacaatgtacactgcttgggtgatgggtacactaaaatctcagaattcaccaatatagaatttattcacataagcaaaaacaacttatacccctaacactattaaaattaaaaaaagaaaatgagaggctgggtgcggtggctcatgcctgtaatcccagcactttgggaagccgaggtgggcggatcacctgaggtcgggagtttgagaccagcctgaccaacatggagaaacaccgtctctactaaaaacacaaaattagctgggcgtggaggtgcatgcgtgtaatcccagctacttgggaggccgaggcaggagaattgcttgaacctgggaggcagaggttgtggtaagcctagattgtgccactgcactccagcctgggcaacaaaagcaaaactccgtctcaaaaaaaaaaaaaaaaaaaaaagaaagaaaaagaaaatgaaaaatcccttagagacaaatgaaaacagaagtacaaaataccaaaacctatgtgatgtagcaaaagcagtgccaagtgggacatttctagctgtaaacacattttttaaaacccctcacatctggccgggtgcggtggctcacacttgtaatcccagcactttgggagccgaagcgggcagatcacttgaggccaggggtctgaaaccaacctggccaacaaggagaaaccccatctctagcctgggcgacacagcaagactctgtctcaaaaaataataataaataaataacccttcaaatcaacaacctaactttacaacgtaaggactaaacccaaagctagcaggagaaaggaaataaaaaagatcaaagcacaaataaaacagagactaagaaaatagaaaaaatttaatgaaaccaatttttttttctttttgagacagggtctcagtttgtcacccaggctggagtgtagggcacaaacatggctcactgcagcctcaagcaatccttccgcctcagccttccgagtagctgagactacaggtgctcgccatgtctagctaattgttgtatttttggcagagacggggtttccccatgttgcccaggcttgtcctgaactcttgagctcaagtgatccagctgcctcggcctcctaaagtgctgaggttacaggcgtgagccacctcccctagccaaagctggttctttataaaaggtcaacaaaactagctattaatagatgggcagggcatggtggtgtgcacctgtagttccagctactcaagaggctgagaggaaggagagtcgcttgagcccacgagagttcgaggctgcagtgaactatgattgcaccactgcactccagcctgggtgaaagagcaagaccctgcttaaaaaaaaaaagtacaatcaagttaaagtggagtcattaataccgcttctacagaaataaaaagagtgacagtgtactatgaataactgcatgccaacaaatggactaacctacaagaaatggataaattcctagaaacagaaagcctcacaaaacttaatcaggacaagaaaatctgaatagacctacaactaactagtaaggagactaaagcagtaataaaaaaaacgcccaataaataaaagcctcattcgtaattactgccaaacatttaaagaaaaattaacaacagtcttcttcaaactcctcaaaaaaaaatttttttttctctacaaggtctcgcttcctctgttccccaggccgtagtggcacaatcttagttcactgcaaactctgtcccccgcgtagctgggactacaggcacgtgccaccacgcccagctaatttttgtaacattctgcacaggggattgccatcttgcccaggctgatctcgaactttctaggctcacacgatccgcctgctttggcctctcaaagtcctgggattacaggttggagccaccacgcccgacctctccaaaaaatttaaggtggaacactttgaaactcatcctatgaagccagcattacacttttgataccaaaagcaaatactacaacaaaactatagaccaggccaggcgcggtggctcacgcctgtaatcccagcactttgggaggccgaggcgggcggatcacgaggtcaggagatcgagaccatcctggctaacacggggaaaccccgtctccactaaaaaacagaaaaaattagccaggcgtggtggcgggcgcctgcagtcccagctactccggaggctgaggcaggagaatggcgtgaacccaggaggcggagcttgtagtgagccaaaatcgtgccactgcactccagcctgggcgacagtgatacttcgtctcaaaacaaaaaaagaaaaaaaaaacaaaaaaaacctgtagaccaatatcccttatactgatgcaaaaaccatcaaccgcatactagcaaattcaacagctcatttttgttccaattcgtactcaattcccggtttcttttactttatttttttagagacagggtctcactgtttgccaagctgaatgcgaactcctgggctcaagcgatcctccctcctcaggccccacgtactgagactgcaggcgtgagccaccgccctcagctgggtttaacttttttttctttgaggcacggtctcgctcttgcccaggctggagtgcggtggcgcaatctcagttcactgtaacctgagcctctcagcctcccgcgtagctgggactacaggcacgtgccaccacgcccagctaatttttgtaacattttgtacagaggttcgccatcttgcccaggctgatctcgaactagtttctaggctcacacgatccgtctgcctcggcctcccaaagtgcttgggattacaggtggcagccactacacccagccactccaaaaaatttaagatggaacactttgaaacatcctatgaagccagcattacactttgataccaaaaccaaatactacaatacaactagagaccaatatccctcaaactgatgcaaaaaccatcaactgcataccagcaaacccaacagcacaagcaagcctcccgaatagctgggagtgcaggtgtgcgcccccatgcccgactcattttttatttttattttttggtaagagacggggtttcgccatgttgcccaggctggaattttaattgctttttatcctcacatcctgggttagagtcgctcattcaccctcgggatccagtacaactgcttaccagggaagccctgctccccgctaaaatgaaaaccacagctagcccaatctgatcccagtgacattctcccgccacctcagtccagtctggatcctttgtctcccaactggagatcttggcgacctccagaactttggccgtgggtaaattgaggggcgggctccagaacccgcggctgaccaaccaaccgaccgacccttgggttggcgggaatagtgcctcgctgccatctagggtgctcgaccgggccccaacagcccaagacagggcattacgacacagcccattgtgcctctgaaggctctcccttcaccacacggcctcatggccaccaggcctgaagccaccgggcccgtggccctgcatgacccagacttcaatgaggagaacttacccggagctcgtggagcatgtggccctgatggaatggattcgcaagcggctggccatatcttgcaacacctgcaaggtgcccctgtcaggtctggcctcctccgggaactcagccctcgcctcagcatccgccattagtccaacccctttggagtctgaagacccactcctacgtctccggcgtctgaagagcgaatggcgcctgcgagctgcccagtgcgtttatgtgatgtcggtgcagctccctccgcatgcctcgtgccactccctccacctgccgctccctccgccggccgctccctccgcaagcaagtcaagggatctggaatgtttgtgacttgcatgtgcacagttattgaaaatagtcccattctcatcttctctcctgcaatctcaaaagggctccctccgcgcgggtgcagggtcttctttctctgcacaaaaagttccggcactagctgtgtggtgccgcacgtgtcagggggtggtgccgcacgtgtcagggggtggtgccgcacgtgtcagggggtggtgccgcacgtgtcagggggtggtgccgcacgtgtcagggggtggtgctgcacgtgggacgtgcagctgcaaccgtaaaggtgggggagggagggagctgctgtggcgcaattttttgtttcgtgataaatggtcacccctcccccacaacagcccaggctatggcgggcagggtgggggtggggcagtgctcagggttctgagacggttggcgcctgcgccagcctcctttccttttttaaaacattctatgaggcaagccccgtgtgattgttgaggaggagttagcccattgccagcctgtgacgtgactgactcgaatgaaccctggtaactagggaatgtgctcgccctgtgtctgaaatgccccatgtccggtggtgccagcactagcccccatgtcggtctcagagaaccttctccccacctctgaggtgacctaccgacccagaactcgcatggctcccaacggcgccagctccacagcgccgtgcccaagtccagacattccggatcccaagtgctgtctcttggttcaaaaatgccgaatttctacgtgagctcaagtcaggccgcctggtcgcgccacaggctgaatgcccttgggttcccatgttctgctgggttaaagggaatgtgtgtttacattttttttttttttgagacggagtctcgccctgtcgcccaagctggagtgcagtggctcgaacttagctcgttgcaacctctgcctcctggcttcaagcgattctcctgcctcagcctcctgaatagctgggattacaggcatccgccaccacacctggctaattttttgtatttttagtagagacgggttttcaccatgttggccaggttggtctcgaactcctgacctcaggtgatctgcccacctcggcctcccaaagtgttgggattacaggtgtgagccaccatgccaggcggtggtgggcacctgtaatcccagctaatgggaatctgaggcaggagaatcacttgaatccgggaagcgaggttgcagtgagctgagatggcgccactgtactccagcctgggcgacagagcaagactccgtctaaaaaaaaaaaaaaagtggctgggcacagtggcacacgctcctgtaatcccagcactttgggaggccaaggtgggtggatcacctgaggtcaggagttcctgaccagcctaacatggagacaccccgtttctactaaatacaaaaaaattagctgggtgtagtggcacatacctgtactcccagctacttgggaggctgagacaggagaatcgcttgtacctgggaggtcgaggttgcggtgagccaagatcgagccattgcactccagcctgggcaacaagagcaaaactctgtctcaag

SEQ ID NO: 12480 - DNA, 6000 bp, Homo sapiens
actgatgccacctttgttattaatccttgtagccaagaataattacctgaaaacaattatgtaattctcattttttctttaaaaacttttctcagccgggcacagtggttcacacctgtaatcccagcactttgggaggctgaggaaggcggatcacctgaggtcgggagttcaagaccagtctgaccaacatagtgaaaccccgtctctactaaaaatacaaaatcagccgggcgtggtggcgggtgcccgtaatcccagctactcaggaggctgaggcaggagaatcgcctgaatccaggaggcggagggtgcagtgagctgagatcgcgccattgcactccagcctgggcaacaagagccaaactccatctcaaaaacaaacaaacagacaaacaaacaaacaaacaaacaaacaaaaaacacctttgtcagcctgctgcaatggctcatgtttgtaatcccagcactttggaaggccgagacaggagaattgcttaagcccaggagtttgggaccagtgtaaggcaacatggttaaaccccatctctacaaaaaatgcaaaaaaattagccaggcatggtggcacatgcctgtagtcccagctactcgagggggctgaagtggaagggtcacccgagtccaggaggtgaaggctgcagttagccagtatcacaccactgcactccaccctgggcaacagagtgagaccctaccttaaaaaacaacaacaacaaaaccctttttctcccttcgcctccctgaatatacacagtttactatggcacacacattcccattgcagtacccattccaaataaataccattttcttttagtctccctctctgtgacttaggatggcattcccaatacttcagtacaagttcctggggactaaccctcactggtccagactggattatggcatgatgtctgcccactctgagtggctggctggttatacctggttatgtgcccactccagggcccagcgttggggtcatccacatgcaaaccatgtgtactgagagtggaggagggatggttcccccagagaaaactaaggtgctgcaacctgatgctgggcaggcaaaagtgacaggtgtcattacacttccctgtggatactcaatgtacctcatacttacactagcatatgccttccatgcctttttaaatttttttaaaaatctgtttatgtagaaatagggtcttcccatgatgcccgggctggtctcaaactcctgggctcaagcaatcttccctcctcagcctcccaaaatgctgggattacaggtatgagccacctcacctggcctctttatttatcaaatactgtttctgggccaggcacggtggcttatgcctgtaatcccagcactttgggaggtcgaggtgggtggatcacctgaggtcaggagtttgagaccagcctggccaacatggtgaaaccccacctctactaaaaatacaaaacttagctgggtgtggtggtacatacctgtaatcccagctacttgggaggctgaggtaggagaatcacttgaacccgggaggcagaggttgcagtgagccaagactgtgccactgcactccagcccgggcgatagagtgagactctgtctcaaaaaaaaaaaaaaaaaaaaaaaaaatcctgtttctagaggcccctgcctcaagagcagaggtaggcatgcctctcagggtcaccactgtgaccttattacataatacctggcaggcctcccatctgaaatgtgttgatgttgtttcagctgttgctatcatttgttccatctgtttgttcggtccagatgacttctctttgggcactagatatcctcacctcttcctccttctcttctagggtaaattattattattattactattattattattattattttgagtcaaggtctcactttgttgcccaggctggagtgcagtggtgccatctcagctcactgcagcctccatctcccggggttcaagcgaccctcccacgtcagccttccgagtagctgggagtacaggcgcatgccaccacgccaggctaatttttgtattttttgtagagatggggttttgccatgttgcccaggctggtcttgaactcctgagctcaagtgatccacccgcctcggtctcccaaagtgctgagataacaggcgtgagccacccgcaccctggggtaaattactgattccctaaaccaactaggaacattgtcttgcctttaattttgctattcccttttcctgcagacaaagccaccaaattcttcatgtcagatatcccacctgcccacttgggcttttcagggaaggctgaagtgattgacaataacagacagcagtcttctgactgcatttgctctccttgacacctggcaaaaacaagaattggtggctgccaagtggctagttccaggtgaattttactgacagtgtcaggcaggcccaacagcacaggcaagtggaatacaaaaattcccttttccttcaagaaggacacaactttttgggttttccttctttggcttttccagctgactcctttctccctctggccaattttaccccatcctcagacaatccctaccctcactgccgttttccaaattgcaatcttcagccccagcatgtgcctagtccagccctttcacctgtcctagtctaaatactgtctacttccatcaggacccttcaaccccatttgaaagggacagaacaacctttccagaacaccaagtacaaacacacaaatcgcttctgccttagtgatccctggaggctaaacaatggctgagagctatggctgcaaatgtttttgatcatccacacatcaaacccttgtaacaaccctcagcatatgtatatttgctcatattatacgcacatactaacttgaactttgtaaaacacacacaaaaatcaatttttttttttttgagatgggagtctcactctgttgcccaggctggaggagagtggcgcgatctcggctcactgcaacctccccccacccggggttcaagagattgtcctgcctcagcctcccaaatagctgggactacaggcgcccaccaccacgcccggctaatttgtttgtatttttagtagagacggggtctcaccgtgttagccaggatggtctcaatctcctgacctcgtgatccgcccgcctcggcctcccaaagtgctaggattacaggcattagccaccgcacccggccaaaaaaactttttaagctgggcatggtggcatgctcctgtagtcccagctacttgggatactgaggtgggaagatcgcttgagcccaggggttcgaggctgcagtgattatgatggcactactgcattccagcctgggtaacagagcgagaccctgtctctaaataaataaataaagttttaaaataaatttaaatgtcaataaatttattaaaagtatattatttggctgggcacggtggctcacacctgtaatcccagcacttagggaggctgaggcgggtggatcgtttgaggtcacgaatttgagaccagcctggccaacatggcaaaccctgtctctactaaaaaatataaaaattagccgggtggtagtggcgcacgcctgtaatcccagctactcaggaggctgaggcaggagaatcgcttgaatccgggaggcggaggttgcagtcagccgagcttgtgccactgcactccagcctaggcgacagagcgagaccctgtctcaaaaataaataaataagtaataaaaacaaatgtatatcattcatttgaaacattagagacgtgggtggttttgttctgttctgtttccacatctgcaaccatgcgtcttgtgcacctacccggggcaaatacctccgactccatcacagtcttgacaagaggttgaagtgtgcagattgattccagttgcaccaataagctttgggaacatatgatcccccccccccaactctgtactgtcttctgtactgccttccgaccttctttctacacattcccatcatatttttccccaactttctgccttctttctcttcctttaccacaaagcctctgcaccttgctagtggcgccaaagtttggaaaagcagacaagtccacttaatgttccacagtatagaaactggcctacgccgggcgcagtggctcacgcctgtaatcccagaactttgcgaggccgaggcgggtggctcacgaggtcaggagttcgagacctacctggccaacatggtgaaaccccgtctctactaaaaatacaaaaattagccgggcgcgggggcggacgcctgtaatcttagctacgcgggaggcttagagaggagaatggattgaacccgggaggcggaggttgcagggaggcggaggttgcagtgagccgagatcgcgccactgcactccgggctgggtgacagagcaagactcagtctcagaaaataaatacataaaatagaaataggcgctcggtcaatacttgaacgaaaggaggaactccgcacagagcctggcgtccaggtcggtcaaactcaaccctggggccccagggctgggcaccttgagcggcaacgtggccaaaaccctaaccccgggcacccagccctgctaacgtctaaccctctgtcccattgcctttagaggtcgcagcgtaatcgggaatgcctggggctccctcccagagcgggtcgccccagcgatcacaacagcttcagatgcgctgccaagcgattggtccaggcagcgccaagcgccgaccagctcacccgcaccgcgcccgcgccggcgcgtcactcccagagacgtcacaaccggtcggagcccagcgagcagccggagttgagctggacgctgaggggggggcggggccctgacgcgcggggcggggaagggaggggcttcggtggggcggggccctgacaggccgagctcgcgggcgactgcctgccaggcagacgctgcagctaagctgcgcggtggctgtggcaggtgagagcctccggaagggaggcggcctctggccccgaccctgctccgcgatcgcccactcgggcgcccggccgggcctggcagggaagggccgccgccgccgccgcgcgtttgcgaggcctggcggggccgcggggcccaggaatggcgtaaggggcccccccagactccgagacggcccgagcgggtcgccggctgtgggacggcggcgtgcccttcctttcctccctcccaggttcgcgcccgagctctgctagccacccgtccgacaacttccggactcccaggtagggaggagcccctgttagcactgccagttaccccgaacacttggccgttttggaagggccgggactccctcccctgccttgtgggtgcatctgctcaaactctgtcggcccctcaagcagaaatggtgtgggatctgggccaaacccctcttggagtgactcagagccgccagccctactggagggatggggcatggggtggatggcccctagcctttcccttctgagctggtttgtatcaccccggtggcttcagtcctggtgccttcatcttagctcctgtactttgcctctcccaccccactggttttcctgcctccctcttcagaggtaagacacatggctggaccaaggcctccagggtaagtgacccgaacttcaagccagcagaggccatgtcatcctaagctagggataggggaggctcgccgggatgagcctttggcttaacctaacctctgctccctacttctgcctcaccccagtctcagatgacgggaggccaatgccaaagacggataggatctatagaggcagtcctcttctaggactgggacacaacagtgcatgaggcaactgacaggggtgatgtaaagctgttgtgtctccatcctggttgccccagttctagcaggtgatgtgacactacggtggtcgctgcccagattgagaagtggaagggggtgttgctggccgctaga

SEQ ID NO: 12481 - DNA, 6000 bp, Homo sapiens; identical to SEQ ID NO: 1460

SEQ ID NO: 12482 - DNA, 6000 bp, Homo sapiens
ctagctgcacctgtgaattgctcactttaaatggatgaatttcacggtatgcaactgttatctcaatttttttaaaagtacttgtttcataggattgtcataagactaaatgaaagtatgtaaaatacacagtgactgtattcaatgaacagaagaaaaaaaaaagtgcacacccttgccctggcctcatggtaggtagagaatactttctcactccttgactgtgggcttagtcatgtgacttcctttggccatgactgtattcaagaatgtgttaatatattttaaccagcattttcagttgttttcagcaacagatcatccaggtacctggtctgccatggtgccagaaattgccttttttttgcattatttcaatctggatttcaaattaccagtttggttgaataacttgccatattttttttctgtacttttatttgtattcctttctatttctcattttttctattgcctgttcataagtctgttggtgcttttcattatttattttaaagagttctttttaaaatatttttattttttatttcaaaattatttgggtagaggtggtttttagttacatggataagttctttagtggtaatttctgagattttggtgcacccatcacctcagcagtgtacactgcacccaatgtgtagtcttttgtccctcatccccctcccaccctttcccccgagtccccaaagtccatagtataattcttatgccttttgtcctcatagcttagctcccacttataagtgagaacatacaatatttggttttccattcctgagttatttcacttagaatagtggtctccaactccatctgtgagttgccattattttgttcctttttatggctgagtagtgttccatggtgtatatataccatattttctttatccatttgttggttgatgggcatttagactggttccatatctttgcaattgcaaattgtgctgctataaacatgtatgtacaagtgtctttttcaaataatgacttcttttcctctgggtagatacccagtagtgggattgctggatcaaatggtagttctacttgtagttctttaagaaatctcggtactgttttccacagtggttgtactagtttccattcccaccagcagtgtcaaagtgttctcttttcaccacattcacaccaacatttattcttttttgatttttttttattatggccattcttgcaggagtaaggtggcatctcattgtggttttaatttgcatttccctgataattagtgatgttgaacagtttttcgtatgtttattggccatttgtatattttgagaattgtctattcattcctttgcccactttttgatggggttatttttttcttgctgatttgtttgagttccttgtagattctggatattagtcctttgtcatcagatgcatggtttgcaaatattttctctcattctgtgggttgtctgtttactctgctgattatttcttttgctgtgcagaggcttttcagtttaatcaggtcccacctatttatttttgtttttgttgcatttgcttttgggttcttggtcacgaactctttgcctaagccaatgtctagaatagctttgccagtgttatctcctagaatttttatggtttcaggtgttagatttaaatcttagatccatctggagttgatttttgtacaaggcgagggatgaggatccagtttcaattatctacatgtggcgtgccaattttcccagcaccattcgttgaacagggtgtcctttccccattttatgtttttgtttgttatgtcaaagatcagttgtttgtatttggctttatttctgtgttctgtattttgttccattggtctacatgcctatttttataccagtaccacgctgttttggtaactacggccttgtagtatagtttgaagtcgggtaatgtgaccttagattgtctatttgtgctgttttagactttttgatatgggcatttaatgctatgaatcttcctcttagcaccacttttgctgtatcccagaagttttgataagttgtgtcactattatcattcagctcaaagaaatttttgatttccatcttgatttcattgttgacccaaataccattcaagagcagattatttaatgtccatgtatttgtatagcaaaagtcctatcctgagggtctgttttctgaggccaccccatttctgacacctgttttcttagcctatgtttggtagaaagcaaagcctggagcaaaacatatgtggtaaatctttagtgaaggatgcaatcccatgggtgtaagagtgagggaataaatgaagtgaggtagggaaggatggaaacaaaatatactttggtgtgctactgagttcgccactgttactcaagaaaacacagcttatctcacagtcttcctgaatgcttccagaagagttgtatagaatcacaccatcttgaaatggttgaggaaaggaattgatctgcctacgggtgtttgtctcatttctgtcagtggtcaaagttcaccctattaggtgtttgttagtttcctcacacctctgagttgtgttaccttggtcctggtagtcagtaggaaagccagatcccacacaccacagttcaatcctgaatccaaaagtggtaggagtcatcagagcctccatggatctggtcaggatgagcttgagtgcagaagctcctgctgcagtgagtgcagtagaggtcatttcagaacctagccctcactttagaaaagtgaaggagtcagaagtgtcaggagatgtgaaaacgtcagtggcagtcagggatttccattgatcaagtgcctgatcgcctgggaagtagataaggctgagaaaatatggaaggagtataaattggagcaaggccatccatactatggttttcgtacctggacaaacaaggcaactctagtcctgaatattttgcagatgcacagagggagacctggaaggttacagaccaaactgggaatagttgttccctctaggagcagaattgctggctcagagggtagatgtatgttcaactgtaagagataatggaaacccgttttccttacaactggtaccaatttagactcccaccagcaatattcaataaatcatatggattcacatcctccccaacacttggtactgttagacttttaaatttttgacaactgaatgggtgaacagtggtatttcattgtagttttgctttgcattttcctgatcactaatgatgtcgaacatctctttatatgtatgtttattggccatatgcgtctctctgttggtgaaatgcctattcatgtgttttgcccacttctttactggattgtgtttttcttaataatttgtagtcctttatatattcgcaattggaattccttgccacttatctgtattgaaaatattttctcccaatgcacagctgtgttttttgctctttatggtgtcttcataaattaaaattcttaaagtcaaagttaccactattccattctatggtcaatggtttgtctacattgtttagaaatctgtatcccaaagtctaaaagttccttgcctatgtttcctgtcaagagctttaagggtatgtttttgacatttaattccttaatccatctggaatagattattattattttccatatcacatgaatgaggattccaatttcatcttttccaatataaataaccattttccagcgtcagttaataaaatgtccctgtttacttacctaacatgccacttctatcatataccacatttctatacttgcatggttgcgtttcggggttctctattctatgccattgctcaattaatctatccatgcctcaatatcacagtcttaatttcaatctctccccccccaccccacccccccctccccccccgttcgtttagagtgatcttgaggaagggaaccgtcattcacatgagttcggcctcttggtagagaaaactgggcaatgcagctctaaactgttgcccttggattttctcctcttggctatgagctcctccttcccaggaagctttgaggaaggtcagaataagattacatgtagtgatgaactgcttctaatactgtgaggctactagcttggggtaggggaccaagagccgtacaagcccattaaatgtttgttttgttcagaaagccttccatcgctgtgactggtgtttgaatgtctccaatgcgttaggatgctaaggaatcctcctctagggttactaaggaatgtttgctgcctttgctttcgctgagccggaaaaattttgtggcatttacagcaggagatctgccctaagtaaaaacagtttggttttgaaggcaataagatgtttcatcatcaaacagcacacaacaattaaatgacagggtgcagcagcacagcagccttaaaggcattttcgcaatgtccagatctcaaagggtaatgctgcgcccgcatcaatttatgggaagagtctagagttcacctacatcttttgaactccactaagccggccgattctgatttcccttgttgcctccctgcaatccccacgaatttggccagggcacccgggcggctcaggcccaacggggcgtgggccgtgtgctcaaccacccagaagctgggggccccctcccctttcttatctttctggcattcatctcacgcggccacctacagctacgacttcctcaggccctttaagggccgcttctcggagcgcagggagccgcggagtccggggcgtgggagacttccatgggcggagcgagggcaggagtgggcgggccgtaggcggagctccgtccgcgccctcccggcgcaccgcctgcggggcggtgactggcccagccgcaccgcgtctcccgccttctccgcagccccgcaggccccgggccctgtcattcccagcgctgccctgtcttgcgttccagtgttccagcttctgcgagatgaccctcaaggcgagcgagggcgagagtgggggcagcatgcacacggcgctctccgacctctacctggagcatttgctgcagaagcgtagtcggccagaggtgagcgggccccgctagtcccaagggcgctgggccggggctcggccattcatctcgggactttccctgtcccggtccctgtccccggggggcctgtccttgcgggtcctggccataggtcggagaccgcgatagccggcggggtgaggacaaggccagcgcgcggccgggttcgtaccgggctgctggtgcagtggatccttgcccccagcagtccttccagttggaaatcaggagaggcagcggcctggacagtgcgcttattaagggcaaggaaaacttcctcgtggacggaagtcagagtaacagaaagtctttaaggaacacatcaaggagtaggtctgcctggttgttgttgaagtgcttgtgtttgggtcagcagaaatgattgtaaaagccagcttctggttctaaagagctcactcactgttcctcttcatttaggcaggtccccttgtgctatggtgcaaagagggtggccagtgtatatttgcgggtggaacaaggaatccagattccagggatggatggctggtaaatagctattaacctccgtcctcaaagatgccctaagggtaggttgtgcttatctgttactggcaaatctctcccaaactcgctggtttacaacactgagcattttcttgtctctcatatttcgttttgattgggcccagcaaggtggtcgtcactcagggtctgtcaggtggggacacggctcacttactcatttggagccatgagccatgagccagaaaatcaaccagcagcctctccctgtggcttggtcttcctcacagcatgctggccaggtcccaaggggaaaatgtccagagagaaccagagagccaggcagaagctcagaagtcacagcatgaacctccttcctagactgcaaggtcttctagggcagg

SEQ ID NO: 12483 - DNA, 6000 bp, Homo sapiens
caggttgcggagagctgagatcgcgccactgcactccagcctgggtgacagaggaagactccatctcaaaaaaaaaaaaaaaaagtagttggatatgatggcagctgcctgtaatcccatactcgggaggctgaggcaggagaatcacttgaaccctgggaggcagaggttgcagtgagccgagattgcgccactgcactccagcctgggcgagagagcaagactctgtctcaaaaataaataaataaataagtaaataattaagtaaataaataaataaaatggcccccaccaggcatggtggctcacgcctgtcatcccagcactttgggaggccggcagattgcctgaggtcagaagttcgagaccagcctggccaacatggcaaaacccggtctctactaaaaatacaaaaattagccaggcgtggtggcgggcgcctgtaatcccagctactcgggagactgaagcaggagaatctcttgaacccgggaggcagaggttgcagtgagcagagatcacaccactgcactccagcctgggtgacagagagagactccatctaaaaaaataaaataaaaataaaaataaaataaaatgaccccatccccccagactcaaggtggaggggaggtgttggtttttaaagggctgttttctttgttttttatttctatttgtattttattttaagttctgggatacatgtgcagaatgtgcaggtttgttacataggtatacatgtgccagtgtggtttgctgcacccatcaactcgtcatctacattaggtatttgtcctaatgctctcactccccttgtcccccaagccccgacaggccctggtgtgtgatgttcccctccctgtgtccatgtgttctcattgttcaactcccacttatgagtgagaacatgtggtctttggttttctgttcctgtgtgagtttgctgagaatgatggtttccagcttcatccatgtccctgcaaaggacatgatcttatccattttgatggctgcatagtattccatggtgtctatgtgccacattttctttatccagtctatcattgatggacatttgggttggttccaagtcttggctattgtgaacagtgctgcaaaaacatacgtgtgcgtgtgtctttataggagaatgactgatcatctaaagggctattttctttctttctttttttttttttttttgagacagagtcttcctctgtcaccaggctggagtgcagtggcatgatcttggctcactgtaacctccgcctccttggttcaagccaaattctcctggcccagcctcctgactagctgggactacaggtgcccacaagcacacccagctaattttttttgtttttttgtatttttagtagagacagggtttcaccgtgttagccaggatggtctcgatcttctgacctcgtgatacgccacctcggcctcccaaagtgctgggatgacaggcttgagccacacatgtgataaaattacttagaactgaatgcttagtaatactgggaacacccaagtaagattgtatcaatctccaggttgcaacattgcaaccctcattttgtaagatgttaccaaggaaaaaaaactgacccaagcatgccagggtgtttgtattaatttttttttttttttgagatggagtcttgttctgtcgcccaggctggaatgcagtggcacaatctcagctcactgcaacctccacctcccaggttcaagaagttctcctgccttattctcctcagtagctggtattacaggtgcctgccaccatgcccagctactttttgtattttttttttttttgagacggattcttgctctgttgcccaggttggagtgcagtggcgcgacctcggctcactgcaacctccgcctcccgggttcaagcgattctcctgcctcagcctcccgagtagctgggattacaggcatgtgccaccacaaccagctaatttttgaatttttagtagaggcagggtttcagcatgttggtcaggctggtcttgaactcctgacattgtgatctgcccgcctcggcctcccaaagtgctgggatgacaggtgtgaggcaccgcgcccggcctgccgccatggttttcttaataccattcttttctgtagcctagttaattgcaagaatgcagtatagcatacacagagcataacaaatatgtatgaatcaactgtttatgttatcagtaaggcttctggttaacactaggctgttagttgttacggtttgggggagttaaaagttacacttggattttttttttttttttcagatggagtctcactctgttgcccaggctggagtgcagtggcgtgatttcagctcactgcaacctccacctcctgggttcaagcgattctgctgcctcagcctcctgagtagctgggatgacaggcatgtaccaccatgcctgggtcattgttgtatttttagtagaaatggagtttcgccatgttggtcaggctggtcttgaacccctgacctcaggtgatgcacccaccttggcctcccacagagctgggattacaggcgtgagccactgggccccgccctgtatttggatttttgagtgcacgaggtggcagtgtctgtaacctgcacattgcctaagagttaattctgtatcaaaacatcttgtttgtacgttaaatatatccagttaaaaaaaaataaggaagcggttagccatgagttgacatcacatttacaaccccatcatttcaaacttccttttctgggtgtggtgacgggcacctgtcatcccagctactcgggaggctgaggcaggagaatcgcttgaacctgggaggctcaggttgcggagagctgagatcgcgccactgcactccagcctgggtgatagagcaagactccatctcagaaaaaaaaaaaaaaaaaaaaaaaaaaagatatcttagtggtcaggtgcggtggctcacgcctgtcatcccaccactttgggaggccaacgagggtggatcacctgaggtcaggagttcgaggccatctggccaacatggtgaaaccccgtctctagtaaaaatttaaaaattagccgggcgtggtggcaggtgcccgtaatcccagctacttgggaggccgaggcaggagaatcgcttgaacctggggcagaggttgcaggcagccgagatcgcaccattgcactccagcctggatgacagagcaagcaaagcgagactccgtctcaaagaaaaaaaaaaaaaaaacaggagccgggctgcaaggtggaggctctggggaagggctgaggttggggtggaatttgggaagggtgccgagaaccagagaagagttgatacattcagagggaagggaagggctgtctgggagtgcgcgtgctgagtaaacagaaataacagatttcagcgttggaaagagaagcccgggacaggttggtgagtgccccattcagggctggactttactaagggtttttgtttgtttgttttctgttgagacagagtttgctcttgtcaccaggctggagtgcagtggtgtgatctcggctcactgtaacctccgcctgccgggtttaagtgattctcctgcctcagccttgggagaagctgggattacaggcacctgccaccacgcctggctaatttttaaatttttactagagacggggtttcaccatgttgtccaggctgatcttgaactcctgccctcaggtgatctacccgcctcagcctcccaaagtgctgggatgacaggtgcgagccaccgcgcctgaccactaagatttttttttttttttttgagacggagtctcgttctatttcccaggctggagtgcagtggcgccatcctggctcactgtaacctccatctcccaggttcaaatgattctcctgcctcagcctccggagaagctgggattataggcacccaccaccacgcctggctaacttttttctttttactagagacggggtttcaccatgttggtcagaatggtctcgaactcctgacctcagggtgatccaccctcctcggcctcccaaagtgctgggatgacaggtgtgaaccaccgcacctgaccactaagatatctttttttttttttttttgagacggagtcttgctctatcacccaggctggagggcactggcgccatcctggctcactgtaacctctctcccaggttcaaactattctcctgcctcagcctccagagaagctgggattacaggcacctgccaccacgcctggctaatttttaaatttttactagagacgggcttccaccatgttggccagatggtctcaaactcctgacctcaggtgatccgccctcatcggcctcccaaagtgctgggatgacaggtgtgagccaccacccctgaccactaagatatcttttttttttttttgagaccgagtcttgctctgtcgcccaggctggagtgcagtggcgcgatctcggttcactgtaacctcctccgcctcccaggttcaagcgattctcctgtctcagcctcccgagtagctgggattacaggtgctcaccaccacgctgggctaatttttgtatttttaatagagacggggtttcaccatgttggccaggctggtctcaatctcttgacctcaagtgatctgcccgcctcggcctcccaaagtgctgggatgacaggcgtgagccaccgcacccggccactaacatatctttaataagatctgtcatctgagaccgggggccacctccctgtctgggtgctgtttcccacgagacggggaggaaacacaggcaggagcccctggacaccagcattcacgcctccaaggctgaatttactatgtcaggaagttgcccaaccctgcctgtatagccagcaagaattctaattatagcaaacagaaacacttgcagaaaaaaaaaaaaatgagaacgggaacatgataattttcaaagaaagagtctttctttcaaggaaagtcaggttcatggttacgaagctgctgaccccaggatcccagcccgtgggagagaagggggtctctgacagcccccacccctccccactgccagatccttattgggtctgagtttcaggggtggggccccagctggaggttataaaacagctcaatcggggagtacaaccttcggtttctcttcggggaaagctgctttcagcgcacacgggaagatatcagaaacatcctaggatcaggacaccccagatcttctcaactggaaccacgaaggctgtatcttccacacagcactttgatctccatttaaggtaaggtcccctctccagggtgggatgagggaaaaagagggcaggcaggggaggcggtggactgtgggttcccaaatccaagctggcagacacggggcattggcatgtaacaggtttctgctgagacctgctgtccgtgtgggcaccacaccacacatagaatgacccggtaccagagaagtatgtttgcgatctcattcacccttttgtaagtggatcggacgctgaagccatcacagcatgttagatgccttgggtttataaaggtgatagcattaggagtaatttgacagtgctttctgctttttctgtgtgcttgctagaaaatgtacacacctacacatggctagagttctctgtttattagaaagcgctggttcagttagtcaatgagctcacgcccagggcgagctgactgccagccggggagccgcttttggggctgggaccccagcctgcttgtagtgtttctcagtggttttcaaaggctggcgggactcagaatgttccagatggctggtgaaacctcaggtccctcctagcagctttattcacagtagccaagaggtggagacagccctcgtacccatctatagatgaatggaaaaatataatgtccatccacacagtggaatattacgcagccatgaaaaggaacaagcagctttattcacaatagccaagaggtg

SEQ ID NO: 12484 - DNA, 6000 bp, Homo sapiens
accacgcccagctaattttttgtatttttagtagacatggggtttcaccatcttggccaggctggtctcgaactcctgacctcgtgatccacctgcctcggcctccccaagtgctgggattacaggcgtgagccaccgtgcccagccccagaccttcttttaaagtgctcacctgattaggtcgggcctacctagaatactctcctgtttgatgatcttgaagtctgttgactagagagcttattgcatctggaaagttccagcacctttgctgcagcatcatgagactgatatctcagaatctttttatttgcctttcatgctcaattcatggaaatgatacagactgggtacacaacaaagactcatggctacctccccatgacaaaggattacggctgcagatatccgagaactttgtttttttatttctggggtacattcaggagagggatgttttgctccaaaatgctttaggaggccaagcattttccttaaaggttttccagattattataaccatcctttggtgcttgctggttctgaaggagtgaatatctccttctgaatttgctttgcaaataccttcagggaactagctgagtggcaaagtggtttcccaatttaacagctccccccgggaaacacacaccaatggtatgtaaagcagcagcagcgagaagaattttaaagagaaccccaaacgctttcgtgtccctaagaagaagaagaatgtacatgcaggcagcaaaggggtgtgtctcactgagaagcctgcttgggttcacagaatggtccccgtcctggggaccctggtgtgtttgttttctccttggtcaagtagagactcataatcatattaatattagcctttatggacatcatggctcacacaatgcaaacgcccccccaaatacccacaagccctcttcttccttcccctcccctcccttcccctcctctaccttcccttcccctcccctcccctcccctcccttcccctcctctcccttcccttcccctcccctcccctcccctcccttcccctcccttcccctcccctcctctcccctcccttcccctcccttcccctcccctctcctcccctcccttcccttcccctctcctcccctcccttcccctcccctctcctccccccttcccctcccctcccctcccccttcccctcccctccccccttcccctcccctctcctccccacttcccctcccctctcctccccccttcccctcccctctcctccccccttcccctgccctctcctccccctcttcccctgccctctcctcccccccttcccctcccctctcctcccttcctttcccctcctcttccattcccttctttcctcccatcccctcctcccttcccctcccttcccctcccttcccctcccttcccctgccctcccctcccctccccttccttctcctcccctcccctcccttcccctcccccctcccctttcctctgctcccttcccctcccctctcctccccccttccccgccccttcccttcccttctttcctcccatcccctcctcccctcccttcccctcccctcccttcccctcccctcctttcccctctcctcccctcccctcctttccctccccctcccctcctctcccttcccctcccctcctctcccttcccctcccttcccctcccctcccctcctttcccttcccctcccctcctctcccttcccctccccccctcccctcccttcgcttcccctcccctcccctcccctcccttcccctcccccctcccctcccttcccctcccccctcccctttcctccactcccttcccctcccctctcctccccccttcccctccccttcccttcccttctttcctcccatcccctcctcccctcccctcccttcccctcccctcccttcccctcccctcccctcctttcccctctcctcccctcccctcctttcccttcccctcccctcctctcccttcccctcccctcctctcccttcccctcccttcccctcccctcccctcccctcctttcccttcccctcccctcctctcccttcccctcccctcctctcccttcccctccccctcccctcccttcccttcccctcccctctcctcccccttcgcctcccctcccctcccttcccttcccctcccctcccttcccctccccctcccctttcctccactcccttcccctcccctctcctccccccttcccctccccttcccttcccttctttcctcctatcccctcctcccctcccctcccttcccctcccccctcccctttcctccgctcccttcccctcccctctcctccccccttcccctccccttcccttcccttctttcctcccatcccctcctcccctcccctcccttcccctcccctcccttcccctcccctcccctcctttcccttcccctcccctcctctcccttcccctcccctcctctcccttcccctcccttcccctccattcccctcccttcccctccattcccctcccttcccctcccctcctctcccttcccctcccttcccctccattcccctcccttcccctcccctccccttcttttgagatggagtcttcctcttgtcatccaggctggagtgcaatggcgcaatcttggctcattgcgacctccacctcccgggttcaagcaattctcctgcctcagcctcctgaatagctgggattacaggtgcgcaccaccacgcccagctaatttttgtatttttagtaaagacagggtttcaccatgttggccacaattgtctcaaactcctgacctcaggtgatccacccgcctcggcttcccaaagtgctgggattacaggcatgagccactgtacccggcctaaatcacagacttttatgtctcacggttctggaggctgagagtccaagatcaatgagtgggaggttcagtgtctagtgaggacccgcttgctggttcacaggtggttccttctggctgtgtcctcacatggtggaaggggtgagagagctctctggggcctgtcttctaagagcacaaatcccactcatgacctaaccacctcctaaaagcaccacctctaatactcttgcagtgggaactgagtttgaacttgagttttggaaggacagaaacatggaaggcatagcaaccctcttacacagcccggcccctctgaagcctgcctgggttcacagaatgttccgtcttcctcaggcccctggtgtgttggctttctcctttgttgatagctgatgttgagcaatgcaagatttctgttctgattatctgaccctggatatccagtttggggacttgtgacatatttgggacgtcagaagcacgtacctctcacatagagcatggcatacttaataaacaataaattataataaaaaatgaataatgcattataaattatcattacttatttatttatttattggagacagagtctcgctctgttgcccaggatggagtgcagtggcgccatcttcgctcactgcaacctctgcctcctgggttcaagtgattctcgggcctgcctcagcctcctgagtagctgggactataggcaaccacctccacacccggctagttttttgtctttttagtagagacggggtttcaccatgctggccaggctggtcttttttttgttttgttttgacatggagtctcgctctgtcaaccaggctggagtgcagtggcacggtctcactgcaagccccacctcccaggttcacgccattctcctgccacagcctcccgagtagctggtagctgggactacaggtgcccaccaccacgcccggctgattattttttgtattttagtaaagacggggtttcatcgtgttagccaggatggtctcgatctcctgacctcatcatccgcacatctcggcctcccaaagtgctgggattacaggcatgagccaccgggcccggccccaggctggtcttgaactcctgaccttgtgatctgcccgccttggccctccaaagtgctggcattacagacgtgagccaccgcacctggcctcatttattattttgtaatcacattataaattgtcatttattatttcataattacattataaatgatcatttcagaattacattatatattttcatttatttcataattacactatagattatcatttattattccaaaattacattataaattatgattatattatacaatagcatttgcttcataattacattagattatcatttatttttaaattacattatatttatttcataattacattataaattatcttataattagaaatgatcatttatttcataattgcaatataaattattattaatttcataataccattgtaagttatcatttattatttcataattacattatgtaatggtatgcgttaataattattaatatacaattaataattattaaccattcaattaatagttaattaactagcaatttatatgtaattctataattacgtcatagaatatgatatctaatttatacataaattatattattcaagtatattacccataatttgcaagtatagtatagaatcccgttataggatcctattacattttagaattttgttatatatatttgactctacaattggaatttagaccccacaccggcccccctcctgtttggcttaagggctatgaccacagaccctggcccaagtacctcccctggttacccgcaggcaggtggcaccatgggggcggggcggactcgcgcacgcgcagtgcaaaaggtcgggctcccggaagtccctcctcccgggggcggagccagggcaagaaggagaaacccggtgctgccgcgcggcctcttccgcgagcccgcgcgccggaagtggaaatgcgtcatagagggcgggcggcgacggcggtggcggcgtcggaggcgcctccgggggacggtggcggctcccggcggtgaggccgcgcctgtccggggatcgtcgagggacggcgggagcttgggccagcggcggcggcggcctgggacgcaggcggagccccgcgcaggtgagtgccgcccccgtgcctcccgggcctggctgcagccggcgaacgcttcgctcctagggccgggcccggggggccggggcttgggaggcggcgcctaggggcctcggaggtgacggggctggggttggggggcgtggggtgccaccggggggctgggagcgcctgaaactgtacgggggaatcgggggctggggaggtctgcggtcggggtccgggggtccctggaagtaggggtaggggctggagcggttcctgggactgcaccgaaggagctgaggcctggagcggtgtcggagggctgggagctcgggggatcggatgggcgggagactaggaggcctgggactaggggacgtggcgctgcggtcgctcctaggtctacagtgggaagcaaggggctgtccggggttttcggaggctggggcggtgctgtgtaggttggggtattggggctcatccaggagggtggtggggagcggggaactgaggagctgagggtaccgagtggccaagggcctgagaatgtgtggggccctgccaggggtgccagcggcagcctgaggccatgctggggggctgcggtaggtgggaataccaggggcaatgccgcgtactggggattgggcagccaggtgtaccggggtggtcggagggcgctggaggccagagtggggagggttcctcggtggtgaagttgctggggccgcttgggttctgggggagggttcactggtctctgtccagactggagcccctccctggtgccccactgaccttttctggtcgcttctccaccctccctcccttctttcgcacctcccacctcgggcttgggcgaggaggccgtctcctgggcctggcaggaagcctccaggttgatggggtgggcggccgggccg

SEQ ID NO: 12485 - DNA, 6000 bp, Homo sapiens
tttcaccatgttggccaggctggtctcaaactcctgacctcaggtgatccatccgcctcggcctcctaaagtgctgggatcgcaggtgtgagccatcatgcgtggcctagaatattcttatttccaattttacagcaacagaatgtcttctgtcttgtttctactttaaaaaaacagtttgctaaagctttctttgtagtgcagttgtgaattttcaggagcatcccatgaacattgaaaaggagatgcattcacgctttttaaggttatcgaggatgtgaaaattaaagtcggctttgtaaattctgccatgtctgtgagctcccagcatttgatcagctgaggcttcgagcggtgaagtagagtgcttttcccctaacgtgctctgatctggagcctgcgtgtattaccgctgggcacacggcctgccctgaccatactttagtgaagcagaggtgataaaactgggtttcccaggactcctgcaacacacagctttgatgtcggcaaactagaacccgggagccaaatctgcccacggtgtgtttttgtacagctttcgaggtaagaatttttttgtattattgtcgttatcgttgttttgagatggcgtcttactccgtcgcccaggctggagtccagtggcatgatctcggctcactgcaacctccgcccctgggttcaagcgattctcctgcctcagccacctgagcagctgggactacaggcatgcaccactacgcccggctactttttgtattttcagtagagacagggtttcaccatgttggccaggttggtctcgaactcctggcctcaagtgatctgcctgcctctggctctcaaagtcctgggattacagacatgagccacggtgcccagccaagaatggtttttacatgtctgaataattttcaaaactccaaagaacaataatattttgtgatgcatgaaaattatgtgacactcaagtttttatgttcataaagtccacttggcgcacagacattggttacatattgcagcagaatccatatggtttgcaaagataaatgcctttactatctgaccttctgcagaaaagcttgtctactcttgcctcaagaagcatgtaaaatacttacaacactggcacgttaggcatgctggaaatcgtagcaattattttgcaccttcactacatctgagaggatttcctgaacttaaccatttaacctaactcctcactaccttttgggaaacattttttttattaaggtgaaattcacaaatcatagaattaaccttttttttttttttgacccggagtctctgtcacccaggctggcgtgatctcatctcactgcaacctctgcttaccgggttcaggcaattctcgtgcctcagcctgccaagtagttgggattacaggcagtcaccaccacatctggctaatttttgtatttttagtagagatgggttgcatcatgttggccaggctggtcttgaactcctgaccttaggtgatccacccgcctcagcctcccaaagtgctgggatgacaggagaattcaccattttaaagtgaacaattcaggttgcttgctgctttcacagtgttttgtggccaccacttctacctagttccaagatattttcactgcccccaaaagaaatcccattagcagctgttttttatattggcttcctggggctgtcataaaaacatgcttcaaactaggtagggggcttaaaaaacagacagttaagctgtcacagttctggagcatagaggtctgaaatcaaggagcaaacagggtggattcctccctccgtccctccttccctccctccctccctccctccctccctccctccctccctcccttcctgccttccctccttccttcctttctctttcttcctttccttacctttcccctttccctccctccctccctcccttccttccttccttccctccttccttccttccttccttcctttcctcctcctccttcttctttctttctttcttcctttctttcttctttctctttcttctctctctctcgctctctctctctttctgagtctcactctgtttctgttgcccagtctgtagtgcggtggcacaatcttggctcactgcaacctctgcctcccgggttcaagcaattctcctgcctcagcttcccaagtagctgggattacaggcgcgcaccatcgtgcctagttaatttttgtatttttagtagaaacgggatttcaccatgttggccaggctggtctcgaactactaatctccagtgatccgctcacctcagccacccaaagtgctgggattacagacgtgagccaccgggcccagccagcagggctgatttcttctgatgctgtgaggtagaatggattccatgcccctcccattgcgtccagtggtttgctgccaatatcccttggcttgtaggtgcatcaccccaatctcccacttcatgttcccaaggccttctccctgtgtgcatgtcagtgtccagatttctctcttcttttaaaataccaatcatattgcagtatgacctcatcttaactaatgattaggttggtgcaaaagtaattgcagttttcaccttcaaaagtaatggcgaggagctgggcacgctacctcacgcctgtaatctcagcacttcgagaggccgaggtgggcggatcacaaggtcaggagttcgagaccagcctggccaacatggtgaaaccccgtctctactaaaaatgcaaaaattaaccaggtgtggtggtgcatgcctgtaattccagctactcaggaggctgaggcagaagaatcacttgagctcaggaggcagaagttgcagtgagctgacatcacgccactgcattccagcctgggtgacagagcaagcctgtgtctcaaaaaaaaaaaaaaaattaatggtgaaaactgcaattacttttgcaccaaagtaatacatctgcaaagatcttatctccaaagaaagtcacattctgaagtactgaagggttgggcttcaatatatgaagtttgcgggagaaaaaatgcaactcataatatatccattcccacgtctttccagcccctggcaaccggcaatgtgctttctgtctctgcagatttgcctgttctggacatttcagagaaatggaatcctacacaatgcgttcttctgtgtctgttttctctaactcagcatccagtttttgacgtccatccactttgtagcagatgtcacggtgtcagtcctctttagggtcaggggactttgaaggaaatatctttctaaatgcatcaactgcttcctggactctgccactcagagcttaggactgcacaagctaactgccttagagcatttcccccatatgcacacacacacacacatgaacacacatgcacacgcacacatgcacacgcacacacgcacacacacacagacagacacgtgcacacacacacacacctgtgtgcacaggaacttaatccatccaagtaacttacctttataaagatgttgcagtccaggcgcgatggctcacacctgtaatcccagcactttgggaagccgaggcaggtggatcacttgaggtcaagagttcaagaccagcctggccaatgcagtgaaaccctgtatctactaaaaatacagaaattagccgggtgtggtgtcgggtgcctgtaatcctagctactcgggtggctgaggcaggagaatcacttgaacctgagaggcggaggttgtagtgagttgagatcacaccactgcactccagcctgggcaacagagtgagactctgtctcaaaaaaaaaaaaggaagatatttcatagaagacaactcccaaacaccaggtcaacaacatgaacagacttaacactccagatgctcaaatttgcagagagaaaagtccaaggtttatttctccttttgggtctgtttgccatgaatcctgcttctctgggaatttagaagctgccctcataactaagactgattttcccctttctcctgcagttaatctatttaccagaggacttcaaagctgtttgcaaatggtaactttttaagtgcttgcctactgcttcatggtaggtagagtgtaagggttaacccacgagttgtatatggataaattagacacactcacagatctgcagggaagaatataattaaaaccattgtgaaagcaggagtcatcatcgaactcagctatccagtcatgtttcttctccaaggagatttcaaacagaagatgtaaattttggtagttacataaaatgtctcagatttaaatgaaagacacaaaaagccacatatctccttttcctgaacaaccgtctctgctgaaatattagttctgccacctacaaagacaactgaaggctgaggataaaaaatgcctcttggaagtcactgagtttgttaggtataaaagccaagacttcaactgaggtctttgcactgatgtgtacattaaccccacactgggtatcactgtacaatcatgtcctgcaggaggaagattacaggcggccagtgtcttctctggtttctgggttggtgactttgaacttgctacagctcccacacccgcagcgagcagagttgccaagcaagtgtgccggcttccagaagcctgagatgcccattggtgcttgggaaccaccccagtttccccatcgtctgtgctgctgcagattggttggggcagcccggggaggctggctccgacacacgactgagtgtgcctacactggtcccacaggttttcagctgtggagtttgggatctgagcttggagcccatttgtttctggcagttccgctcatattttccacttgaagacatcgcctcccttccttccaagctgggagaccagaagtcaacaacaggagggtggagaggccgggtctcacaatccgcttggctggggagtccactgaggttcttgcatcctgaagcaaaccatggagagctggtggggacttccctgtcttgcgttcctgtgttttctaatgcacgcccgaggtaagaggcattttgctttgagggagatctgcctgggcatggatttttctattcttgctttaagaaactctttccaaaggagttgctatgaagtgaatggggataatttgcccaatgggattagaaaggagactaagagcgatgggtggctgagaggggagggagaagacgggctgctcccatttggaatctgggaattagatccagaagggcaggatgttagctgataccatctagatattcgccatattttcctgttttgatccatgtgtcccaagcgtttaaaaaatgacctatttaactccatgattcaagcatgactgggtgtgtgtggaatgtcagtcatttctttctgattttaaaaattagttctgaccatttccatacagtaaaagtagagttgaaactacttcatcccgtggggcagattaccagagattcgtttgccggaagggttgcatttattcagatttttaaatcttttcctaaacactgtcattcattcttgcaaattaaaaccacctgaattgttcacatcaaaaacttcgatataaacttgcaggctggctgtcccagatccaagattagatttttcagttccgtacgaggacctctttaagaaactccaatgaactcataaagtacaggatttgaacaacggttgagtaagtttctttggtcattttcatgtggcgatttcagagaagggaacacctgggcgcatcttaagagagagaagtatttctgttaggagttaaaacacatcattcagatgtccctgtggcagcatttcctgtttatcctatttaaagacatggacgtcattaagattggagttggttgtttatgggcggaggcggtgtcgggatggatagatcctggtggacatagtctaggatctgcagtgagaattttttattattctgtgctgtcttcagatctcacctagtaagtggacaa

SEQ ID NO: 12486 - DNA, 6000 bp, Homo sapiens
gtatacactgaaccctatttgtagtcttatcactcacccccttctcaccctttccccctgagtccccaaagtccattgcatcattcttatgcctttgcatcctcatagcttagctcccacttatgagtgagaacatacaatgtttgattttccatttctgagttacttcacttagaataatagtctccaatcccatccaggttgctgtgaatgccattaattcattcctttttatggctgtgtagtattccatcatatatatatatgtgtgtgtgtgtatatatatatacatatatacgtatatatatattatatatgtatatatacatatatatacgtatatatacatatatacgtatatatatatattatatatgtatatatatacatatatatacgtatatatgtatatatacacgtatatatgtatacgtatatatgtgtatatatatacacatatatacacacacacacacacacacacatatatatatatatatatacacaccacagtttctttatccactcgttgattgatgggcatttgggctggttccacatttttgcaattgctaattgtgttgctgtaaacatgagtgtgcaagtatcttttttgtataatgacttctttagctctgggtagatacccaggagtgagaacaaggtgttttggaggcagacaaaccagggttccattcaatgctccccctctggtattcaacttcttcaaatcctggataaatgtggggaccctctaagcctcacttcttgtgcaatggggagaaaaacattaccatctaatatggggtgagaaaggagtgatgcagttgtggatttagggctcctgatgaatgatacctccagtggagactggcctggattggaatctttcctgttatccctggaacccctctacctatccccacctgttctctaccctggaagaagcccaggatgaacggcatccataggctgtcttgccttttctgttgtcctggttgtttctggccaaggaaagtcaacaaatgaaagggaaaggagaacaaggttggggttttcatctcctctgttccctcctgcagggttgcccaggattgcaccctgcactcctcaaaggtcatcacaagctctgggatcactccttcgcctttgggcctgagtggtaccagcctcagggatgagccgtcttcctcctcttcctgtccacactgctgttagctgtcttttcagtaaattctcctctcattgtcctatattccatgtgtctcttcttttctgctgggaccatgtgaccaatgctaggtcctgcttggcacccccagggaaatgacagcctattcacagaccacagggctgtccacagcagaggaaccagagggctaattaggagctcatgtgcatagcaaacatattggaatgtgttgctcctccaagctggtcagagacatttgccatagtcactgagtcatcagtggggttatctgccttgcaacctaacagtgatacaactgacatcttaagagatggagcagacatgcacctgcaccccctttttatcaacatgatggtgaataagtgacatgtggcttccaatagatgcagaatagcaggatgctacatcaagggctgtgattctctagtctttagggggtctcccaggaaattttattttatataaaaatcaaacttcaacagggctgcaactccattggtccaaaagtctccccggttggtatcaaataaaaaaacaacaaatgcagacttagtaaggagggacttttattcaaaaagcttaatgcaagagggaaaacactctaggtctgcaagcctctcaaaggctaggggcaaaaatggtttttcttttatggagaagagtaaacaaggctagaaaacataacaggcactgaccttgaatttaagggtggcctgattagacagtagatgagaaaacatttgctctgaggccagactgttcccaggaggaagtgcctgctcactcagactgaggatgggcccatgttcagggttctgggggaaagagggaaactgatccaacatttgactagggaggacaagtggctcagctaacttataactgtttataagacaaagaattaggatttagagggtctgtctctgtcctattagacaagggacatctgtgagtcttttctcagtcatatggggaagggggttctttgcaataagccattttccagaacacaaggtgtgggaggatgttaaggagtattcagtagcacttgataaagcacagtaaggaagactttattcaggaccatcgcaacaggtgcagggaccacagcaatggggacttgcagtgggggagaaagattgggctcagatctgaatacagcatgggaaagtggggattcatagccacggaatagggtgcccatcagtggatggaaaactactaagaggaaacaccaagggccagcgagattcctcctaaccgacctagcaggattctagcataaggccaaccaggtgaccacacatcccctgggggtggtggaggctgaggagcctgatccctgatcagatactgaggttgaacagatggagggggggtccagtagggtgttcttgctaaattgacttaacaggcttcttgctaaaactggattttacaagcaagtgcacagatgggcctagaagaaggttgaaggtccccagaggtcagacagctatgatataagaggttttgagcatttgcatcacataccacattttctaggcactaaagagaaggtaacaaggctttagcttttagaggcctccacatgatcaacaccttccctcctgagcatgtcggccccctatggccatgcacttgccagcagcctctctatggcaactttttgcctttttattaaaattgctcgggcgtatgagagccagttctagtcccaatagtatgcccatctcatccaacctcttactgcttcggaggtttgttttgactcttgtttggttttcctaaggaatctggttgaaagagagaagagagaaaaatatttttcaaatcaaatttctgccccaggtatttgtagagcaaagccgctgcttcaccaggctagagtcccttccccagggcccagtaagactttcatgggccatgaaggcaaaacatattaaatatgttttaatatgaaaatatattatgtaaaaacataaaacattaacatttgtattttacaactatattggtgcaaataccaatatgatcttcaatccccaatgttcattttcttctgattataacacaaattaaaacattttgtgagcccctaaaaaggccttagagtgtgtgcctgttgggtaacaatctggcctttccccactctcagatcatggaggttgggactgttttgtgtcttattcctctctgcatttctcagcctctctcttgaactaagaagggagttgatgaatctttgcagaactggaacttgtattccccattgcttgacatcaagctggaagtgtagtaaacattccccacattgttgaattgaatcacattagaaagcagggtattagcgcacagcatttttaattgccaaggaaaattttattttaactttgcattaatatgttctaaggaacctttatacttgatgcaatcagattcctgagagaagccaatacttttcctgtttttgtgttttatcctccattcttcatcgtatgcccttcaaggaaatctgaaaagttggcttttttgaatcattagtcacattgatatgtagactgcaattttgcttttcctgcgggattgctgaccttgtaaaatgatgcttatgtatgcgtcactaatctatgtgcttaacttttaacatctatgtaatgctaagaatatagacatcgcctgggggcaggtggaggttgaggaaccctatagagaatgatctgatatcatgtgtgatcagatagtgagggtgagggcttcttgcaaaaactggattttacaaagaagtgcacagataatcttagaacaagattcaggagactgggttatatttggtcaaggaaggaatctttgtcaagggatttcttaacctttgctgttttccaagatcaaagggttcgggtggaatgcgacaatgtcggtggtatttcaacttagcaacctctttttttgttttgtcatggttgctgagctgaaagggagaaaatattcaagggatccaccaagaaaatgctcacttaggctggaacagcatataataagagatatgttgtggttataagatcaacgattgccaaaaagctcacttgagggtctctcaggctgacaccacttgtcacttagcagcatgatgcaacctggctctgcagttagcaaacctgggctttccaaaagctaaaaccacctcagcacaggtgcagcttttatagaccttaaaataaagcttactcttataagaatagcttaaactatctttaggaaagaaatgcctggtcattgacccagactgaagacaggtataagagaggggggaaaatcccttaaactcccgttcagtctcttatctgaccatctcattctctatggcccatgtcactggcctgttcctgctgtaagtttcataacactgctgctagcataaaccgcttgggtatcagattgtgtctgcatttatctttgacacaaatcataccgaaggggagaagttgccccttctgaagaatccggtttaccaggatcacctgaaactcccaaaagaatgcagcaactaggcaaagagtgtctccgcctcacattatctgcccaagcacagtgctgttggccaagcctccagcagctgacgggacccagctgtagtgaggttgcagtgattgagtaggattggcctgcttcaaagcagaggtttctcatgggaatatgcttattaaactcccactggtgcagaaaccatgaacagaggatgaacaagtgaagttgcaatctcctccatcacagctcagttccccaacaacaggatcacaagctggagatgcctttaaggtaagcgtctattcccctggccaggctgggagtttttaaccctgaaacatactagttgggatgttcacagcagctacctgcttgtgttgcatattctcccaacatgtgttgtcttgttcttgtttcttaaatctgtttttgcttggtaatttccattgattataatgattttctgtgaggcttagcgagggaacattttaggagaggttataaatgcggctaattagtgacatgcaaatcgcttttgtggctgtttcaaaacatctaaatgacctataattaaattttgttgccaaattatttgttaattatcatcttcctatcaagtttattgcatcaggagatgtcattcactgtctaaaaggtggagtgaggaagagcatcatgcatatgtgttgcagagtgggaaagaatgcttgttttgttgggtttctgtctccattggtgtgtttttattttttgttcccacttctatgtatctcagatgacgagtttgtctatgggctgtcggaatcttctggttgagaaagatggtgggagccactttgtttaaatttcctaattttccataaacgaatcccttctgcaatatccccgacagatgcggcttttcaccctccacccaattccctcatgggaggaagggactttgagaggctgatcatttcgtggtctggcagcacttgtaagtccctggttctgttctggacactgtcccagctgtggcttctgagacaatggctaaatcctttctctcttttacagaccaccattcgagcacacttaagtgcaactcgaatgccattttccgctctgggtgaaatgttaccgattcctaagaaatcctggatgtcagatttttttttttttttttttttttgagatggagtctcgctctgtctcccaggctgcagtgcagtggcgcgatctcggctcactgcaagctccacctcccgggttcacgccat

SEQ ID NO: 12487 - DNA, 6000 bp, Homo sapiens
ggtacacaacttttcttgtgtctcaaattctaataataaggcactgcttgtgctctttccagatctctcacttacgtctcactcagctacaagtggtggatactattactcttcctccttctccttgttttacagaagggaaaagtggggcttgcagaagcttggcaaaatagcacaggcagtaatactgcaatacagccatgtaatacttcaagatggtgtatgattaaagcggttggctgagaacatttgggaaaattttagttctggtgtaacaaactgtatcccagagacagtgctatatgctgggctttcaaagagcaggtaaatgcagctcccctctgtccttccaggagctcaggagctcaggagctcaggggttaatgcgagtaaataatttgggtctaagctggtgagtgctgtccagagggtcccaggaagctgtggctccaagaagggtggaggggatggtcagaggcgcctggggaagaagctggggtcctggccagagaagacctagcctgaccccagggtgctccagcctccatcagaacaggaggctgatgtcagggctgtctctgagcctgtctgcaaaatgggtgcacagcagatctgccctactcctgttaaccagctgctgcgagaatcagatgacatgctgcagaggaaggcactctctacagggtgcatgtgctgaggcgggcggatcagttgagatcaggagttcgagaccatcctgggcaacatagtgaaaccccatctctactaaaaatacaaaaattagccaggtgtggtggtgggcgcctgtaatcccacctactcaggagactgaggcacaagaaacgcttgaacccgggaggcggaggttgtagtgagttgagattgcaccactgtagcctgggcgacaaagcaagactgtctaaaaaaaaaaatatatatatatatatatatataaaatatatatgtataatatataatatatatacaaacacacacacatatatatgggggcttggacacaaagaggcaatagggtcctcacctctaggttttgtaaaacccaccatttatagaataattgaatagtgagttttaacaatttagtggtgggaaaatgtctgttttaaaaatatacagtgcatccaaatctatgaaaatttcccatccacctctgtgccaagccacacagttttcctccctagagataacacccttagcagttcccgatgtctcttttcagaggtggtttgtggtgcacacacaggtgggcaatgacacgtcccacatgctgggagtactacctttaagggatttataatgaagagagcttccagcacatcatacaatggggaactcttgaaaatggctgggaaatggaacatcttgggcatcaaattatactccatcagtaattcaaaccagggtttctcgacttcagcactattgtactgatattttgggccgaaatgttcattgtcccgggaggtaggagtggagagggagctgtcctgtgcactgtaggatgttcagcagcagccctggcctctacccactcaatgccaggagcacacggctcctcccacttcagttgtggctgccaaaaatgtcccctgggggaaagggagcaacatcaccccattaagaaccgctgttctaaaccttgtatgacatctgtagaaaactggcagataagagaaaaaatgtagaagattcaaagggataggaaagagaaatctgtgaagacaatggaaagagcctgtagtcccagttacttgggaggctgaggcaggaggattgcttgagcccaggaatttgaggttgcagtgagccatgatcgtgccactgcactccagcctgggagacagggtgagaccctgtctcgaatgaacaaaaaactcaaaggttattattccgtaactattgaaagaatcttttcatgaaggatggtaataaccagctttctatctccacacagagcaaagtaaaaagaagtaggtttaaatggaagagaaattaaaactggacatacagatggttaaatattaacaacggcccctgaatggcactttctttcctaaagatcttcatgagcagaataatctaggatggctagggattgttccctcgggactttgtggttaagaattcaggatcttcaagtaatgaaatctgcattaaaaaattagccaaaactgtttgtttattccataatcatgtctatatggtgcttttaagaaaacaatttttttgttgctataaaagcaatacatattcactgtggaaaaattagacgatatctctaagcttaaaagaagaaaaatttaaaacacccttaatcccactaaccagtgagataccatgtttgatactttagtgaattcatttcctaatagttttctgtgttcgcaaaggtatatgtgtagatataaatatattacacctacatagaaacgacggatcactcagcacataatgctttgaagcttccattttttttcccatttaatccgctgcacatgtctttttccatccgtgtgtaccaccgtattagttttaattcttccactgcacagatggcttataatttaaaacatcccctgtttttggagatttaacttgtttccagtgctttgagatcataagtaatattgcagcaaactttccctagtcaggggtttgcacaccgttcttccccccacccccactccccacaccccaggacaaattcttggacatcaagttgctggagcacatgataccaacagctgtagggcccggagtaattggcgaaactgtgtatctgtaaggcatttggtaggaaaaatgctaaacagaccaccagaaagattgctcaacttacattcccatgggtggtattggtttttgctttttttggttttgttttttaatcttggctaaaatgacaatttgaaaggcgagggtggagggtgttcagacagctctctcattctgttgagaattgcttggcccagttctgggccttgtctgaattgccggtttgctgcaatgttttttacaattgagcaatcacctagaaaaaagagaaggtgaaactaacctactgcaaaaaaactgctccaggatgaagaaggttgcctgtatttcgtcatttcagccaagccggaatacggagcaaggctgtctgcaccgtgctaccatcctcttcaggctgcagggcattttgtatacccaccacctcccattgatgctggaaaatccggtcacagaattccgtgcagcccagcccctgagggtggggcgtcctgtctccgggacgccgggttttctctggacacgaatgctccgggggtaggaggcgaatgacactggcacggcggggctccggagccaagaggtgaccaggctggctgggcagggctgagtggctgggccgagcacgtgatgctcccagccggcctccggggccctccgggctgaaatcgacatttgcctctggcaggaaaatgagcttgtcagtttctgcctccattagaccctcaacccaaaggagcaggagatttcggtagcgttttaactttatctcagaatctgaaagcggaaggtaagctgcttatcactcagaaaaacaaatttgagaggagtgacctagtaaagtacactgcgactttgttgatttttaaaatctggtgttgaaaataattgatcgctgtgagagtcaagggctgtatttatccccaaattagagattaaccttctgaacagaaatttggttaatttggagggaatcacggtataagggccagggttaaatatagaaggacacgaaagctgatggaataaactgcaagtaaacttaactctagcctgcttgtaaaacaatctatttcatgtctccttcagggctgtgagcaaagggaatgttaaaattgtgatttttaactcaagtgaaagtaaatgaatctatttgcaattggaatacaaataaaagcagtctttgcttttgtccttttacatttcaaaaacgcttgtgtattttggcaaaagaaaagtttatatgtgcactgcttaagtttgaaatacgctatttcaaatttacaaaattatcacagttgtaattttctaaagtctttctaggcaaggctgtttcagttgtgaatgagaaatgttgacattgtacatattttctgtgatagtaaaatgactcacttcttcagaatgtgataaagattagaaaatgtgaaataatgagttattgtgaattaagtcatgtctcagagattaaatgccttgccagaagatgtaagaaaacagagacacaaatacaaccatgctcacgtagcagtgctttattttaaatcatcacatatttaagtaagtagtagaaatacgtggtgtcaccattttttcctttggcaaatacaaattaatattggaatgcagctattcagagtaattaaagcattattcatccgtgcaattagtataatgttccataatgaattgctttgaactaaagtgtttggtataatactcgatatacggcttgaaacatagaaactctaggcaaagtatgtccatgctatattttgtgtcattttgatttgcacaaaatgtttatttctccactgcatttgataaatactagttttaaaataaaacatgaaattgtatttcctttcactgtaatccctttattgctaattcttttgaaatcctattactcgcttggagcctgtaataatttggatttctcctcctgtgtgttgtttttcataattcttcgcgaaaggccaggcaagctgcacacatcaagcgaaacgcctgaggggcggccagcgcgagggtttctggccatcgaccctcacctcccgggacttccagggtcttccccccaccccgcgcacacctccctgcctcgccccgagggcgtcacgtggcagcgtggggcccgcctcctggtgatgtcacggcgctcgcagccgtcgcgctgaagaaaggatgctcgaggatgctgtccaggtgggcggccgcgggcgcgatgcggcactgcaggtaaggggcgcgcggcgcctggatgccctccccggcgcccccggcagcgcggacgctgcaggtggagcccggcccgcgggcctgcagcccggctgcgcccccagaaacccaaagtggggcctctggctgctgcggcgcctgctgcccacagctgcctgctgcagctgcatgcacccggccggggatggcccgtggcaggcccacgcgtgacttgggtcttggcgtgcccgccccgagaaagcgggcaggggccagacagaaagacgggggagggaaaaaaccgctccggcgggggaacaaaatctgaagtgaccacactgcatgcattctaagtagacagaggggcttttaagaggtaactatcaagtgttttcctagtgtcattctgcttcttaaataacgacatgtttactaattacaggcctttgtcctcagtaattagcctcatttctttcaaagcaaaagcgggctggggagtggaaacttcttggttagcaatttaagagccagatgtgcaatctaaattgctttgcattattttgcaaggttccagcatttacagggcatacgtcagaaacgtattttttttttccttccaggtgttttaagtagattaaaaaagaacggtatccaatacaataaaaataaattgcagcttccaaagataacatgtgagcgtaagagacagctacatctctaagaaccaaatgatctttagcagagagtgggggtggagataacaccaaaacctaagaattcccagagttcttgttaattctctcgctgataattcgcttgctgaatggagaggcttgatgacagcgccagatggaggggtcaggtgacttcagttctagcatgacagtgggtgggggattttaatggactgtttctagagcgtttacatgcctttctcggggtcaggaagaaactacagccaggacgtgtgggggcacccttaggggg

SEQ ID NO: 12488 - DNA, 6000 bp, Homo sapiens
agttcaagagatgttcccgcctcagcctcccaagtagctggggctacaggtgtgtgccaccacacccagctaattgttgtatttttagtagagatggggtttcactatgttggccaggctggtcttgaactcctgacctcgtgatctgtccgccttggcctcccaaagtgctgggattataggcatgagccactgcgcctggccaattaattcaatttttagaggtctatgtgaagaaaccctcgactctcatcaaaacacaaaaaagcttgggacttaccaactaataataatatatcctctaaagttattacaatggttgtgagaatattaaacagaatgataacctctggccatctctaattttattggcaataaatccctttaaggaaaagtagtgtttatttccaagagcaagaggtaaccctggcctttgatgtagacacggtccctctgagtacacatgtgatgaatgctggcagactccatggaacacagacctattggtggggggtctactggctatgtcttaggaacttaccttcattcatttaggccttagcaaagatcacagtctatgaagttcatgggcagtgctggcacagaaccaagtgaaggtctccaggcataactagaaagtggtgaagagcaaagttgagaaaaacaagctatctctattgtcagatcaaataattcttctttttaaaaacccttccatggcttcacatttcaattaaaagaaaatgtcacttcctcctcatggcctatggcatgatccagccccaacatcacctcctactattctgcccccaactcattctgtgtgggccacactggtctttccctgttctttctgatctcagaacattttaccatggcattctcattgtctggaccactctttgcattgatcttcacatggctgggtccttctcaacattcaggtctcagctaaaacgtcacccttctcagagaggtctttgctgacaaccatatctgagaaggtatcctgagctctcaatctgtatcgtgcacactgatcatctggggatcatgttacaagacagactttgactcagtggttctggggagggacttgaaattctgcatttctaacaagctcccgaggaatacaaattttctgctccacagatcatctacccacaggggtgggtagacccccatgcctcaatctttgtcacactacctgtgtcatttaattggtggcttttatcaggatcttaaattatttatttatctgtttgtgttggattgtttgttgtccaatctattcatttactagaatgtaaattccctgagagcaaggagtctgtctagcacttttaaattctcagcacttcccacagtacctgacacatcataggtgctccataaatattgctgaatgagtgaaacatcactcattcaagattcattgactctgtgatcccttccagtgtctgcttctgactgcttcagtgagcactcaattatacaacagaaactacactgtaatgatagggcagtgctacccaagtgccagtccagaaactgctagttattggccaacactgaattaagaatcttgtactataatataaatctgctatgccactaagcacaattttatctgagatgagacatttttcatagtaagactttctggatgaggcaagcaatgctttgccttgccttgtggtgaaagctcctcatctcatattagaagggtaacagtgtgtgaactggtccccactggcaagacacattttgagttgtgctgatatagcggatataaagccaaataagatctattttttaacttcagaaaatccatacataggtaagagaattacacattcaaatacataactgcaaatcttttgtcaagtgctataatacggaattaagtggaagaactcaggaattgtagaaaaaaacaaataattggtcttttgtgctcccccttagtcacacctttcctgacacctgctctcattataaccacaaaccctcccaccataccccttcctcctgatcacataccactcatctgggcatgttcttccccttgggccctgaaacactgaagttacaggaccaggcttgggtcttctgagaaattgtgaaagggaactgagaattgtggtagagaacagaaaatgataggagagatagggaattgtgggagaagggagaattgcgggagagaataaagtatcatgagagaacagagaattgtgagagacaatgtggaattgggagacagactaggcagctgtgaaagagaacagaatattgtgtaataagggagaagtgcaagagtggagaattgtgagacagagcaaagaattgtaggagatacgaggaattatgggaaagacaaggaattatgggaaagaacagagacttgtaggtgagacagggaattgtgggagataataaagaaagggggaagacatcaggaattgtaggaaaaaacagagaattgtgggagtgacacaaaattgtggacacacggggaattgtgggagagaagggagaattatgaaagagaagagattattgtgggagagatgggaaattgtgtaagagaatagagtattgtgagagaacagaatgatgagggagactaaggagttaggggagagactacagaattgcaaatgaggatggagaattttaagagaatggaggactgtgagtgaaagtgaagaattatcagagagaagaaagaattaggagagagatgtggaattatgagaaagacaggaaattgtagcatatgacacagaattgtgggagagagcagaattgtgggagagacatagatttgtggagaggacagcacaaagaattgtgggagagacacaggattgtgggagagaacaaaaaattgtggaagagacacaaaattgtgggagaaaagggacacttgtgggatagaaaattgtgaacgagaatattgtgagaaaacagaattatgagagagaatgggagttaggggagagactggggaattgtgaacaatcatggagtattttgagggaatggagaattgtaagagtggagaattctgcgaaagaacaaagaattgtgggggagatggggaattataggaaagataggaaattgtagcatagaatacagaattatggttgagataaggaattgtgggagagaacagagaattgtgagaggaaaccaaaaattgtggggagaaacatggaattatgggagacacagggaattgtgggagaacagagaactcagggagagacaggaaattgggggagagaacagagagttctgggagatacagggaaccatgggagagaatacagtgttgtgggagagacggaataattatgagaatgaagggagaattgtgggagaaaggaaatcatgaaaaagaatattgtgaaagaacagaattatgagagataatggggaattatgggagagactggggaataagaacagagtattgtgaatgaacagaacattgtggaaatgaataattttgaggaattgtgacagacagagtcatagggaatgatggaaaagacagagaactgtgggaggaatggaactgtgggaaacagaattttgagagatacaagaatttgtaggaaagaataaaggcttgctgggaaacccagcaaattttgggaaaaacaacagaattacgggcaagacagggaattgtgggacagaaaagtgaattgtgggagacacaaggaatcatgggagaaacaagagaattgtgagcaagacaaggaattgtgggacagaaaaatgaattgtgggaaggaatagaattttgggagtgacatgggattgtgggagaaataaggaattgtgggagagacagaagattgtggaaagaactgagaattgtgggagacagaactgtgggtaacaaaacagaattgcgggagtgaaaaggaattgtgggagggacaaaagaattgtgggtaaagagagaagttgagctgtgatagttgaaatggaatccttgggctatcctgtaggcagttctgatgctgggatggcccttctgagttgtcccctttggggctaggggcctggacttatgtgcccttgcagagaccctcataggatgcagatcgtccccaaggaggggaagtgattttgtgtgaggcaattctcttaggcagaggacaattcctggagactcagctgaaagctgtgagcccccaacactttctgcaccaggggacatctggacgtatttcacagagccactatagttatatagaaagatatatgtttctttattaacactttaagtaacaagatcaaattaccttaatttcaaagtagtggatggatgatattttgagacaggcacaacaaccatatgtgacataatttatctgtaatgtgtattagtgccacatacagctaatagtactaggatttattgcctacatccctgatggaagaaaatgctaaatttctgttggaggtaaatgaaaatacagacattcaaaatcacatacccagttaagaagaatttagcagccagaacactgtcttgttcacttttggatctccaccaccgaagttatgggcacctactaacgtttcttgaatcattgctacaattaaaaccgataagatttaaaaaaaaaacaaatttaaaaactcctccaaagcactccttctgccgcataaagcatacatagtagagctcttcactctagggaagcctctggagcagacaaccttccctgccaccgccacattttgaaaaaggctcctggcctggaggggcgggcccagaaagcggcccccgcagcagttacaggccggggcgaggaggggacggaacccgctctccgtgattgacggaaaatattactcttcagcccgcctcccgcgtgcccggaagtcccgccttctaaaaaggaagtaggggtgcgtgagaacgccggcggtgaccgcagccacagcggtgaccgagtgagaggaaggcggcggcggcggcggcggcggcgtgaagtcactgctgctctgggttcgggttggcgactgaaggcggtaccggcctcccggaacagcccgggggagggcttaggtgcagaagggcaggctggccgcggccggtttggtctggggaccacgggctggagcaggtgggcaagcgccgggacggtgtggggaagacacttggcagcttctcgacctctggtgtcccttcgtttcttcgaattcctattcatgcgccgcacccttctcggacccccagcccctcgctaaggctctggggatgggggtcaagtctaggctcaatggacctcccctcctccacccgggtcaccactcctcggaaatcctcgccccactcccgcctcaggcctgtacctcctggctgtgacgtggtttctcagcgactgcctcacctcagtcccaaaatcctcactgccttagatacatacgtgcccccagaggttggcctgggtttcacagtatttccctaagggggcaatatattaaagctgtccttcgaagttagtaccctgcctggtagatgcccatgggatgacaaagaggaggaacaagggttgaccagattaggactaacgagagaatagtctgagtccagagacattaatctgtctctttgttttggcaggtggaaatttaaaattgtttacagtcaacactgtttccagccatgggtttgtctccatctgctcctgctgttgcagttcaggcctcaaatgcttcagcgtccccaccttcaggatgcccgatgcatgaagggaaaatgaaaggtaatcggccctttgcctagaaaataaaaacaaaagataattcacggctgggtgcggtggttcacgcctgtgacagcactttgggaggccgaggtgggtggattgcttgagctcaggacttcgagaccagcctgggcaacatggcaaaaacctccctctacaaaaaaatacaaacattagccagacgtgctggtgggtg

SEQ ID NO: 12489 - DNA, 6000 bp, Homo sapiens
tctgttttatccgagactaggattgcaacccctgcctttttttgctttccattttcttggtagatcttcctccactcttttattttgagcctatgcatgtctctgcatgtgagatgggtttcctgaatacaacacactgatgggtcttgactctttatccaatttgccagtctgtgtcttttaattggggcatttagcccatttacatttaaggttaatattgttatgtgtgaatttgatcctgtcattaggatgttagctggttattttgctcgttagttgatgcagtttcttcctggcgtcaatggtctttacaatttggtatgtttttgcagtggcttgtaccggctgttcctttccatgtttagtgcttccttcaggagctcttgtagggcaggcctggtggtgacaaaatctctcagcatttgcttgtctgtaaaggattttatttcttcttcacttatgaatgttagtttggctggatatgaaattctgggttgaaaattcttttctttaagaatgttgaatattggcccccactctcttctggcttatagagtttctgccgagtgatcagctgtcagtctgatgggcttcccttgtgggtaacccaacctttctctctggctgcccttaacattttttccttcatttcaactttggtgaatctgacaattatgtgtcttggagttgctcttctcgaggagtatctttgtggcgttctctgtatttcctgaatatgaatgttggcctgccttgctaggttggggaagttgtcctggataatatccagaagagtgttttccaacttggttccattctccccgtcactttcaggtacaccaatcagatgcagatttggtcttttcacatagtcccatatttcttggaggctttgtttctttctttttattcttttttctctaaacttctcttctcgcttcatttcattcatttgatcgtcaatcactgatactctttcttccagttgatcgaatcagctactgaagcttgtgcattcatcacatagttctcgtgccatggttttcagctccatcgggtcctttaaggacttctctgcattggttattctagttagccattcgtctaattttttttcaaggtttttaacttctttgtgatgagtttgaacttcctcctttagctcggagaagtttgatcgtctgaagccttcttctctcaactcgtcaaagtcattctccatccagctttgttccgttgctggtgaggggctgcattcctttggaggaggagaagcactctgatttttagaattttcagtttttctgttctgttttttccccatctttgtggttttatctacctttggtctttgatgatggtgacatatagatggggttttggtgtggatgtcctttctgtttgttagttttccttttaacactccggaccctcagctgcaggtctgttgcagtttgctggaggtacactccagatcctgtttgcctgggtatcagcagcggaggctgcagaacagcgaatattgctgaacagcaaatgttgctgtctgattgttcctctggaggtttcttctcagaggggtacccggccatgtgaggtggcagtctgcccctactgggggatacctcccagataggctactcgggggtcagggacccacttgaggaggcaatctgtccattctcagatctccagctgtgtgctgggagaaccactactctcttcaaagctgtcagacagggacatttaagtctgcagaggtttctgctgccttttgttcagctatgccctgcccccagaggtggagtctacagaggcaggcagccctccttgagctgtggtgggctgcacccagttcaagcttcctggccactttgtttacctactcaagcctcagcaatgacaggcgcccattccccagcctcgctgctgccttgcagttcaatctcagattgctgttctagcaataagtgaggctccatgggcgtgggaccctccgagccaggcgcgggatataatctcctggtgtgccatttgctaagaccattggaaaagcacagtattagggtgggagtgacccgattttccaggtgctgtgtgtcacagctttgcttggctatgaaagggaattccctgaccccttgtgcttcccaggtgaggcaatgcctcgccctgctttggctcatgctcggtgtgctgcacccactgtcctgcgcccactgtctgacaagccccagtgagatgaacccagtacctcagttggaaatgcagaaatcacccatcttctgcattgctcacgctgggagctgtagactggagctgttcctattcagccatcttggaaccaccctacagtttctttcaatacttttcatgttcaatgtcttacacttaaatttttcaactacatgaaatttattttgatataagaaatgaggttgggccaggcgcagtggctcacacctgttatcccaaaactttgggaggctgaagtgggcgaatcatgagatcaggagttcaaaaccagcctggccaatatagtgaaaccccacctctacagaaaatacaaaaaattagccgagcgtggtggcgggtgcctgtaatcccagctactcgggaggctgaggcaggagaatcgcttgaacctgggaggtggaggttgcagtgagcagagattgcgccactgcactccagcctgggtgacagagtgagactacatctcaaaaaataaataaaaagacaaatgaggttggacaatagcttgattttttaaaaactccaagccagttgcccaataatccattttgccattgatgtgacttgaaactaaacacccatatgtgcttttacttaattctgctcacttctcagtttcactgatgcactggtactatgccattggaggcaatacagcattctaatgcatttacagatatggaagagaaatcctccccttttattttcattcagaaattgcctggctattctcacatgtggtcttaccccagtcagacccaacacctcacttttataacaaatatttggtaatgcaccctttgttatatgaaaggagatatttgtggataatgtaaccccagtcttcatgataaacaaaaaggcccagctgatttccaaaatgcaccccagtttagaatcagtctggcaagtatcacatgaaatcctattggtatttgattgggatcacacagcatttgcaaatcaatttaagcaacatttctatttttacaatattgtggcctctagccccaataacaattatttctcttcatttacttatatctttgtgtctgggcagggtcctgccaggaaacagacggcatgttaaagtgagaaactgatgagttcagcaaagtgactatttatatatttggacaggatttaaggaagtaagaaaggatgatgcaacacttcagaggggagtctttccgacctcaggctgaaggagaaggaacgattactggaattcagggaggagagcatcaccaaacaagagcttcattagaggactgcagccaacgcagggccaggcggagggagccagagggaggcaggctctgctctccctcttcctgcccttcagtttccaaccacggcctcctattggccaaacccaaccagaagccagcgagcaaggggctactgatgaagcacatatagctcagcctccagagacacagaacaggataaaaggctgagacagtgggtctggtggggcaaagagaaagcttgcacctgccaggtaaagcattatagtccccatcctccccccaccaccttagttcttgtgcatttcccatcagttttcttccaaagcatttcagatctcactgatttgaatgggacctcttcttctattaccaatttggatcagtaattatttatgtatgagaaaactattgatttttacatatcgttgcatagcagagtggtttaataaggagacatttggtttttactgcctgtgtgggtatcacttgctatgtgacttgaggcaaatccaatatttcttctgttataaattccagtatttgtaaaaaatgggtaataagatctctattttatatagttttagtatttaatgagataatacatataaagtcattaaaacagtgtctggctcataaaaaaccctcaataaatgtcacttattactgtatctggtttttgagctgctctattgcaccattgagttttcagcccagtatatgttaaccctgatcattatctgcagaagtccccgtgccacactctacatcatccaaattctctccaggtggactaagtagattaaagaactttaaacataactaccatattttggctctatctacaaaatgtccaataatcagttaagaaaggaacaattctcttggggcccacactttgagaagcaaatgcagctgaacttttttagaggaaagtgagtgaaccaactggtagctttgccactgcttaaaaaccagcatcctttccagctgggtctaagacagaataaggtaaatttagatatgtctctaatatatctatagaacagtggttctcaacccggggtgtttttgccccttaggggataatttgcaatgtctggagacatctgtgattgtcataactggaagggggcagtgctattggcatctagtgggtatagagcaagggtgctaccaaatatcctatggtgcaacagagaattatctggtcaaaaatgtaaatagtgctgagggtgagaaaccctgctataaaaacgaaagaaatttggtctacagagttgtttggatttagacaagacgttgccccaatagtggtgatagaaataagaggaaccccgtgcttttgcaaagcccatatctggggtggcttaaataatcatgctcctccccatcccccgacctgatctttgtagttggaaactccagggctggctgcctgtagtctttgtgactacacttcctgcctcccatcacttcatctcagaagactccagatataggatcactccatgccatcaagaaaggtattttaaacattggaacacatatagataatttaagtaggtagatgtatgtgctgttataaggaagtggggaggagagaagagggaaccgaaatcatatgcacaaaaattttttttagaatataaataaaaaatgtggtagtctaaaatgtcaattcttcaaagataaagttaggctttcagtaacgttagaaatggttttctggaatatgtctccagtctacctaactttgaggaagtaaatactgtaaatagatgtttcaaacgcattttaaagcaatgatcctagcatgtctttaagctacagtattgtgctgtctttgaaatgtaaactttgatgtcttctctttctcttagttgatgctattgggcccatctcaagctgatcttggcacctctcatgctctgctctcttcaaccagacctctacattccattttggaagaagactaaaaatggtaagaacagctcagagaaccttaaaaagtgttatctgtaatctttgtggaaacaactgaaaccagctggcaagagcaatattgaagaatctgtacttaggttatttgctgggggaaagtgcttcctgatatttcacaattggcattaatgaagggggcatgtcacaatttcagattaatcaacgcttgctctgttcaacttcctacaagaattaaatatgtgctgtggggaggaggagcagatgtttgaattggggacatagcttctatgtatctcatttcttcagcctacaattttggctttaaagccataacaaatcactgaattactgaagttactttgtgctttttccagcatatggtgttgtcttaatgactgtgtggatgaaagtgtgtgggcaggctcatagcaataaaatacgggaaatccccgggcttgagtgctgtcaaagaaaactaaatttggacagtagataaagatactatcaggactattgcaatcggcag

SEQ ID NO: 12490 - DNA, 6000 bp, Homo sapiens
tggtgggcgccatcttgtggcagcatggttattaacatcttggccattggctggatcttcaagccaatgctgacacgtgaaggcgtttctgcagtccctgaaaaaaggtgcaggtgcaggaaggaagaaacaaaaatgcctttctcgaatgctaaaagcactgattctggagataggaagacttgcaaaagagaactagaaaaaaagaggaaataaaacatattggggggaagggcagaggagtcctgagactgtgaggaatcaaatgaagattccatggagaagtagcctgtataacaggaatggcccttctcaaatcttctccatgccaagccccgggcctcaaatctagcaggttgttcttgtgcttttccaacagccctcatatatttgaatcaattatccccaacatcttcccacatattttcagcatttggtactgatccctctaccagatgccctgtccccaacaagcagcctcgcctcctatatctgcccaccaatggatgcgtcctcaaattctgtcctctctacatcaaacatgttttatgtcaccgacttcatcatcatcatctcacaaaacccagattctttcctcacagagcctatctgcattcgttctcattccaaggagaggtggcccttcccttcctaaattgcaagcccacccaccactgcccctggttcattcactttccctacttgggaaagcggctccatgaggttgactctgtccgttgcacatgtgaccactcttctccatcctgccggcttttcctcctcacttgaacacacttcttttaaaattatcttccctccaaagatgtttgtcgcagcattgtttgtaatttcaaaaaattaggacaagcacaaatgccaatcaatagaggattcattaagcaaaataccacatgcataaccggctacagaacacagccactgaaaaaaaagaacaagacagatctgcatatccaaaccagaatgctagctggaaaaaaaaaatgatgcagaatagcacgtatcatgtgaactcagttttcaaaaagaattctgtacgtaattatatgtcagtatatacataggaaaaatcttgaagaacatataccaaaccattaacaatggtcaactctgaggagtggaatttggagagctttcatctgatgtgttctacattcctttattgggatatttaggaccatgtaataacattatactcagaaaaattttatatacaaaagaaacttcccttaattctatcaatatcatcctctgtttccctttaattttcaccaacatccatccatccatccatccattcgtccccatccattttcaccaacatccatgtgtaagaccaggctggatggatacaacagcccttgggctcaaaacttgtacagtctggtgaatgtaacacggagccaccaaaatgtcatccagcagagaaagtggcaagtacgacagagctttccgttcagatccaagctttgctgctgaatttgggtaaatgactgagcctttatgagcctgtttcctcctctgaaaatggggattatagtaacaagcagagagaacaggagtggtgggtgggtagcgccttaagtaggtgttggtgcagaggactccatcccatctgggccacagaccatcaggaggcacgtggggacttggggacaaagaaaacaagcagcccatatctgccggcaggacctggcaaagtgggcgtgacaccaacaagttgcatcccagaggtgaccacaaagcgcccaggatttgcaaagctaaggtcaagtggaggcaggaggagacagtttcaggaaacacctgtggcctatctcacccgtgtcttccctggccagggaagggcagccgcttaaaggggccaagggaagctgcagcgtggctcctaaacatggacgcacagtagctgtcctctcaggagctctgcacccccacttaaaaccaggatcacaagagatttgtgtaaaggaagcctcttgtgcatttcttcatctgaatcgttgacttaaaagtttcttccacgtaagtcctttcactttagctttgtatatatttagcattgatttcacaacaaacaactgattccaggcacttggtgttttcccagaccttgagctttttccagggttgcacgttatttccatatgtggtacttcgcggcagccccagtatggggaagccatttgctgccttatgaattgtctggtcatccactcgagaggaaagggctgtgtccagggctggggaaggccccaagagtggttcttcaggcctactgttggcaacagcccaggaatgtgtgaagtctgtaacaacaagcgtagtaataataattccagctctgctagttgaacgctcactttgtgccagctacttttctaagagttccacgatatgaacaatttaatcctcaaagccaacatctgagaaagatactactattcttatcccaatttgacagatgagaaaactaaggctcagagaggcttgtctgctggtgatttgtgtgtctgggaagtgcacgttgtctggcaggcttgcctggcagaagcggttcatgacaggtcttctccattttggaatcaagatctgtgtcagcatggatggcaaggggaagagtaaggaaagattggtctaggagatgcccaggagcttttggcctcacagtgcagggtggggagagcagacctggccaccaaggaccagtttctgggcttgggcagaagccaatcatctggctactttacaagcagatggagcttcttcctctcagtaaccttcctgccctggtgtcaattccattttcattttcatcttttatggtactggttgtgtggagaaaactgaaggctcatttggtataagtaagtaactcatttttatgagtttgcttgacatagatactagactgtatgtgtgtatatatacatataaacatgcatatgtacataaaaaatatatatatatcatatatacatgatgatacacacacacacacacacacacacacacacacatatatatatatacgtatacaagcatgctttacaaggccaattgactggtctacaattggctgacacttggtggcctagaagccagggtatgtgagtctcgcttttctagaaagctgacaaactctccagttccaaggatccttgctcagtcaacggctggaagtcatttttacttcgctgttttttgtttgtttgtttgtttgtttttttagacaaagtctcattctgtcacccaggctagagtgcagtggcactatcatggctcactgcaatctccacctcctgggctcaagcgatcctcccacctcagccacccgagtaactgggactacaggtgcacaccaccatgcctggctaatttttgtatttttttagagacaaggttttgccatgttgcccgggttggtctcaaacccctgagcacaagtgatcctcctgcctcggcctctacaaagtgctggaattacaggtgtgagccactgcactcgatccattcttacttactttctttactttatttccaagcaaatgtttggagggaaaccaagagacttggatgcggccagccgaggcctttgggtttacaatcacaaatgtttttggtttgcccatgaaggcccaggctgcactctctgatgtcacaggaatcacctctcaaaccatgcaccaggtcttgaattcccttagggtgtgatctttagaggtccatctaggtatacccacccaagccattctttgactgctgacaggccttccttcataacaaggtgttccacagtccatttatatatggatgtcatctctgcccaccctgctgccaatttggttttctcccactcctggggtgtaaggcaagatgaaacatatcacatcccgttctaaactttattcttgtggccaggggtcagcaaactttttctgtaaagggccagatggcaaatatcttaggttttacaggccaagaagcaaatttggcatattatgtagctacttatatagtaaaataaaaatttccacaattatgtaattgatgaaactcaaaatgtaataataataatcgaaggcagtttttttgtagtataggtttaataatgagaagaatggaatcatttttggaggtgctaacattctgcttggttggaatttaaagttagtgttctgtatcagcaaatccattgccaatgttcatctaaaaatgttttcacttctgggccggatttcgttcaaaggctgcagtttgctgacctctgctcttggttacaccttttgaggcccttgctctccgagcataaaatggaatccatttatcagactaaatcgggaagattaaattttccagcctcacgaatgctcagccattgactcactcgttcatacaatgaacactcattgagcttatactacatgccaggtgctggaggaggcatggggcgcccaggagaaagatgctcgctttgcggccacagcccagtgggagggagacccatacctaccggtgctgtctcagaaacttgtggaacaaagatgaagcaatgttcatgttattcgcctacatctgtgaattacacaaggaagacgagtttgagaaatccgaagttcagtacaaatttatggtaacttttttaaaaaagaatacactgaagttttcttagtgaatggaataatgttccctttttctcccctgtacacacaaatacacaaaaactaacaaaaatacgtcgtgtgtgtctgatttgggttgtatttaaatcatttcataaatgactttttcccataacttcagtttcaaagttttaaagcacagtcaattaatgatttggcaacagctaagaaatcacaagttcccttcttttcatgtaaacttctgtaaaacacacgctacgttctgctgatggtaaatagagccatttcaggaagttagccagtttctcttctcggccacctcctgcatagagggtaccattctgcgctgctgcaagttacggaatgaaaaattagaacaacagaaacatggtaagccacttctatttctttagcaaagctttccaacagaatatggggtttctgacccagaaatctgggttggtggcaaatggtgtgagcctagaaagtaataaatgggcaaataaggataaaaattaaagatcgaaacaactgtaaatgcaggtaaagcggcttgctatgatctttaatttgtgcacacgttagtataaaggaattagagagtaaattttgaaaatcaaatgcagtgatgatcttactaatttggacaggaaaataagaaaatttcaagttagaaattgaactggaaatattacttactggccctaccagagacaatatcctcttccagaacaacagggttggaagagaaggtgagggaaatattcttcctttgctatttctgtagaaaaggacaaactctcttccttcacatacataggtcaattgctagatcctagtgaagcctgagcttaacctactgttggaggcttaaagttcgacattaattgctacttttcttggtcagagttttaaataattaggttggtacaaaaaactgtgattacttttccaccaacctaataacatgctacaatttctgtaattattattttacactgtcaagacatagcaggtggtccgtttttgttattgtcaagaactgtcagactaaaaatgaactttacacttctttttaaatgatacattttctagaaaattcaatgaggtttaagagcaattgaaaagtctgatttcaagagagtctcatccaaaatgtactatatatttttccccaaagtccttggagttaattttgacaacaatttaaagtacacttaagtcttttgaagttaatgggtctgccacccaggttggagtgcagtggcgtgatctcagctcactgcaacctccgcctcccgggttcaagcgattctcctgcctcaacctcccaagtagc

SEQ ID NO: 12491 - DNA, 6000 bp, Homo sapiens; identical to SEQ ID NO: 3484

SEQ ID NO: 12492 - DNA, 6000 bp, Homo sapiens; identical to SEQ ID NO: 3131

SEQ ID NO: 12493 - DNA, 6000 bp, Homo sapiens
ctatatttaattttgtgtttcttaattccacttaggccataagtcttacaagaaaaagtattactaggaaattcttcacatcttgcaagggtaaatttaaagcagaattttagctttgccaccttaaaatttcacaagcaggaaaaacccaaaaatcctgctcttaaggtgaaagcgaacatctatttatgtggtacataacactggcattaaggtcaggcacagtggctcacacctgtaaatcccagtactttgggaggccaaggtgggaggattgcttgagttgaggagtttgagaccagcctgggcaacaaagcgaggccctcatctctacaaaaacatttttaaaaaattagccagacatggtggcatgcacctgtggtcccagttacttcggaagctgagctgggaggatcacttccccagaaggttgaggctgaagtgagttgtgatagtgccactgcactccagcctgggcaacaaagcaagacactgtctcaaaaaaaataaaaaaataaaagataaaaaataaattaaaaaaaaacactgtgtgaaaagaaaataaatcttgggaccccaaaatcactaagccaaagggaaaagtcaagctgggaaatgcatcaggcaaacctgcctcccattttggtcctaaataagatagctacatagatgtttttttaaaaagctacatacctccctcataactggcccacaaggaatttccctaaaacagttctattgaattttaccttggtaatgtaaattgatagcttatcttcacaggtgcaggacaaaaaagacagaactcaaagtcatcctgcgactaacctaagacaaatgtttatctgattgcttcctttgtttttgttttttgtgttttgttttaagatggagttttgctcttttgcccaggctggagtgaagtggtgtgatctcggctcactgcaacctctgcctcccatcccacccccatgccaggttcaagcgattctcctgcctcagcctcccgagtagctgggattataggcacctgccaccatgcctggctaatttttgtatttttagtagagatggtgttttgccatgttggccagcctggtctcgaactcctgatctcaggtgatccacctgcctcggcctcccaaagtgctaggattacagccatgagccaccccacctggctggattgtttcctttgtttatgtaaaaatgcagtcactgaatcggactaaggcatgtgactatttctctaccccctgcaacgtgtaaatcgtgtattcagcaaaagactgatcaaagaccccagagaatgcagcctttagtctcttatctacctatgacctagaagccaccacttcgagttgtcccgcctttccggaccaaaccaatgtacatcttacacatactgattgctatttcatgtctccctaaaatatataaaaccaagctgtgcccaaccaccttaggcacgcgtcgtaaggacctcctgaggctgtgtcacaggtgcatccttaaccttgacaaaacaaactttctaagttaattgagacctgtctcagatacttttgggttcacaactgtttacttccaggcatgttcttctctacttccaggtatacaggggattacactttccctgccctttttagttaggcacagctacttgactagttttgataatgaaacatgaatagaagtaatatgtgaatatctgagctatagcatttcactgccagtggtagactccctagtccacttctttccctgccttggcgaaccctaagcatcatcttgtgatgtggacatgataaaatggtggagtctccatcagcctgctacccttctacctgcatgtcctgccaactagcacacacaaaaaataaatctttgttgttttaagccacttggattttagggttggtttccaaagcataagctaggttatactgactgttgcaaattaatgccataaatgtagactataatgatcccagaagcaaactatcagctcacactgatgagaaatacatatttctgaatgccatgtcaaactttaaaaatttaaatagcaatactttataattgaaaaataaaaattgtatatatttatcatgtacaacatgctattttgaaatatgcatacattgtgtaatgactaactgaatactaatattttcaataaaactaatataaacatttaatttttaatttttatatttcatgtattttttatcgctgaagtttattatatgatggtgatattctgcttcagccaaatagtgacttttaacatgcagctgctttgcattcagccaatatatgtatattccgtgcccctctaaaaataatatacatacaaatgatataaattaaatcttggttatgtgtcctttacttaaaatacatacttcacagaaacctgaaacaatttgtaaattaagtcacaaatttattctaaggaagaataccttgatcttctagaattcaggcattttttgctgccaccttgcatcctctatcttgtctcttctgctgccaccagctggcttccactactgctaaatttcagcagccagcaggattcaattcagtgctttgttttgactgctgagtccctgatgaaaacaccaagtcagttgaataactaaatttttaggctggaaacagaaaagcacaaccaacgcatttcctgtgtactttgggctatcagatagccacatggtagctggtacttgtcccagtaagtggtccagacaaggctgcgggctaacaaaagagaagacatttcggttcttaagttaatattctgctcccagagaagaatattgttaaaaactatagagtcattatataagaacagacaaaggtcagaacaaacacaatagtgtatccatagcctcagtatatggccaggcgtggtggctcacacctgtaatcccagtactttgggaggcagaagccggcagatcacctgaggtcaagaggtcgagaccagcctggccaacatggtgacaccttgtctctactaaaaatacaaaaattagctgggattggtggtatgtgcccataatcccagctactcaggaggctgaggcaggagaattgcttgagtccgggagaaggaggttgcagtgagccaagatcatccgactgcactccagcctgggcgacaggagtgagactacgtctcaaaaaagagaaaaagaagtctcagtatagtgttaagcttttaataacttcaggagtataaattatatgaactcatacattatttgaaagtaaaattatttaactgtattaactataaaattatttaactgcctatttggtttgtgaatttttgaacagaaaatgtgttttaattttttgtttcagtcaatgtttgccatcttccgttaaagggactaaaaaatttaaaaatgttcaaaattcacaaaataaaataaacatataagaaatttaaataaaccttcaagtgactttttgcaagttggtagcattaatacttcagaaattattaaagcttaaaacagcactaagtcttttgggatacttgtatatggaaaactgtggagtaacagggtgcttgaatacaaacttttataatttacacccagctatgtccaaagaaaacggaaataatttataacaacacatacacacacaaataggcaaagatatgtaaaacagtcataagctgtcttgaagctggagaaacatgtccctaagtgagtaaaactttaggaaaagcagggagaatgaggcaaattagtagcaatatttgtaatataggtttctggtattattgtatattttcacttggaagggggttgaggatacatttttatttgggatacttgttcttgagatagtattatgttctcaatattttggtattagcattattatagctaatgatgcttttccagaaaagttgaaacaaataacttttaaagatgcacataaatagaacgtaaaaaaaccccaataaatagttttcttttctcttagagattatctagttcagtggttctcaaccttggctgcacagtgcaatgacttgaggagcttaaaaagtataaatgcttgggtcccactgagcatctgatttaattggtcgaggatacagaacgggcatcgggaattttaaaagaccttggtgatcctaaagtgcaggtaaggttgagaactgctgctctagttcaatatataatcaggtatacattaacgttaaaatgtgtaggtgttcagagttctgatttttaaccatagcaccatctcaaatattataaaaggttgaaaaaagagcctaatttaatcaacatggataaatttcaaaaagcatgttgaacgatacaagccagacacaaagagtacttattgctttctatttacataaagttaaaaataatcagaacagggggaggggctactgactaggaagggacgcaagaaggaaattcctgagagggaaattttctccattttgattagggtacacgtatatatatatatatatatatttatcaaaactcacagaaatggacaattgagctctgtatgtatgatttcattacatgtaaatttacacttcagtaaaaaggataaacaattaaatctggatatctatgacagggtcggggagggagagattattacttcagacgaccccaaatcctcatgggttaaaagaaacagcaaacccctgaccagaactggcgagaatggagagtagacagcagggagggccaaagcctaagaaatcgctacaagactagatgccgagttcgaactactgcctggacggcagcgcccgagcgcccgcaaaaataagcccccgtgccatttccggtactagcaaatcctcctgtatgtccccactggaagagtccggtgggaaaccgtgccaccgcaaggaaggagccggcggtagcttggttcctgagcggatgctggggctgtaaggcgcgcgcggtcagctgttggcggtgcagggaggaggacgccggggctcgccttccctcctctgccgccgctgccgccatgattccggtgtcgctggtggtggtggtggtgggtggctggactgtcgtctacctgaccgacttggtgctgaaggtgagggccttgggcctaaggtccaagcccgcggtgcccatggccggagcgcaaggccttcttttctcttcccctgcctggcgcctcccgggctggacggtgcccacgtgcgacagtccgcgtggtggatcggcccggtggagtaaataaaacattgccggccgcgggagggttgtggcggcctgcgcggctgccactgtcgcagtgcggggcagtgcaggcccttcagccttcgggtcctgcccgggaggcgccagtggtgggatcgggagggccggggccctgccagacccagcagctgcagtgcagcagggaggaaaagaaaacgtctgcttagtaaagacagtgctttcccttattgtttttaagttcaaaacgctctagagactcagatattggaatgaatctaaatcaagtcgtgattgaaatcagtagtctcaaatttttaaatgcatatgatcatctggtttgcggtcaaaatgcagattccgattcagcaggtctgcggcaaggcctaaaattctgcatttctaaccagttcccaagtgctactgatgctgccagatcacagagtgtacttcaaagtagcacactcaaatagcaaggatttacataaccagtttctaactacttgaattctgatttacacgctgcaccccacttcttcacactaaccagataccctgggtgcacggtccattttccagttatttgagaagggtagcaaaaaatcaggaagagtcgtctgaccacatgcttcaggcaagcttttggaattgagtactggggggtaggggatggggaagagtaactatatatgtggaataagatcatataaattctcaagtgtttaataaaaattccagttatggatagcaaaat

SEQ ID NO: 12494 - DNA, 6000 bp, Homo sapiens
tccgttgattcattgattgatccagtgaatgtccaaggtagtcctgaatgttcttaattgaaataattgggtgggtgtagagcaggctattaacagacttaccttgcataatgacttttcaatgaactaattttcacatctctagaatagttgtaaaaatttttagaataacgccccctccccttttttttccagaataatgacttctcactcccaaacacactaaatcgtatgctaaatcataatattgaaatcatagtttcaatattacagtttcaggcaaagacacattcaccagtttccctgacacaacagtttctgttcaaagaatctcgaatggaacaattttgagttacaggtcaagtgtggataaacattttattttgtatgccatgtagatggggtgaagaggtagcattttttttttttttttgtcatagtcttactctgtcaccaggctggagtgcagtggtgtaatctcagctcactgcaacttccgcctcccaggttcaagggattctcctgcctcagcctcccgagtagctgggactacaggcgcgcaccaccacacctggctaatgtttgtatttttagtagaggtttcaccctggtcttgatctcctgagctcatgatccacccaccctggcctcccaaagtgctgggattacaggtgtgagccgccgctcccggctagaggtagcatcttttactactctttagtgcagaggttgctaaacttttcctgtcaagagccagagagtaaatatcctaagtttcaaaggccaaaatgtctctgttgcaaaactacttaactttgctcttgcagcatgaaagcaactatgcacaatctacaaacaaataggtgtgaccttgttccaataaaactttatttacaggccgggcatgatggttcacacctgtaatcccagcactttgagaggtcgaggcatgtggatcgcttgagcccaggagttcgagaccagcttggggaacatggcaaaaatccatctttactaaaaatacaagaattagctgggcgtggtggcgcaccacctgtagtcccagctattcgagaggatgaggcaggagaatcgcttgaacctgggaggtggaggttgcagtgagccgagattgcgccactgcactccagcctgggcaacagagcgagaccctgtctcaaaacaaaacaaaaaggtgaaaaacaaaaaaagctttatttacaaaaacaggcagtgggccaaatttggcccatgtactcttgtgtacagacccctgctttagtcctgtgagcacctattatttccctgtgctttgaacttctttattttgccctaaagggttttttttcttttcttttttttttccgtgttactttaagtgtggtttattttgagggcaagataatcatcatctcctaaaaggctgaaaaattaatgcagaaaatggcacagaatgaacaatgtaccttgtaatgaatgattctcccacatcctttcctctgtcagtcccgccactctcaagttttcctttattcctctggtgaataaaagaaaccttcattacattacattacacaaattatgcttattttcaatattttgacagttctatattactcttacagacttgttttcattgttcaagtaatacattttaaaattactttttttaatttttaatttttgtgggtacatattaggtgtatatatttgtgggtacatgagttgtttcgatacaggcatgcaatgtgaaataatcacatcgtggtgaatgtggtatccatcccctcaagcatttatccttagtgttacaaacaatccaatggcagtctttcagttatttttaaatttacaattaagttaaatgaatacatttttctatctgtgtttgcatatcttagtttgggatagaatgcatcataattttcctattacaattaatgaaagtattttttttggtttaatggcttttcactcagcagttgaccgttcaggaatgaattcctgtcggtaagtgatgggtaggtataacttcagggaatccccaaattgccctcacctctgggggaattgcaagttcaaggcaggtgaaggctactccagctaggaactcacggccactattcaatgtcagtggggacactgaaagttgtgaggagattgagaggaggaaggaaagaggaaagaagtgagtcctggtgtcgtgcttgggtgactgtcctctcgctgtgcacaggaagctttgtcaagcagcagacatgccatgtatggcaatgatcccatcccccatctatccatttgtgattttcccatgccacctgaggccattccttggtctcagtgtccttatttgtgaaacagagttaaaatacctttgctatcaagtatgtagatttaccatgaggttaaagcgaatgtgctatgcctatatgaagtatcacttttagttgagcattgagaaggaataattagggccttgaaagatgacacccttcctccccccgcagacattagcatgtgaggttcctgaagctgaagctggttgtttgttgtttgttgttgttgttgtcgttgttgttgttttgagatggggtctcgctctgttgcccaggctggagtgcagtactgcgatctcagctcactgcaacctccgcctcccgggttccagtgattctccgattctcctgcctcagcctcccgagtagctggcattacaggcatccaccaccacctccggctaatttttgtactttcagtagagtcggggtttcgccatgttggccaggctgatctcgaactcctgacctcaggtgatccacccaccttggccttttggtttttttgagacacagtttcattctgtcacccaggctggagtgcagtggctcaatctcagctcactgcagcctccacttcccaggtccaagcgatttttgtgcctcagcttccccgagtagctgggattacagtcacgtgccaccacacctggctaatttttgtatttttagtagagacagggtttcgccacattggccaggcagatctcgaactcctgacttagagtgatctgcccacctcagcctcccaaagtgttgggattacaggtgtgagccaccacttctggccccgaagttggttttttgttttgttttgttttgtatttgtttttttccagacagtcttgctctgccgcccagactagagttcagtggcatgatctcagctcgctgcaacccgcctcctgagttcaagcaactctcctgcctcagtctcctgagtagctgggattacaggcgcctgctaccacgcccggctattttttgtatttttagtagagacagggtttcaccatgttggccaggctggtctcgaactcctgacctcgtgatccacccgccttggcctcccaaagtactgggattacaggcgtgagccactgcgcccagctgaagctggttgttaagagtaagtggctagggctaacttgtatgatttttattgctctccttttcactgtgaagggccaggaaatgtcgatgttggagctgcaacattgaacatggttcctgactttgtggaactcatggtctaagatgtgttctagagtgaggtccaaaaactcttgggagaatcccatactaggggccaaagtcctgctagggtgtgttatggaataacagcaacaaaataatgtcaacagccaatgagcacaggataactacaacacaccatgatgtcataacttggacaaaggcttgtgaccccctgactttggcgcaacatgaaatgagcagaaagtaaggtatattatggaataagccccaaaacttgagagaatcccatgctaagggcttaagccctgaccaagacaagccagacaggaccatgaatgtgtggccatgttatactgagctcatcagcacctgctgagctcctgtgtcacctctaaagccatgcgcacaagttttgcattgagataattgctctactggtttctagatatagttgaattctccacccccactcccactgccctatgacctccagcaaaacaaaagcaggtaggtagtaattgtgttgtgagttaacgatatctatatctttggataataaaatctatatcatttcagtggtagcattggaatatcagttgcccttccccatgaagaaagcacattgttatcgtttaaatcattatcataatcaaaaatatcaaagacccagtcattcatcagtctttccagtgaagtcaactgcctttgttttttgtttgtttatttttgagacagggtctctctctctgtcacccaggttagagtgcagtggcgcgatctggctcactgcaacctccacctcccaggctcaagcgattctcccacctctgcctcctgagtagctgggaatacaggtgctcaccaacatgcccggctaatttttgtgtttttagtacaaacaaggtttcgccttgttggccaggctggtctcgaactcctggcctcaagcgagccccctgcctcagcctcccaaagtgctgggattacaggcgtgggccactacgcccggcctgaaaccaattgcctttgaattcatcctggggaatctgctgaagtggacagtttatgtaaacacaaaaacatcctaatgaatggctgcctcagtaggagtggcagacaaaacacatggtgcacttttcatcaaaaacacacaaggaaaaaatttttcatcatatcttttgtagttgctaataaacttaattcacgcacttgtgtttttttgtgggtttttttttttgtacacttcttagtaccacaaagaggaagtgctttttctccttcctttaagaaaaagttccagttcaaaccatcagcctctgtaggttgtcttaattgctactttgcactgcactggactatgactgatttttggcacatgctatcatacacaaagttcctgaaataaaatgctccaggatatcctaggaactcttagaaggctttaaaaagggactcacacactgaaagaatatctttgatgaagacaattcaggcaagcagaatgattcttgcaacagaattacatgattaattgagatcttgaagtgggtccggtgaatcctggccacctaacttatcatgatttgggggagtttcacgagaatccagttttgataaaacaattgtttttttcctccccaagtgactatacatttaaatagctaaaacatctgttcagcaacatagtaaaacatatatactcggaacgcttgagagaagagcctgccaaacagggactttgctgagggagagcaccaagataaagcaacactgtttgttttgtctagtcagggggaaagccaaggcaaccaatattttggtttttataattttcatttgtgaagaattatttgagaaagggtggcgaggggagatttcctgacggcagtttcttaagctgtccattagtagaagagcaagaaagccttggatgtcaacgcctcgctcttgagaccagccaccaaaccacgaaaagtgactttcttctcgtgtgctctctacggcccttctgatggaagcagaaacagggagcagcgtggagactggaaagaaggccaacagaggcactcgaattgccctggtcgtgtttgtcggtggcaccctagttctgggcacgatcctctttctaggtaagtggagtgcaggaggccgggggaactgggtgtgtgtcgagaagtttccttgtgctttattgtagcaaaacttgtcataacacaggtatagggctgtttgcctgcgttcataggtggtgtatctttagtttctatcaaatatgcaaatgataaagaaggcttttttaaggagcctaaataaataaatacacccaagtaccaaatgtatagtccagaaggcaaagtgggtgtaagtggcttcgagtggctggctgattctgttgcattgggtggaaaattttttatgtggtacatttagcaaaatgagtgtttgt

SEQ ID NO: 12495 - DNA, 6000 bp, Homo sapiens
aatcaattacaattttaatatttcacccacctgaaatattgttctgcggttttatttaaactggctgtcagcatggaatgacttctgcattctctcctggaagtgggtgaatttccatggtgagccattcctctatatacagtttgcaaatcattttgggaaccttccaaatgaaaggcactgtataaatataccctcccaccagcagccagccggctttccaccggggatgcatttgcatcgcttatgtacacagtgtttcatttggggcattgcttttatttttatgaccataaaagaaatattcacagtatgaacaataatgtaaactgcattcaagaagatatatatttatatatttttatgattcaaaacttagaaatctgaaagaaaagcaggcatggcatttttctttcctgttgctgtttgctttttcatagcattctttattattcctgaactttatggtggaattttgctgaaatgctcaagtctttgtctgtacctcatttgagaatatgtggtggtgggttcaaatgaatattgctggcaaaaggcctgaaaatgaagagtacttgattttgcatttattcaaggctataataatagtttgctttagcgcagctttttgtggatggaggcttctttaaggagagaaagagaaaaagaagcaacctcaggtataaaataccttctaagtaacttagcatgataatcgaaactttcacagatggaagaggctttgaagagacgtattttagccttcaaaacaaaaggggggctgatttcatagagcattgtggggagctagactttgaattcatatcatatggaaaatgtttagtgaactttgaaataaactgccaacagaattaaatcaaaacctctgtaaattatgtatttatctacatagaatcatctgcacacaaaaatgaactgaattataacttcttaatttatacatttccataattaaatttaaactgaataaaataacccaattcagacatatttcctaaccttaaggatattctagccttaaggattttattaaaaagagaagctactctgaatattcagagtaattttatataaaaagtatctaaaaaggtagattaaataaaactcttgttcacttcactgagtggctggcagctgagtaggctctctttctctctttaaagaagcctccatccacaaaaagctgcgctaaagcaaactattattatagccttcaatgacgtgaaatgtgaagaattaaatttcaactaccaatagttaaagacagaatcaataagaacttgagttcatttcaggtgttgatcattctctttcgtaaataccaaatttgatattttctcacgttttactactaaaacaatgaaagtgatttttgaaaccttaactataggatagtaatattaggaaatagctcactcagtttattttggggtttgtaaagtggggttatattctccatctcccaagtcagaatatttctgtagctaacctttaatttcatactcccattaataccaaccttgtttcattaaaatgaatctaatgtacagtatcttgacattcttctttattactagaaaataaaacagcagtttcttcaactgagaaaagctagaagcatggaattgatctgcagccagtttttactacaaaccccataatgctttgcattatagcctacaatccccatactgcagtgccaaacctacagttaaccatcatattactggaaagaaaaagaacagaatatttgagaactatgtagcatgcaaggattctacttgaatagtaaattatcaatttgtttccagtattttgtgatttgcttgccttttcctttagtaaaaaaggcatatttatggatatgcactctatttcctcatcctcaatataatgtcgcatattctcaaatgatatatcaaggtatatactttccatgtcaaagactcttttttaaaaatatccatcattgggttgtgtagttttccaccctcctttggagggaggtcagctttattcagattttaaaataaaaatcacaatacattgttgaatgctctaaacatctgcaaatgagaattcagtgaagtaattaaaattcttaattagatgcaccttgcagctgccgttagtcttaattggcaataatgcagctacattttgttctgacacatatcttcagaagagttagagaactgaagggaggcaagaggaaaatgttcccacacagttcaagatagttcgcacaaagaggatcccatggcaacaaacagcgaggcccacagttggctctgtaggatccaggaatagacaatgcttcacctcagattcaaacaaacacttcctttcctggatctgatcatttcatttgaaatgaaagcactttaaatcatctcttgaaataggattgaagtggtcaaatgttcacctgtgtcctcgagatgcttttcaaagcttctagatgctctctgcagcccatgtcaaggtaataatcataactccttctctgtgtacagtaacaaactgacttgcagaacatttcaaagagaggacgtgatttttgtaccatatggagctggacagcacgttggcaactggttaatttcaacctgtcattttatagacaaggaaactgaggccaagagaaattaaagtgattcccttgggtaattatggctacttaggagtagaatttagactcaaatctaggattggagcctacggtcaagacgtttacttttaaattttgcttgaagcaattacatttacacttgttacttgtgcccccctccaggtctgcttgaggtctattcacattcaactgggtcaactagaggactgtgatggaaggtatagaaaatctagatcactcacgttgaaaggaggggaatatatttcctcttcacttctaatcttcagtttaggctgaattatagcatgtggggaagaagcagagggaagaaaaacactggcacagaagatgtgaacatgggtgagttagcttcaaagaaaccttgtaagacttgcctaccgactttaaccacattttccctctgcttaggttggaaatttcagtgtactgctccttttttcgaaatacagttttacctccctgtctagtctccctgcctgctgttattctcacctgcgcgcttagtttgtattcgtttagctcacattttacctaatttttaaagtgttttctttatcttgatgcgtgttttactccccaaattaaaacagttctgaagggccaaggctactttacctatttattctatttttggtttatccggttaagcctgccattacaaaagcttgtgggatacattacaaaatgggttaaggtttttaagtacatgggctgccggtgttgaatgggaaaggttgcagggtggggagagggagagaagtaactagaaaagcggctcgctgccttttaatcatccagcctactcagctgccggaaactgacactgttgctgcagtgtaaacattaacattttttaagggtcttgctactccaaatgtggtccacagcccagcaacattattatgggccacgggcgagcttattagaaacgcagggtctcaggcctcactccagatgtaccgaatccgaatctgcattttaacaagacacccaggtgacggtgtgtacatcaaagtttgagaatcacggaatcacatgtgagtgttatactatcccaatgtaaatggtcaaggaccttaaattgagcaaataacctaatgtatttacccgtacctactttgaccctctttcttcatcacaaattcatctcagaaaccagcagcgaactcttttgcagggaactcaattacgcggtggatgggaggaggatcctcttcaataccctcccctccgctcctcctcccactccccacccccaccccgcactcccagagagccttccacaggcacccttctcccaagccccactcacttagggaagattttgctcctcccccaaactgaaagcgcggctgtgaggagggttactgcttgaaggactcacagtttgcatatcaatacagacagaggcacttttgcaaaactgccctttagaaacaattatcatcttagcacctgaggtttgtttggagcagcccccgcaccccttctctcttgtaatccatcttaaagtgatacggagaatgggggcgttggggagacagtgatgggggtgggagggtcgcgcgcaataataaatctgcttcaaagagaagagatgaaaaggaggttatcaagagtgtgtcggcttaggcatcactctctgtatctttctgcttcctagagaaatggaaccataattctaaggtggctaaggcaagactgtataagcatccaaatttgccagtctgcttttgcctggaagaacagatttccgttatttgaagcctcccagggtcctttccaaaagattcccaggctaccttccttccacttcggtcttctgagaactcaaactcgcaaagcggtggctgtctgtggattggctagtactaaaatatccattgggtggcagtaatactatcctctttatgacttgcagcaaaccagagaatgcattcaatcaaatgaaccgatcttgtagaaacactggaatcatttatgcgttgcagtttctctttcttgttttcgctccttcttccctgggatattttgagtggattgtggctattaatcaagatctcgtgctattcgtgttttgcttgtggttttcgctcaggattagcatcattcaaggcaaacgcaaagctgcttttcccacccccccccccgactcttttttgaaaaatcatttttgggggctgctgaggagagctaggacccaggagacaccttcccaaacagcaggggttgtgtgctttcacatagcagtactgtacaaggaaaaccccgtcggatctgttattgcgggatacttgtgaaatatacataggattctttcttatggctgcatcccggatctggaaattttacttggggaccaggaggatttgaaaggctgcatgtactcagaagatttgcaagcaacactccaattcttgtcatagagctcgcagacttctcacttatcggcttttttccttccttattttttaagaattattcttattttcccctctctttttctgctctctcctctctcagtctctccttttctatctgcctcttcatttttctcctagtctgtttttttttttcctgctctgcacctggattgtatcttcagcaaacaatcgggcactttgagaactaactggagacagtcttgtagggaagatctgtatggaattatctgcttttatggtgaacttggcatttgtgaatgggaatcttgttcacaatattaattgctagcaaaaacaagaaaaagaacacaggagtaaaacgtggatttttctgaatacgcattgtgatgaccagcaattaccttaccgactaatatccagaggagaataatttggaagactgttgtgggtaaggtcattttatatatgcaaacccatcagtggcatgagcaaacttgggcatttgtaatgggaatgggtgacttgaatgattgctgcatcgcattgatggctgtgatgtggccgttattggcactgaatggaataactgcagttgggtgtgttgatatgtgtgtgtgtgtgtgtgtgtgtgtgtgtgtgtgtgtgtgtatgtgtgtgtgcgtgtgtgtgtatatgtatgtgtgcccgtattctgagtgcaattgaaaatcaaagtatcactctctcccccaattattttgatatggaagagtgtcttgaattaattctgggtagacactctttgtttgaatgtaatatttgtggcccctgcgttctggaaggggtagcagcagtaaaagaaacacttagtgaagagccccatttaaaatgaaacgagctactctctatgcattaaaagaaatatgttttcaactcagtgca

SEQ ID NO: 12496 - DNA, 6000 bp, Homo sapiens
agactgacttaaggagagtcaatatcgcatatgaatcaaaagccaacatttagctattagatagatctcagtgaaaggatatgttcaagctaagttgattaagtttattaaacttatttattaagcttgactaagcttattaaaacttctgctaggttgaagccattagtaaccatctgtagaagataacagccatgagtttcacaaatacagcagcagtgtctgctagaattgtgctgtgagccacgaatgcaaaccacatatgcaattttcaaattttctagtagctaccaaaaaggtaaaagaaaaagatgaaattaattttaataatgtatttgacttagccttatatatccaaaatgatagcatttcaatatgcaatcaatataaaaacatgaatgagctattttacatttttgtactgagtcttcaaactctagtgtgtattttatacttactatacatctccagtctcgaagtagccacatttcaagtgtataagagctgcatgtgagttggctattgtattggacagtcccattcctgtttcctagtattgataaagtcttcctaccttccttcgttgttatgggagaaaatgtaaacagaacctgcctattacacgagagctgcaatatttccccaaatgcagcccagcagtaccatgagctgccctgtggaaaaatttaatctgtgattaaataagttaggaaagttttattattttacccccttttgaagattacatggtacattaacatattaaagattgagtaaactctcctgggtaaaaaaacctgtttgacgttgtttagttgttgagttctgtgtctataagaatcctagaaattgccacaagtgtctctccataagaaaaactttgtgttttcctctctttctccactccttttggggcccatttctatttatctttgtattcagaatcacccgagagccacaatatctcttttgttctagaacaaccacctcctaaattgaaaccaacagatggctttaaagtcttgcacttggacatagatcttcagaaagtaccaaaatatataccttcctcttattctttcagaaacggtgaacactctaaaaagatgtgggggtgtggtgggggatatgtgaatgtgtatatgtgtaaacaccaaatacatacagtttcttaagtagagtaatgcaattcttgctgatgttttatttttatttttatttttttatttttttttttttttgagacggagtctcgctctgtcgcccaggctggagtgcagtggcgggatctcggctcgctgcaagctccgcctcccgggttcacgccattctcctgcctcagcctcccaagtagctgggactacaggcgcccgccactacgcccggctaattttttgtatttttagtagagacggggtttcaccgttttagccgggatggtctcgatctcctgacctcgtgatccgcccgcctcggcctcccaatatttttatattttgtgtgtggtgacaatgtacatgctttaatgtgtactgttctagtaatatgtatgaagtagctgtgacatagcagtcagttttaaagatacagactataattgactactgtcaatctttaacaagtgatctttttgcaacttggttttagtggggtctctgacgttgtccccacaagtttcattttaaaatctatgcttaagtggcagttaccaatataattaattctgctgctgaatttggttcatattgaatgtggtaacccttatatgtggatatattcaaacatgtggattgatttagatcatccgttttgtctttgttttttaggactttgctatttcaatattaaagatgtcttttgaatactgtagcagcagtagaatccctatgttcttgaaaatgcaaaatgtaacatgagttgcacatagactctctagcagtagaaatggaatattctaagtgcagaagtttggttttagaatctgttaaggaaggacggcccaatctttgaaaaggtacagctttctcaactttgaacatctgggggaactcttcttggaagtctgaattttaatatctttaatccaatggctctaaattaacaaacattaaaaaatggatttcgtagaatcaaattattagggggagcactttgcaaagccatatactggtgaatatatactgggtcaagcaccacatgttagttttggaatgtgtatttcccagcgaatagaatttactgctccaaaaagcttttttggcataaatcacaatacttacagaaatataattgtatcattgaaaaaaacaaagctcaccttcctaatgatacatttcacaaactgcacattagggcaatttcttacttatgaggaggtacaaagaaatactctgtcaatatagtataactgcttatttcaaattgtatctaggaatgaataactactattatttaaagtactactgaattttgaggaactgatcaaagaattagtattattaataaaattgtactatttgcaatatatttgccttggcacaaatgcagagttaaaaacataaaattataaaaaaaaataatagtgattggttgttactactttaaaatcctactaatttccattagcactaaatcaaacagcacttatctgttgtatacaagtaaaattttgaaagactcggacacaaaatgaaaggctttttaaaaatgtctttgccataacaggttatatgacctcttgctaattgttatatttccttaggggcactttgaggctctttcaaagacatctgcagcaattaggtctaaatttagagtagaatattttgccagatattttactatatcacaaaatgtcatactactgtattttataataaaaccaaattctcaagtattctggtatgttacatattaatataccaaaacatcactttctataagtctattattatgtacataatatttttaaaaataatgggtattttggtcctagtgaaaaagtataatgcaatacatgacattaatctttagtcaaaacccattgaggtgtctgacagggaaattagcaatcataagctataagatatatattattttcaaggacaaaatggcaaatgataatacagaaagacgtgatcactggagcaagttagctggtgtgcagactaagaaggatcaacttgcaaatgctcatcagaatttagcttttgttattggttgttctgcaggggatagtactagtcagttgatattgcttccctttcatgtgggagtttgctcacagcccactgcatggtataatgaaatctctataagcaagatagagtcagaagcttagagatgcactttatggtttttacaactgctgttacaatgttctaaacactgtgatctttccaaatgtgttttctgtattcgttttgtactgtagaaaataattcgctataaactggactttatagtgtttaaagcgatgttatttattggcttattgcccctccttataatacatttatgtacagtacacttaatgtaaaacctgtgataatcctttgccttaaaataaaatctaatgctaaatattcagtgtcctgattaataattctaagctaccaatttttcctttaaagctaaccatgatgtcaagtaaaacattacacaaatactctgtggagtgttgctgctgattctgtatttgtggcagtgtatgtatcttggcccaggacatggtggccttctgggttctataaatagacattagtaatccttttagggaaagggcctgctacctctcagctgctggctgaatctgccccttaactcataaatggattttctcatgccacataaaaaacagaaaaacagcccaccacattctctccctgtacctcttttttggtttgattccttttgaatctttatattctatttgtgtttacattattttcctaaatagaaaaatgccagagatgcctgaagattgaaatcacccaatttcaacaggggaagagatcttataattatttaagtctaatccctttatggaacctgagtttcagaaagatttagtgacttgatcgaggtctgagggacgggggtggactgagtacatcctgatatcaagaagatggtggaaagttcaatgggctaaaaggagttgtgttagtcttggtattggcacaccaataagcagaggtctgtcttggaataaaaaaaactacttccttattaggccctgatctttgccctgaattacttacagttacagaggaatatattttgtaggcagtttttctgggaggtaaggacaggttcctagagacgatctttgacgccttttcaccactggaagcaatgcttcagaccactgtatttggaagacaaagggacatgctcacatggcacagtgaaaagtgaaatcttttcccacttggtggtgggtgcatgacaatatacttgcactttgaaaagcctctgtgtggtctggttatttttaaaaggccagaaatgctggccctttgaagaatcacgcgtttcctcggcccagaaaatagactgggctagaaaggcgcccggactccaattctgggcccgggtggttgcagtttttcaaagggatgtgaacggtttcccaagataggacccaagggactctaggacccagaggctgcgcgcgacgcccgcagggcgaactgcatccttttgagctcccgctccatggcctgagccgtcgtagggcgcgggttcgcggcccgccaggggacggtcaccacagagacgcagccggcactggcgagcgagcgagcaggcggcgcacggagcgcgtgggcgtgtcccggcggggctgcgcagctcgccccaccccaccccaccccagccaggtcggccgcccccaccaggtccagttccagagcccaggccggtcggccgggcccgcgtgccctcggcgggctgcgcagagcgcgggagcggtttggggctgggcatgctgggagcccctcgggcaacggccgccgccgccacagccacacagccgccgccactgcgtccgtccccggtgagcgccgctgacgcgcggagatgaaattcccggcctcggtgctggcgtccgtgttcctgttcgtggccgagacaacggcggcgctcagcctgagcagcacctaccgctcgggcggggaccgcatgtggcaggcgctgacgttgcttttctcgctactgccttgcgcgctcgtgcagctcacgcttctcttcgtacaccgcgacctcagccgcgaccgcccgctcgtactgctgctgcacctgctgcaacttgggccccttttcaggtgcgtgcagaagcccagagccagccccaggccgcagcctcggtcctgtagcctgatctccccacctgctcgagtggagggaggcggttttcctgtggagacaggtggctgagccccaagccggtccgccatgcccctcagccccattattccagtcaggaacgcgacgaatcatggcataatggttataaagttggggcacactgaattcctgttaggttccgtcaaatgaaatagccaacattcaactgaaattgaccaacaaaaatggcagtttcttgtggttcaacctcattaaagacattggtttctctggggtcaagtaggctctgacaggattggcttgtgttgtcacaaacccttgggaagtgtgttctaagctgtggttacggggacagcatgtacaggtgatttaattttaatttatcaaacacatggagcttactgtgtgccaagcactgttctaaaagctttaacagtatttaattctcatagggaagtcaagaaatccatgcaccattcttttctcttggtggcgttacgaatattatgggatatggaaacatatggggttctagaaatgtcttccggccctggcaaacttataaacgtagccattaaagctggtgcacaatgcaccatgaaaacaaaacttgctgtgtgttaagtaaag

SEQ ID NO: 12497 - DNA, 6000 bp, Homo sapiens
aacaaaacagacagaaatacctttccccgtagaacttacattttagtaggagacacaggaaagaaaaaaacacctaagcacattttcataaataagaaaatgttagataagtgctatgcagagaattagaacgtatagtgactgggtggctattttggtttgaaatagcctctctgaggaggtgacatttataccgagatctgaatgacaggaaggaagggaccaatcattcaaagtttagggggcaaagcattccaaagagaggatcagccaatgtgaaggctctgaggtggaatgaagcctacttgtttgaagaacagaaagaaggccagagcagctgaagcacagatccaaagggggagtagtggcagagagagtcagagccagcttatatacgcttttgtggttgttgttgttttgtttgttttgagacagagtctcactctgtcgcccaagctggagtgcaatggtgtgatcttggctcactgcaacctctgcctcctgggttcaagcaattctcctgcctcagcctcctgagtagctaggattataggcacatgcccccacacccagctaatttttgtatttttagtagagacagggttttgccatgtcggccaggctcatctcgaactcctgagctcaagaaatccacccgcctcagcctcccaaaatgctgggattacaggcgtgagccaccacgcctggcctcatatatgctttctaagtcagggcaaagagttaaaatttgattccaagtgcaacgatgagaagccactagataattttaagccatagagtgatatgaaatggtttgtgtttgaacaagatcactctggttgttgtgtgaacaagagatagagggggtaacagtaggaggagggaccaggtagatgctttggtagcagtccagttttccttgaactacttgctgaatttgaagcaaataaaaagcaaacacttctcttactcttaggcaaaagattaaaattcttaatgtcacctaaaaagacctggatgggctggcctctctccagccttctctataccttcattgcctcctgctattgagccttgctgaccttccttcagctccgcaacctacatcattccttcaggccacaggacacttggacttgctgtggttacatattatttctgtgtgttataaaatacacataacatgcaatttaccactttacctattttaaggtgtacaattcaacattaagtacattcccactgttgcacaaccatcaccactatctagctccaggacttattcgtcaccacaagaataaaccccatatccattaaacggtgactctccattagggttagcccttggcaaccactaatctgcctatggatttgactattacggacagttcatataaatagaattatacatatgcatccttctgcatctggctttcgctcagcataatgttttcaaggttcatccaagttgtatcatgcatcagtacttcatctctttttatggctgaataatattccctagtgtagatatgccacaaaatagatttcattaatctacttgtcactggacatttatttaggttgttttcatattttggctattgtaaatggtgctactgtgagttgcttggtgatatggcagctgtgattatatattgatgcattatagatcagtgaatcttagacacgtgatagtttcctacagctgctgtaacaaagtaccacaagctgggtggctttaaaaaaaacagaaatgtattatctcacagttctagaggctaggagtctgacatcaaagtgtcagcagggccatcctctctctgagactctgggtagaatccttccttgcctcctcctagcttctggaggtgaccatcaatccttggcagtctttggcttgtagctgcatcactctgatctctacttctgttgtcacaatggccttctccctgtgtgtctttgtgttttcctatggccctctccctgtgtctcttcttttaaggatatgagcccttaaaagtgcttggattatgggcccccactactccagtatgaccttgtcttaattatatttgcaacaaccctatttccaaataagatcacattctgaggtactggggttaggacttcagccgcacctagcctggacttcaatatatcttttgggaggacacaattcaatccataatacatgacagacattactgtgcatctgactcccctggagatcttgttaacatgggcttggagtggggcttgaggttctgcatgttcaaacagctcttccagtggatgtcaatgctgccagctcagggttagtgtgactaatatgttctggtttgcgcaaggccttcctggttttagcaatgaaaatcctgaatgcagggaaacccctcagtcctgggcaaactgggatggcttgtcaccctatatatatgtcatgggccacaattggagagcaaggatctagctacaagctatgttaatttatctactaattacattactgaatattcatatttatctttatatttaaatggtttatttttgctagaacagtccaagttttcaagaatctggacctaagagatattccaaaaatgctccaaactgtgagacggtgagttagcttaaactgatgggtgtcttctgtgaatgtcatatattaactcaccaaattatctatgatgcttagcagtgtcactgttgggctgaacattgagatttctgacctctttacaaaataattatacatggccaagatcttttgatgctaaggatacccactgggcttgaagtcttcagtatcctttccctgctgctgcagcagttggaatcagcctggagtctgtaagaatgaaagagaaagctcctctctgaagttgggtttaagttcattgcagtatggggcaatgcccctcaactcttgcttaatattcagaccacctgaagagcttctaaaacgcggagctttcaccccacaccaaatgactccaaatagctgggattgggcacaggcattcataattgttttaaaacaccaggtgatgcaaatgagcacccagcatcgagaatcagtgtgccaagacccctttataacagacaccttgctcaacctgtcccttctttcacctgcacctatattccacccttgtatgcccacatacctttttgttatagttgacaatttccttaaacaggttctcctcttcctcatatttttgtcctgttcatacagttaccttattgacctgagaccacatataactggatagaggtaataattactcctgtaacaactgaccttagcaggcttttcccaagccttattgactctgtttttcactctttcacaaatatgtatccttaacatcatcatccacgattgagttaacctgtgatagtgttgctgtttttgactagtctcttagcaatcaagctaaatctcccactgaatctgtgtgttcctctacaaaccatatctgggtggaatgtacgtttttattgtgatataattaatatatcataaaagtcatcctcttaaagtatacaactcagtggtttttagtaattcacagtattgtgcaaccatcatcactatgtaattctagaacattctcattactctaaaaagaagccgcttacccattaaaagtcacctcattcctgcctcccactcgctgcaaccactaatctcttttgtctctatggatttgtctattttggatatttcctatacatgaatcattcaatatgtggtcttttgtgtctggcgtctttcgcttagcatattttcaaggttcatccacgttgcagcatttaccagtagtacttcattcttttttgtggccgaataattttccgttgtatggaggcaccgaattttggtcatccactcatcagctgacggatatttgagttgtttccaatttttggctattgtgaataatgccgctataaacattcatgtatatggttttgtgtgggcatatattttcatttctcttgggtaaatacccaggaatggagttgctagatcatatgcaaactctgttcaactttttgaggaactccaaattggttgtgaacattattttttgacctcaatgcagctttcctttacaggagggaggtggactgtacttgttagcgcgctgcaaatgattctcaggcatattaaacatttttctgtattctgttaaacattgtatgcgcagcaagaatgacgcctcatacagacctttcttgtcatttcgttttattatttcaaaatgtaagacaaatctgaaaaatggaggagcctgcagatacctgtggtggcgaggatttggggtctgtctgagctccggcgttcctgcccatccctccagctgtatctctggccacctgtctgttcctggcacaaacaaggcctgctggttgccaaggacatgactacggggccatttccatgtgagaaggccctggggggtgtcaaaatgcagaaacgtgactgatgggcagcggggcacccataaacttcccatagccaggtgcaggcatacctgcaaatgtaacgcccaactgtgtacaaagcagaaatctaaatgccagggcggactgggagaggttcccgtgacctctgacccggcctctaaattctcccattccctccccactgtcctgccgcgccccgtgtcgcctcgcctggcctcgcctggcctcgcctccctcctccgctgggggtctaagcctgcgcagtattgcgaacgcgggcggcgtttcccgcatgcgcagtcactgcccggcccggctttttcagtaggagccccgcgcggtgcgcgctcacgcacgcgcacggcctcgcctgcgcgctcacgaggcctctcgcggcacgcgcccccgccccgcgccgccccgccccgccccgcctcttccccctcccgcgcgcccgcccgccgcctgccgccgccgccgccgccgccggagctctgtagtatggcatcgaggagaatggagaccaaacctgtgataacctgtctcaaaaccctcctcatcatctactccttcgtcttctgggtaagtgcccacgccgggccggtggccgagtcgctgtccatcggtccgtatgatgatgctctgagaaaagaagtggggaggaaaacccaaaccaaaaatcaaatctgggacccctctttaaggagacaggcgcggggtgctgggtcggggctgcaggatggcagggtgcgggtcggggctgctggaaccctagacctcgctccgcgcaggctgcaaggggctgcggagtgtcggtgactgcaggttgtcgaccttccaaaaaaaaaatgttaatgcattagtttcttttataatctcccgggatagggtcagctcctggggaaagttgcgggtttattcgtctgttttcctcgctgtacacctttctctcccttcccctaccagccggttcgcggcgcctcttggagctaacctgtggcgggctaggagaggacacgggagcgtggggtttaatctcagattcccagttattcctgaccccacggggctgcgggagggaggcaccagaagcaccgtgcctgcctggctgggcaagggcgaccgaagtctcccaagcgcacgatggggagcaggcgttgtcaccgcgtggaggcgcacgaaagggagagggtcttacataagccgggggcatctttgaggtttcttggtgacccaagagatgagtctttggattcctttcccacctccctgcatccttacactccctatctggtggttctgtcactgcatgagcacaatccgcagcgccctggcagagggtcccctccacttggtgatagagatagcgccccaactctactccccatctatccagtgctgccgccggtccttgaagctcaatgcagaagggtgacgtcacccctcagccagggccgcggggggctgcgtggtgcacctcgcggagggatgcgcctttctgcgcgggggaggggggaggaggag

SEQ ID NO: 12498 - DNA, 6000 bp, Homo sapiens
cggtgggaagctatcataaatggcaaggtgtggtccttgtagtcatccccaatatatggtttattacagtgccctgtcagtctgaaacaaatattcagtctgcttcgtgtgtacgttccagatgtggacatggatacaacagagcttaatgcattaaatatttgctctgattgtatactcaccaagtctattctgactaattcaaagagtcctatgtcacttgcatttttggagagaaaacactagccaggttgacatgaatatgcagactactacatacttatatatctcactgtaaatgaacaaactgctgttcacaacattaagatcttatgagtttattattttgggttgatgtcacccagttggattaactctcggatgctgatagaactgggattctcaggctggaaggccaaagcctggcttttgcctcatagtgaattcccacaggagatagcatctctactatctctcggaagacagccattagcatgccaaccacaacactggcctttctttggaaacttccacactcactgaagacatgttttgtaaacacaagattttgcaaacataatttgaaaccacatacaaataatttctaccaagtcaaaaagaagtgctccttctcaagactcaaaaaaagcaaactagatttttaaaacctttctactggaaaatacagcacacaagtgaacatacaatatcaatgctcagaatatggataatcacaaaatgaacactagtgtgacaaccaccaccaccattcagaaatgaccagcacccctaaatacttctccatgtctctttcagacatatctttctcccctccaccctggaggtaatcactgttctaattttttatggtaaccatttccttgcttttctttaaacttttgtcatctatgctggattctttaaaaatatagtttctgggtttttttttttttttttttttttttttggagatagcgttgccctctgtcacccaggctggagtgcaatgatgagatcttgacttactgcagtctcaacctcctgggttcaagtgatcctcctgtctcagcctccccagtagctgggactacaggtatgcgctaccatgcctggctaatttttttttcttttgaaacagggtctcactttgtcgcccaggctaaattgcagtggcacaagcttgactcactgcaacctccgcctcccaggttcaagcgattctcccgccttggcctcccgagtagctaggactacaggcacgtaccaccatacctggctaatttttgtattttttggtagtgatggggtttcaccatgttgactaggctggtcttgaactcctgacctcaagtgatccactcgcctaggcctcccaaactgctgggattacaggtgtgagccaccgcgcccagcccagactttccttgtttttgatgacttctgaggagcagcagtcagatattttgtagaatgcccctctattggcatttatctgatgtttttctcatgattacactggggttatgggtatgggggaggaagatcatagaggtgaagtgcctgccattatcattgtatcacatcaagggcacacactgtcaacatgaccgatcactgttggtgttgaccttgatcacatcgcctagatagtatttgttgggtttttgcactgcaaagctgctctcccctcccccacacctttccatagtgtatatagtaccttttgaagaacataaattcttaattttaactgcatggtctgggagaggggcatgatcttcgcctccacagggctcctggatgggatgtctcatttgcagggatcagctcatgttatcgcgctcactccgggatcactcagaactcactgctggacttaattgggggacgagggcgagacttaaggaagcaaatggaattatgtattctttcaaatcttgcatctggacctctagttttgaaactcaagagccaagaatttgacatttgttttcaggttctcctgagagtcctcccctcagggcaacggatggctgcagtcttgcctatttggcctgtggggagggtggagaaaggcttcttttaggctaacaaatggggtcataacttcaaatattgtattaccctgctacacacatatccatctctaaatgcttcagtggaaaagttaaccgcacatcaccagttgtttactgagcgctaaagattgaatcagcagggctgcattcacgaagcagaactgctgacgattcagaatatgaccttgagtacatatgcccttccctaggcttcaatctctcaatctatgaaacaaggagagggcttccgacaatgtttatcttgctaaattccaaggttgtagagaacaacaatgcccctttgcaacctcaggtgaaaagggcccttaggtgtaaagaatacactattcgctgttagctcaaaaggggatgttatttctcaagacataaatggattgtgaaagattgtgaggttttctgggggaatgggggggtggggacttattttatattccagtctatttacaaattttttcatcttcctcaaattcaaagaaataagaatgtactagaagtcttaagaacagaaacattcactcctttccctgtttccttaagctggatgaaatggcaggaggtctgctccacttttagctgattatgtccctaaataaggtttagataagttcttgcagggcctgtgattcaaaacctgttctaagacatgcagggagatggacaaagaattttagttggtgtgaaaagattgtgaatttatcatgcttaaaaatgaatttttaaaaatgattaatttttttccgccgggagcagtggctcacgcctgtaatctcagcactttgggaggctttagtgggtggatcgcctgaggtcaggagttcgagaccagcctggccaacatggtgaaaccccgtctctactaaaaatacaaaaattagccgggcgtggtggttggcgcctgtaatcccaactacttgggaagctgaggcaggagaattgcttgaactcgggagttggaggttgcagtgagctgagatcgcaccactgcactccagcctgggcaacaagagggaaacttcgtctcaacaacaacaaaaaaagtgattaatttttttcgagtcagtcacattagagtggatgttttggaggggtgctttagacattttggttctaataatttcacatgcctgatggaaaaatctctcttctccctttcagagttctctaaagtcccatttgtacaaattctcctctagaggaaaagcaagtttgagagtttcctgtttcttgacgttaggtgaggaaatcgactctgttccctaaatttgagagtggctttggtaagcatagtgtgttctagaaagttcaaactatttagtgagtgtttctctttttttgctttctttattttctaataataaaaagacagggcctcactatgttatccaggctggttttcaactcctggtgtcaaaggatcttcccacctcggcctctcaaagcgctgggattacaggtgtgagccaccacacctggcctcgagagtgtctttctgattcagttttcagttgggcaaggttttcctagggtgggtctgctacctggggaactcctggggtcactgtttttaactcgctctcattttttcatcctcaggaaactccaagaagaaaatgggactggaaactgaagaaacagtaaggcattccccccctcccccccgccaataagtctgtcttacatttgtgcagtaaatcatgctcaaacgccttcaatggcttagtgtaggtctcttatgtacaatttaaaatcctcaataaatgtgcctaactgaaagttttagctctgtgcctcctctctcatataatctcttatttgattactgatgcttaacctgacggggctttctccccaccttaactacagttttcactggaacaatctccccatctcctatccttggatatgaaatcatttccacctttcaaggtcatcagctggggcgtcattttctacctacagacgctatagtgtgtcccttcttgcctcacatcataggcaaaagactatgaactgcgggaggggaggagcctggtctaattactatgtctagccttcatacatcctcataaaacaccttgcccagattggaaactgagtgaatggacaaattaagtaattaattaactttctgtcccatgactccttgtagattggaaagtctttggaggtagagttgccagacttagcgaatcaaaatataggatacccagttatatttgaatttcagataaccagtaatacttcttttaatacaagtatgtcccataaattaattgcgacataataacaaataatcgttgtttacatgaaattcaaatttaactgggcgccctgtattttatctggcaccactatgtggaaggcaggggttccccgttgcgcctggcttcttcccagtaggtgctcggcgtctgtatacttgttagagcgaaaccccaaccagccccgcctttcacagctggcgtccgtagccgggcggaggcacacgaccaggaaagacagacaccctggttggagaccgtcgctcgagactggcagaaagatctgcactcgggaggcaccctcaccccgtgggctccgggacccctcgactagctccatcacccattccgactacccgccctacgctccacctcttgacccgtcatcaccgaccggggggcgggactgcccgacttttcaatcgctgcctaccattggtagaactctccatccgttactttaagtcccgcctatcaggctgtcgcttcccaggttacgtcccttccgtaggccgcggcgtaactggtgattggtggagaaagcggcagctgtcccagcggaagcgacgaagggacgggacccgggagcctggacgagtccgagcgcgtcacctcctcacgctgcggctgtcgcccgtgtcccgccggcccgttccgtgtcgccccgcagtgctgcggccgccgcggcaccatggctgtgtttgtcgtgctcctggcgttggtggcgggtgaggagccgggggccggcaggacgtgcctggggaggtcctgcgccgcggggcttgggggtcgggggcggccgcgggcgagtagctgcgaggcaggtgccgcagtgcggtccgtcagcggcggcctcgcctcagccgcgtccccgtcagcatcttctctggatcggccgtggcggcgcggcctcacgggccgccggggccggggctgggctgcgtagggggcccctgagcctgcctccaccctccactttgagggcggcgcgtccggccggcttcttgcgcctgaaaaggcccttcagagtacggagatgcatttctcagtgaactgggattgagtcgcagcccgctgcgaagaagagaaggcagactttttagctgccactggctgccacgatgtttttgcatttgtatggtgccttcatttctagtggttgtcatcagtaattgctgaaatccctgcccctcccttcccttatgtatatttccggatgcaaaagttgagatggagtcattatttttatatgacttatatttcttaaggcgaatacaaagcacctctcaatagtttgtcagagttccaaattttaaggatttggaaacaggatgtgagtcgcatttttagggtcacatgtcaataaatggtagctttctgagtagaacctagattcctaagcattcagcaagaggtgaagaaatcagctaatacgtggcctcttactgcatatcatgtggtaatgtatttcatttgacagcagtccttagagggcatcatctttgttttgcagggtgatcaacctaaataaattacccaacactaaacaggttgggtgctggatttgatttcagatgaggtggtgccagcgcatcggccttttccattatatatgttgtgttgcacaagtaacgctatta

SEQ ID NO: 12499 - DNA, 6000 bp, Homo sapiens
cctcgcttcagctgtgctagatatcttcattttgcttctccgggtgctactaccacacttctctactctgttctggcccctgaaggctgacctgtgtcaactaagggaaaaaaatgaagcttttaaagaattacagttaattttatacagaagtcttactggagactatagaccaaggcttatagctcgggagcagttccatcagacggctcgggcacagtatttcagcccattgcttatagacaagcgtgggagttcagtacctgcaaaattgcatcaaacctgcttggaagttacaatgaagcagaatcacatctagatttgggtgtaagagtacatctggcaacagattacggaagcataatcaccaaccccatcagacgttaccttatgtgtagggaaaggcaaggactagggtcatttatcttctaaggaatatagtgactcagacaagaaacatggggggccgtgtgctctaccctgttgtgtcttcaaagcatccttctggtgagctgcatatcttcacagagtcagaggctttgtgaaattatgctggcaagcagaaatgagcaaacatggcttcttggcacttgctattttgtctcacacctgtatggactgcatcaccaagagtctcccttgttttctagcttctggttgggttaggtctatgcagaggaccagcaggagactggagggagggagattacgtatttattctcccagcttcctacctgcgggtttcctgtgggctggctgtctccctgaactaaaggccacaccttgtgtcaggcagccctttcctaacagcattgtcactaaatttctggtgactgctttctccccctacctgttcagagtgataccttcttgctgttaccaacccagggtactgcacgattccttacggcttctctccatcttgcccacatctttgaaaatagttcattgatgatacgctcttgaaattacttaatttgagtttgctgtttcctgctagaaccctgactgattcaacaacttataggattctacgattctacggctgggacaacacgcagagagaagtctagtaatttgcctaaggtcacacaagggaggaaataatacttatggaatgtttcacagtcattcttttatttgtttatttaaaatgaacttttattgttttcatacaacacaaataaaatgaagagagaaaatactcatatttctactcatcgatttccatcctttatttaatgaaacttccacattttcatctccatccaaactcttgctttgagtctcaggctttatgttccgttgcctactctataacattcatctggatgtctcaaaggtacttgaaactcatcatgtccaaaaacatgctcatggtcttccaaattctagctacaaccaagtcctgtcaaccttatatgtaaatgtctctaagatagccacatgtctccagctccactgccaccacctacctcagtctaagacactttcacctcattctttaaagaattcctaactttggtctaccggtacctatctactcttgcccgattatgcacatggcaggcagatagacctctccaagttgcaatctaggtatattgcgacttgcctaaagtcttgcagtggcttttgttgctcttaggatcgaggccaaggatgctaccttggcccagtcggcctcagcagcgttgtctcccccttgcccagagctccacagagtaacttttagttgccttaatgaactatgctttttttctaccacagggcctttgcacacattgtttcttctttctaaaacatttttacactctctgtcccaaagttaatctccagaggggtcaggactcaggacaccctaacactttcttatccatgtggatctttctaatataacatttgtcagagtttgtatttacacatcagatagacagttgtctatgtcctctattaactcatccactagactgtgtgttcgatgatgatggtctctgtcttgtgttgcctgtgtatcccagtaccatgccctgtgcctagcacatactgtgaaatcaagtatttgaacgaaaataaatgaaaacaatgagaataaggagaaaggtggacagaatcacattagaaagagctgatttcttcatatctagtttttcttctctctatgctcaaagtctaccaagataaaaatgatttcaatttagtcataagtctcaagtccttttctaggaagtaaaagttattgaaacaggatgaagaaaagactaaatccatatttctttacagtttattcaacaagatgtttgatacagaatggggcgaggggcaacaggaggaatgtttataggtgggagcagacatcattagcttcctcgagttctcatcactttctctaaatttacgtcacgatttcacctatttttttttttttttttgagacggagtttcgctcttgttgcccaggctggagtgcaatggcgcgatcttggctcatcataacctccacctcctgggttcaaacaattttcctgcctcagcctcccgagtagctgggattacaggcatgaaccaccacacccggctaattttgtatttttagtagagacgcggtttctccatgttggtcaggctggtcgtgaactcccaacctcagttggtccgcccgcctcggcctcccaaagtgccgggattacaggcgtgagccaccgcgcccggccagatttcacctatctttgagagttccagtaatgacaaattcagcttttgatgacaaattcaggataacaaaaagtggaaaattaagaaagggataaaactagcaaacagaaggctggctgcacagtaaaatatgtgcactaaatagcactcttttcagtaggatggggaaacacatgttttcttatttcatttgtttctgcaccttagccatccctttgaccttttaaaatgcagtcccacttaatacatgataggtgagttatttttcttgcctacttgcttcgatttgggttaagcgcctcagcttgaaaaaccccacagagaaccaacaattgcctggtctcccccaagtgacggttctcgccccgccccgtcccgtctcgcctcgccccgcccctccccgctcctccccgcccctccccgctcctccccgcccctccccgctcctccccgcccctccccgcccctccccgcccctccccgcccctccccgccccgccctcaacctagtgagggctggaggctgcgcagacctcgacgggccctacatgacgtcacaaaggggccagaccaagtggggcagcaccctgcgaccctgcgatcctgcctggctcagccgccttcatatatctgcttccttaagtccactcttgcccagatagctttcagttaaaactaaagaatgaaagcactaggttgagagcccacgcggctacacccacgtctactcccccactctcgccaggcaaccgcgccccccgcctgcagtggcatcgtccggccacgcccagtggcagggtttccagcgcgagcctgcaggcaggccgggaaggcggagccaggccggcctagagtcacttctccccgcccctgactgggccgggagcccggggctggtctctaagagtgggtaccgagaacagcctgaccgtggagaagggctgcgggaagcagaacaccgcccccagcgcccagcgtgctccagaaacatgagcacaaacgcctcagcctccttccccggcggcaccggcaccggcaccagtacccgcaccagtaccggcaccggcaccagtacccgcaccagtaccggcaccggcaccagtacccgcaccagtaccggcaccggcaccgagcgcaaggcggagggcccgcccgaagccgggggcacaactgcccaggtcccgaacccggactccagcttggacgacacctcctacagcctgtccgaatggagcgtccgttctgagtggcggtccgtctcggatccgctagccagttcccagtggagcacgtcctcaactgccgaggccgcctcctggagctccagcatacactccccaatcagcactaccggtcttagcgagagtactgactccgactccaagagtggcctccggggtttcagcgcttacaacccgagcagtcggatccccaagtctaccaccagctcgaactcctccgatggggccgtcacagcctccaatcaggacaccggcattccctgggtattagtaacaggacctaccccgcccgtaaactcccccgtagagtcattgcaagggtctgccttctcctcagggttcagcaccccacggggtttggtaaaaggaccgaccctgcccccggattccaacctgacctcagtgtccgactacacttggatatttgtacggggacctcctatacccaatgacctttcgcaagtgtcaatacaagcacctcctacacccagtaacacccccgagtgtcagtacaagggtctgccgcatcctcagtgtccagcttcccctggggtttggtaccaggaccacctctacccaataacatttccccagtgtcgccacaagcacctcctgcaccccataacatccccccagtgtcaaggcaggcgtctacccccacctcagtgcctgacactccgcggggttcaatacaagaacctcctgcacccagtaatcctttccagctgccgacacaaggacattctaaacctaataactctcgccgagtgtcagtacaagggtccgccccgctctcagtgcccagctccccccgggtatcagctgaaacatcagctccgcccctgggcgctcccggagtatcagcaaaagggttcgccccgcccacagtgcccggctccccccgggtatcaaaagaaggatcggctccgcccccgggctccccgggggagttgatagaagggtccttcccaccctttgccgtccccactcctgtgcctacgacccaggagcgtgtcagccaaagcatggagaatcaagagaaggcgagtatcgcgggccacatgttcgacgtagtcgtgatcggaggtggcatttcaggtcagtgtggaccgtagcggtggcctgggggaccctggccagtgaggggtaggggaacctacagtagctcttgtggtgtttgggggtctctcatgcatgcgagagtgtagtgtagccatggcttggccccatatcctgcgaggtaggagtgggggttgtgccagttttgctggtggtgtgactgggggaggcagacacaataattttactactactactattaaatactaatatttaattagctcttgctgtgcagttgtatttagcactttacgtggattttctcagtcctcaacagtcctgtgaggtgggaactaaattcatccccgttttgcaaaaccaagaaactgaggtctggggagtttcaataactctcttgaggtcgaatcacctagcttgtaagtggctgaacgattttctcccatttaagacctgcagtactaattcctgaggtggctgctttgcctcactgatttcatatcctttgccctaaacagaacatcaggatacagatttctgtagtattgagggagcagtagtgttattccagtcctgctcttctctattttccgtagaaaatttagtaggtgaagaggaaggaggtagactcctttaagaaaaggttaaaaaaaaaaagaggagaagagggggtgagctcttaaactattcctgtgtgtgtgtgtgtgtgtgtgtgtgtgtgtgtgtgtatgaactgtgtttatatatatatatgaactgtgtttatatatatatatgaactgtgtttatatatatatatgaactgtgtttatatatatatatgaactgtgtttatatatatatatgaactgtgtttatatatatatatatgaactgtgtttatatatatatatatatgaactgtgtgtgtgtatatatatatatgaacttgcaggaaggtgtaggacatttattgtccaaagagaat

SEQ ID NO: 12500 - DNA, 6000 bp, Homo sapiens
taaccactcagtgctgaaacagttgttagggaggcctgcctgttcagccgttagggagacctggcctgccacagaatgagtaggagatgagagcacagagagaactagtatagacagctctactaagaagctgggctgtgaggagtgggtagagaaaccagtggcaacaggacaagggtaggagaagggcagagtgagggtacctggcagaaagatgcaacagcgggctagaatctggccaggttctgccttcaagctgttaaccttggactggggctgtggcctgaaggaaggggtacttatttgaatggggtcagcccccttgcaattcatctgtctggagggggcactttctgattctcacaagggtactgtatgtgttagcagcagctatgctaaaggaggatgcaaataaatgggactttaaagagagagagatagaggaagaaacagagaaagagatcaaactgtttaattttcacatcagtggaaataatctggttgagagggtgtagttgaatagggaggagaaatggtgattgataggagggaccggggcctactctattgtaccactctattgtgaaaaatggatagcagatctagtaacttagatgtgatagaaatcacttaatagaaaacaactttaattctgattgagttttccttctgctaggatgacagaccattgattgaccttattaattcctagggttcctctactcccaaggttgtatgtactcttgatctggggtcttagaatcattgggtttttggctcacctagttgccctgagatgtctccatcactgtcacttgacccttctgctgcttccaagctatgcctggggcccaggaaggtttggcacagtgcccctgatcatctctgtcaagctgaaccatgtggccacttctctttgactcctgctctgccctgacacattgccaggaaaaagagttcaggtgccctgggctgcaggatccatagacttctccctttgcccactcctcctagcctaaggaaaatgtctcagtggggttgggggcactagagtgctgctgctctttcttttgcttctccaaaacatttcgtctaagccctcacaccttctttatatcagctagcttttgctacaaaacaaacccctaaaacttacatctattatttctcacaatttggtgggtcagctcagttagggcaggaaggtgtagcacctttctactctaagtgtggtcctcagaccaggagcatcagaagcacccaggagcttattagaaatgtagtctcaggacccagtgcagtggctcgtgcctgtaatcccagcaatttgggaggacgaggcaagaggattgcttgaggccaggagtccaagaccagcctgggcaacatagcaagaccctacaatttttttttttttttttgagatggagtctcactctgtcgcccaggctggagtgcagtggcacgatcttggctcactgcaacctctgcctcccgggttcaagtgattcttctgcctcagcctcccgagtagctgggactacaggcatgtgccaccacacctggctaatttttgtatttttagtatagatggggtttcaccatattggccaggctggtctccaactcctgacctcgtgatccgcctgccttggcctcccaaagtgctgggattacaggcgtgagccaccgcgcccagcctaaaaaaaaattttttttaattagccaggcatgagaaggattgcttgaacccaggaagttgaagctgcagtgagctatgatcacgccactgcactccagccttccaccagcctgggtgacagagggagagaagaccctgtctatttaaaaaaagaagaagaaagaagaaagaagaaggagaagaagaaagaaaagaaatgtagtctctctggccccaccctaggtgtaatgaatcattttctgctttttttttttttttgagatgaggtctcactctgtcacccaggttggagtgcagtggcatgacctcggctcactacaatctccacctcctgggctcaagtgatcctcccgcctcagccttccaagtagttgggactacaggtgcacgccaccatgcttggttaactttttttgtgtttttggtagagacggggtttcaccatgttgcccaggctggtcttgaactcctaggctcaggatacccacccgcgtcggcctcccaaagcgttgggattacaggtgtgagccactgggccaggcccactttctgcattttgacaggagccttcaagcattaaagtttgagaagcactggtcgaggatctatctcctttctcacctgtctggcggtcagcaggcttgtttgtctggggggtggggggcctcagctgggagggcttattttctgagccatgttgctaacccaggcttcttcacgagccgatctcagggttccaaagagcaggatgagggcaattcccacagcaggagtatttttcaaacctttgctgtgtcatgtttgctactgtcccacaggccaatgcaagccacatggtcatcccagagtcagtatgggaaggcattgcccaaaggcaaaacagaggaggggaatactttgtggttatttaaaaaacctatcacactttccactatcagagttgaggcttttggagcggagggcggggggtggggggaagcgggaaacaccagcaactatttgcattctgcccagccacacctctcccctcacaccagcacagagccacctacttgcttaaaagatgagaggaggccaggcacagtagctcaggcctgtaatcccagcacaaggccgaagtgggaggatcacttgagcccacgagttcaagaccagcctgggcaacatacagaccccggtctctacaaaaaacaaacaaacaaacaaaattagctgggtgtggtccacatgcctgtggtctcagctgcttgggaggctgaggtaggaagatcgcttgggcttgagaggttgaggctgcagtgagtggtgatagtgccaccgcactccagcctgggtgacagagccagaccctgtctcaaagctttttaaaaaagccagagaggagggaaaagtgaaaacagaagggaaagttgtagattaatattgcaaaatcatatccttgctataaacgagatgtgtacagaggtcaatgcatatatgagtttggtagtggaaaagtgagagatcgtctaacatggtttctttatgaagtaggcagtaaggtcatgtgctgagaagaggtgggtgggggaagaggggtatcagaagtctgaggagactagagaaggtttgaaatcatcataatggaactggagactgggaagtgacatgaagaacctaagatttcagcaaccatttcaggttgatgattatgaggttatcttgatgctgatctgttctgtgggctcccaaagtgctgagattacaggcgtgagccactgtgcctggctcacacctgtggagaaatgtttcgcagtggtgtttgcaggcacagagaaagccaaaagcagggtttgggggattttgctagatgagtaatgaaaaggcagagggcacgtgagtttagcttattggagggagtgttattaaaataatggtatggcatctttcagctgaatatgaaaaattgagaagaaagtgggggtggtggtcaaaaagtggaggttggagaatagggaagatttgaacaactggctggaagaagaggggaattgtggaaagaaaacgaaatgcttgagtcagtggtttcacaggtggagtagcttccgtgatgaaaaagaccagtggagagcattgcatatgttctcactcttccaatttgaacaccttcccctggtggagataagtagatatgctttctatgttttattaactttacaacaccttccccaagctggtgaaaggaagctctcacttccttattcattagcctgatgaaacagagcaaaatgtatcttttttggttctgttttgaattttagtaactctagtcttcatctgcctgttggacttcctgtctctttttcatctatctttgggtacacatttcttcttacgggtccttttaaacaccgagctcctgagaaaggtcaccattctaccactttgattctgtaaatgtcttttgctcataggtgtcagaataggctgggttatactgtggtaacaacccccaaatctcgcaatcccaggaggtacatgggtactaagaattattcacattttacaaatgaccaaactgggccccagagtattggtaaaatgtgcagagcccatcagctggtgaaaccctaaggaacacaacacttagaatttcacaaaggctagactttatgaaatgtgctgcgtggatgcagtagtatctccaacccccctggaccgctctgccacgtacaatcttctatctttcagtccggaactcagtaacacccactccagggctgatgggggcgctggatgtatagtggcgagtgtttatctgcctaggatagcgatggctaggcaggggacataaaacagaagaggcagtgaccttctccgggtggggtctatggccctttactgggtacattctgtacacacaggcccctcctttgcctgaagtcattgatgaagacttcattacggagggtttggggaaaggtgggggtctggctgggtaagccggcgtcccagccccgctacagccccgcccagatctggcagagccgtgggcgaacccaggcgggcagaaaggcggggcgggcggctgccaagccggccaataggcggctctccggctgctaagccgagagggcaggggcgccgtcagtagcaccaccgccttccaagtttccccttgtggatgcgcggccccgcggctctgctcctcccggcgcagaggggccgggagaggccacaggagcggacctggcacgggatttctgaggaacgggagaagactggcgcccgacccgctctggagggtcggtgaacgatgaagggccggcggcggcgacgccgagagtactgcaagttcgcgctgctgttggtgctgtacacgctggtgctgttgctcgtcccctccgtattggacggcggccgcgacggggacaagggcgccgagcactgccccggcctgcagcgcagcctgggagtgtggagcctggaggcggcggcggccggcgaacgcgagcagggagcggaggcgcgggccgccgaggaagggggcgcgaaccagtctcctcggttcccaagcaacctcagcggcgctgtcggggaggcagtgtctcgcgagaagcagcacatctacgtgcatgccacctggcgcaccggctcgtccttcctgggcgaactctttaaccagcacccggacgttttctacttgtatgagcccatgtggcatctatggcaggcgctgtatccgggcgacgccgagagcttgcagggcgcgctgcgcgacatgctgcgttcgctcttccgctgcgacttctccgtgctgcggctgtacgcgccgccgggggaccccgctgcgcgcgccccggacacggccaatcttaccacggccgccctcttccgctggcggactaacaaggtcatctgctcgccgccactgtgtcctggcgcaccccgtgcccgggccgaggtgggcctcgtcgaggacaccgcctgcgagcgcagctgcccacccgtggcgatacgcgccctggaggccgagtgccgaaagtacccggtggtggtcatcaaggacgtgcgcctgctcgatctgggcgtgctggtgcccctgttgcgtgatccaggcctcaacctgaaggtggtgcagcttttccgcgacccgagggcggtgcacaactcgcgcctcaagtctaggcagggactgctgcgcgagagcatccaggtgctgcgcacccgccagaggggcgaccgcttccaccgtgtgctgctggcgcacggcgtgggtgctcgccccgggggccagtctcgcgcgctgcccgccgcgc

SEQ ID NO: 12501 - DNA, 6000 bp, Homo sapiens
tttctgaaggatggcttcattctctccctgtcctgcctttctctctgtagaatggggcagtgagatcccaggttgagggataaaggaacccccacaccggggctaccctcaaggacgctcacacactgtggtctcagcttaaaggagcctcatcttccctgtccagctgctgcgtcccagagtgtgcaccctcacagaccctgtcaccagtagcacctcattcccatctctcaatttccctctgcatttgcccaggtcaggcgagctacctagaacccccctcccttcctttcttgaccttgagttctcataatttttcttcgagatctagcgtggggccaggcatggtggctcacacttgtaatcccagcactttgtgatgtggcaggatggcttgaggccaggagttcaggaacaggctgggcaacatggcaagactccatctctagaaaagaatttttttttttttttgagacggagtattgcagtctagctctgtcacccaggctggagtgcagtggtgatctcagctcactgcaacctttgcttcccagattcatgcgattctcctgcctccgcctcctgagtagctgggattacaaggcgcccaccaccacacctggctaatttttttgtatttttagtagagatggggtttcaccatgttggccaggctggtctcaaactcctgacctcaggtgatccacccatctcagcctcccaaagtgctgggattacaggcgtgagccaccgcgcctggcccagaaaagaatttttaaaagtcccagctactcaggaggccgaggcaggaggatcacttgagcccaggagttgtaggctgcagtgagttatgattgagccactgccctccagcctgggcaacacagtgagaccctaacaatcaatcagtcaatcaacaaaataagaatctggccaggcacggtggctcatgcctgtaatcccagcactttgggaggctgaggcgggtggatcacctaaggtcaggagttcgagaccagcctggccaacgtggcaaaacccgtctctactaaaaatacaaaaattagccaggtgtggtggcgggtgcctgtaatcccagctactcgggaggctgaggcaggagaatccattgaacccaggaggtggaggttgcagtgagtggagatcacaccactgcgctccagcctaggtgacagaacgagactccgtttcaataaataaataaataaatataaaaaataaaataaaataagaatcttatgagtcccagagagagagagagagagagacaaagctcttcctcacagtaaaatcccaggtatatgtgtaaaagaaaaatcattatttggccaccatcagagtagttattgcttcaggcaagaatcaccaatgaatgctaaagtagtgagtaaaagtttgatttaaaaaaaattgcagagttacagtctcaaagtatctcccgaaaagctacttattaattacaaaaggggatcatgcctgtaatcccagcactttgggaggccaatgcaggaggattgcttaagcccaggaatccgagaccagcctgggcaacatagtgagactgtttctacaaaaaatttaaaaattagccgggcatggtgactcacacctgtagtccttgaagattacatgagcccaggagttcaaagatgcagtgaaccatgattgtgtcaatgccctcaagcttgcgtaatagggcaagaccctgtctccaaaaaaaaagaaaaaaaattacaaagggaaaaatagtaaatttatactggtgaaaactagaagaccactttaagcaaaagatcaatgctaatactaacaatttcgagactaactgaaccctcctgcctcctgataacgctgagaacacagcgtcacttctgtggaattcctgccaaaaatgcagaattcaaatctaatcatgaggagacatcagataaacccaaattgaaggacattcttccaaagaactggtctgtgctctcccaaaacatcaagatcatgaaagttaagtgaagatggagacattgttccacattggaggagactaaaaaaacctgataacagaatgtatcttgtgaccctatgattcccttttcctatacaaggacactattgacatgcccaccagggtggctagaaccaaaaagtcagataacaagtatttgtgaggatgtggagcaatggaaacctcatactatgctggtagcaatgtaaaaaaagaaaaaaaagtccttgctcttaggatattcatactgaagtatttagttaaaagggtgtcatatccgcaaccactaacaaataattcagaaaaatcactgtatatcattcagaaaaattatatatatgtaaattacatatgtatatacatggggagaaagaaacggacagagacagagagagagcaaatatgttatcattataaggcttggcatttttgtcagtcccataagtgaaaaatagtatatcattgtttttaatttgtatctctttaattatggagagctcatctaaaacaccccagaaaccacaacctagaatgaccacagacatttattgagtgtccaccctctactaagctccagtgataaaaatatgaagcacaacatctggtagatgtaaaatggtattatatctcactgttgttttaattttacatttccctgagcagtaaagagattgggttatcttttcatatattatacatattgaccattttaggtttcttctgctgtgaattacctatttgtacccaatgtctattgccaagtgtattgtttgtcctcttcggatttgtagatgttcgttatatatcctaaaacctagatcctacttctttgtgacacaggtcaaaagcctagatggaaacaatcaagtccgcaaagcccaggagcacatgtggtaagaatcttccagttttaaatgccaagtcttgcaattgagggaagtatttctggtaggtgctgtgggtcattgttgactcaacttgagtgggtttgacaactgagaaaaaaattaaaatgaaatttaattcataaaatgtatgtcctgtattctgctgttaaggaaaagaattgatatttgtgcatctggtctaagctattattccttatatatacatattcttaccgtattaaatgttttttgtttgtaatacatgaatactaatttatgagctagaactccatttaacttcatgttaaaatagagagaaaatatacatttctcttcaattaccattggtgtttcccagcaaaaacctgccaagcccactcttttgtttaacagaaaaggacaatggagacgggtgagtgaacatgacttgcccagctccatacaggccattgttaatctgattaaaatctgtttcagttggctgcccaggtcagggtggcgtccagtttgacctgggcttccttctcccttccacgtcacagctaagcatgtagtgcagtaagcgcccagtaagtgctcttttggaaaaataggcccttcatcagcctaggtacaaaggggaatgcctagaaactgcagcagtagggtaggtagaaggcgggtgctacataaatctttagtgttggtgcagatagaggtgcggatggggccagtgtaagcgctttcttttttattttatttatttatttatttagagaaggagtttcgctcttgtttatttatttatttattttggagaaggagttttgctcttgtcacccaggctggagtgcaatggcgtgatctcggctcactgcaacctccgtctcctgggctcaagtgattctcctgcctcagcctccggagtagctgggattacaggcgcccagctaaattttttgtatttttagtagagacagggtttcgccatattggccagcctggtctcaaactcatgacctcaggtgatccatccgcctcggccttccaaagtgctgggttacaggtgtgagccaccacgcccagtctttatttatttattttgagacggagtttcgctcttgtagcccacaatgacgcgatcttggctcactgcaacctctgcctcctgattctcctgctttaacctcccgagtagctgggattacaagcgtgcgccaccacgcctggctaatttttgtatttttagtagagacggggtttcgccatgttggccaggctggtctcgaactcctgacctcaagctatcctcctacccttggcctcccgaagtgctgggtttataggcgtgagccaccgagcctggcccttaagagctttataaatgccccccttttaagtgctcggtactagcctccctctagttcacagagaacatttactagtcgctggggtcaccttcgaagcaaagagtctgctggggaattaagcatgcaaatcacttctcaacgacgacacgccaagtgctcacagctcgtccccaggggaagcacaggcgcctaatttgtgttcctaggtgacacagtcattacttataaatgttcctggccggtcccaggaggtgggagggttgggagttacttcggttctctcaaaggttggggaaggagagatctcggtttgttttcccatctgtgaaacggggacaccacggtatttagaggacgtgcgcgggtgactatttgggggtgcagcggcttccctcctccctcccccatctttcccttctcacttccaaggcttggaaatttggagattcggaagtttgttcttggatggccagaaatcctccggaggcagacggtctggggctgaaaccgccacaggccggaaaggtgcgggcgtgaacgtcctgcgcgccgacgtccccccgcgccggtctcccctcaatcctcctgctcccctcctccgcgtccccgtccccgcccccctcctgctctcccattggccgagccggcggccgggccgccccgggatttaaagggcccgctcgccgcgccgctctgggagccgctgctggtcccggccttgcggcctgcgggggaggctgcccggaggaggcagcggcggcggcagcgcgtcctcggtccccaggaccacggcttctttcctgccaggtaggtcgccagtagtgcgcacgcggctccccagctcccatccctgggccggcctccccaggcggatctgtagcgcgagtgctaggaccccctccccatcacctttccgactctccctcaggctatgtctcctaccaccacctccttgcagcccccggacctgggcaggactttgttggcggcctctcgccgggtggggatgagatggggggcgcggaggatacaggacaccccccctccccgtgccgccgcatccatacaaggagagatgcacacggcccccaagtgtcacagaatccccctctctgccctccactcagagcgactctaccttggaaaccagggattccccttcccgtcgcccgccccatttgatatatgggcctgaaatgtatgccatcccatcaccatcggactggactgttcacagcactggagagacagaggtccttcattcactccaggtcacaggctgtgcgtgtgcatgccgaacacccacatgcacacagttggtggctcagtctgatgtacctgacttctcacgccttcccccagtcctccagtaccgtgcctctacatgggctgggcagccccaaactgaaatgtgagtgccagagtgcatcctttaagcgaggtctgccccacggacacccgctccctctgtgtccctgctttgacagatctatccatctggccatccatccgtgggggtctgcaatggccacctttagccgccaggaatttttccagcagctactgcaaggctgtctcctgcctactgcccagcagggccttgaccagatctggctgctccttgccatctgcctcgcctgccgcctcctctggaggctcggtaagtgcctgccataccgtgtgccaccatgccaggccatatcagacctcccacattcatccatatcgagccacaccttaccct

SEQ ID NO: 12502 - DNA, 6000 bp, Homo sapiens
cagaccctcagctgacgtcgggatagcaaggctagaagcctagaagcagggcagcttccttcgccagaggcctgcggtctcccacttccggcctagtctgccagcttttgctggcacgtaggctaccactctccgggcaccggctggggccctggagccccctttggggcggagtggggaaggtgtgagtcagcgcccctggacgggccgggctaaaaaaggctgttagaacctttgggccgtgcccccattttccgtacatggtgaagaactgcagccgggcttgtgtgcacacgccacacactgggcgttcccggcacgggagaggcccagagtttccttcaccctgggaacagagccctacagccagggcttatatggccagcgggactccaaccggggtagccgcgaggaaggcgctggcagaggacagaaatgtccagtcacctccgctgtcaccacatcctgagcactcggccccatccccccacaggagggaagctgtggtctgacggaatgggcaactttcgcccctgtggggaggggacggggaaggaagaaagaatttaaaggaccggaatgcgagagtccaggtggccttggagaggaaagaggaacggtgaagacaagctgcgagagctgggagctggagggtgaagaggtgaacacttgagtggttagagctgtagatagacattgtggggaagtgtgccagggtggcttccagctacccctgacttagagcctggtggaggtgtggttcttcagaagtcagcaaagggctcaagagccccagtctataaatacagtcacacccaggagactaataatagtaaccccagccaccatgtacttagttttatccctgctactggctttattgcaatatttattttcatctacaatagttgcacatctactcaactatccgaatatgtccatttcgcagaggaggaaagtgaggcccagggagtgcagatagctacagagaggagggtcaaagcacgatttaatcaaggcctgattcccaagtctgtcctctcaatttcacctgcattgacaagtattaattgaaccccaactgtatatgttgcactgtgctaggtactgtggagatgctggaggaacaagacataaaatttctttgtgtagctgatgtatgtaatgagagtagacagatgtcagacaaaaaagacgagaaaatgaataaataaaaaaccaggccaggcgtggtggctcacgcctgtaatcccagcactttgggaggccgaggctggtggatcacgaggtcaagagttcaagagcagcctggccaagatggtgaaaccccgtctctactgaaaatacaaaaattagccaggtgtggtagcaggtgcctgtaatcacagctactcgggaggctgaggcagagaattgcttgaacccaggaggtggaggttgcagcgagccaagatcgcaccactgcactccagcctgggtgacagagcgagaatcagtctcaaaaaaaaaaaaaaaaaaaaaaaacttcaggccagacatggtggtttgtgcctgtaatcccagtactttgggaggcggaggcgggtggattgtttgagcctacaagtttgataccagcctgggcaacatagaccttgtctctacaaaaagtttaaaaattagctgggagtggtggctcatgcctgtagtcccaactacttgggacactgaggtgggaggatcacttgagcctgggaggtcaaggctgcagtgagccatgattgcaccattccactctagctggagtgacagtgagaccttatctcaaaaaaaaaaaaaaaaaaaaaaaaaggccaggctcgtggcttacatctgtaatcccaacactttgggaggccaaggcaggcggatcacctgaggtcaggagttcgagaccagtctgaccaatatggagaaaccccatctctactaaaaatacaaaattagcctggtgtggtggcacatgcctgtaatctcagctactcaggaggctgagacagaagaatcgcttgaacccgggaggtggaggttgcggtgagccaagattgtgccattgtactccagcctgggcaacaagagcaaaactccttctcaaaaaaaaaaaaaaaaaaaaaaaaaaaaaaaaaaaaagacaatttcagagagaagtgagagtcatgaagctatgaagctagcaaaaggaggttacattgtgggagatgatggtgagcttctggcctctttgaagacataactcttgagctgcaacctgaatgaccagaagccaggtatatgaagcactgagtgaagggcattgacagcagggggaatagcaagtgcaaaggtgttgaagtggaaccaggttcatcttgtttcagaaattcagacgtgtcctcacagagttggaaagcacatactcatcactaggaaaagtatgtttcatcccttccactattcactcactcttccggcaaccggggctgaaagaggggagctctttccttagttttgaggggccctgtgttggcagagagagcaggcaggcccttgggttgaatcctcctggccatccagttatgattctcccccacttcaaatgagatgagaataaaaacaacttctagtctggagagtgtgtccctcagggtacctctgggatcctgattccaggagacgagatgcatgtcttagatgcagaaattaaggctgagctgggggaaattacttgctcaaaataacacacttagccaggcgcagtggctcacgcctgtaatctcagcactttgggaggccaaggcgggagaattgcttgaggtcaggagttcaagaccagcctgagcaacataacgagaccttgtctctactaaaaaataaataaatacaaacaaagtgtctacaaatgtcacccagccttgcaccccaggagccatccattcatcttgccaatcccccagaaataaactttcctattcctcatgtacgattgtgccgactggcccctctcttcagaaccaggaaactgaggcccaacatttagggccaggacttccttgggattgcagaacacagaatcagaccttgggctctctgggctctaacactactacaaaatatgtttttttaaaatagagacaagctctcactacgttgcccaggctggtctcgaactcttgagctgaagtgattctcctacctcggcctcccaaagtgctaggattacaggcatgagccactgctcctggccttgggctctaacacttgaaacaatgcttgccctatttctgagcaactcaatgctcaccaacccctattctcacacagcctttacactggcagggtcttattctcatcactgctcagaggtttattccactgtccacaatccattatccaaaaacaaaaagctctggaaactgatggttttcccacaagataggcactatttggttacaaaacctgacctgatctaacgaggaacaattttctttcttcctttctttttgtttttccttttttggagacagggtcttgctctgttgcccaggcaggagtgcagtggtctgatcatggttcactgcagccttgaactcccaggctcaagcaatcctcccacctcagcctcccgagtagttgggattacaggcacgtgccaccatgcctgggctaatttttttcttttttcttttttttttttttttttgagacggagtcttgctctgtcgcccaggctggagtgcagtggcgcaatcttggctcactacaacctccacctcccaggttcaagcgattctcctgcctcagcctcctgactagctgggattataggcgagcgccaccacacccggttcattttttgtgtatttttagtagagacggggtttcaccatgttggacaggctggtctcgaactcctgacctcgtgatctgcccacctcggcctcccaaactgctgggattataggcttgagccaccgcgtccggccgcctgggctaatttttaaaattatttgtagagatgaggtctcactgtgttgccgaggttgatctccaactcttgggctcaagcgatcctcccacctgaggctcccagagtgttgggattactggcatgagccactgcgcccagccgaggaacacttttcaatccttacccagttattgtgaacgttcataccttttcttgaagaaataccgtttttgttgttgttgttgtttttgagacgtagtttcgctcttgttgcccagactggagtgcaatggcatgatcttggctcaccgcaacctctgcctcccgggttcaagcgattctcctgcctcagccttccgagtagctgggattacaggcatgcgtcaccgtgcccagctaatttttgtatttttagtagagacggtgtttctccatgttggtcaggctggtctcgaactcccgacctcaggtgatccacccgcctcggcctcccagtgttgggattacaggcgtgagccaccgcgcctggcccttttttttttttgtaacgcggcagctccaaaccccgctgagagtatatgcatgggaaaactttctgaaatcaaaaatattccgaattctggcaacatactgggccccaagtctttcggatttaactctgcctcggccgttttattcagttaaggaaactgagtcactccatcccaaagccagattcccgcggttctaagctgaagctgtctcgggtgcatttgcattccaaaaaggcgaagggtcccgctattactgctcctggtacctggagctgccaagcacccctgcgatggggcgccccgggggctgtgcgccaggctgggagtatccttggggggcggggcgagggggcttccggggcggcagcacctggcccggctccggccccgcccgcgtcagctctgcgcggtgattcactccctccttcgccccggggcccccttcccggccagacggcgggcaagacagctgggtgtacagcgtcctcgaaaccacgagcaagtgagcagatcctccgaggcaccagggactccagcccatgccatggcggattctgagcgcctctcggctcctggctgctgggccgcctgcaccaacttctcgcgcactcgaaagggaatcctcctgtttgctgagattgtgagcgttctggggcaggcgcgtgggcaaaagcgggatggggtggctggaccatgcggaactggatggtccgggtgaggcaggcacttggccggggcgctcggcagtggggtgcaggtgggtgggttcacggtggaggcccgaaacccggggcgcagggcgagtcggtggggtttgacgaaggttgttgagatctggtggtccccggggtgaagcaaggagcctataacgcatacggagggctacgtggggacagcctgcgtgaactcatcagtggacgcatcgaaggggtcccagggtgctgggaagtgggggcctcctgtggcagggcgtggcgcggcctgggcacaggagggcgggctggcagcgcgcccaggggcagggcctgttggggtggggcccccccgccccgcgctagtcccgcggtgtagagcgccccgcccttcgccagttcttcctcgcccttcagaggccgggcgggatgtccttagcttttcggggtttccacccttctcaaagtgggcgccgcctttgagtcacttgtaaaaggggtgcggcgcctttaacggagtcctgcctctctggtgtcactctcaccgcttcccaaaggggttgctgggggaaccgcgtgttccgccccggtcaaggccacaaagctggcgtcagcggggctcacaaaacacctggcagcgccactcccctcaggctgcccgtaacctagaagggaaaagaggaaactgaggcacccaactctactccttacttgttgggtgaccctggccaagccattaaacctctctgtgcctcagttttctcgtctataaattagaaagagtaataatagtacccagagcattagattg

SEQ ID NO: 12503 - DNA, 6000 bp, Homo sapiens
ttatttctagagacaagttctcactacgttgcccaggctggtcttgaacccctgggctcaagcgatcctcccaccttggcctcccaaagtgctgtgactattggtgtgagccactgcatccggcctttcattctttttctttttttttttttccattggagagatgcaccattatttatttgatcagtcccctattgagggacatctggttgcttcccagtttttattattacaaacaatgctacagtgaataacctcgttcatataacattttacacccatgcaaacataactgaaggaaatatttctggaaattaaattttgggatcaaagtctcatatattcttaatttttatagttattgcaaaattgccctcaattgactaattgcactcccaccaacaatttatgagaggacttaccctcccacccctgctttgtcaacacagtgtattattattactactatcattattattattatttgaagcagtctcattctgtcgcccaggctggagtgcagtggtgcgaccttggctcactgccacctccgcctcctgggttcaggtgattctcctgcctcagccaccggagtagctaggattataggcatgcaccaccacacccacctaatttttgtattttcagtagagatagggtttcttcatgttggccaggctggcttcaaaatcctgggctcaagtgatctgcccaccttggcctcccaaagtgctgggattacaggcatgagccactgtgcccggccaacacaatctattataaatatttaaaactttgccagtggtatctcatggtagctttcattagcatttctccagttatgaggttggctatccatttttggtatagaagccatttgttaattttgataccctgctctccaggcacagggcaattacaaatgacttcagatcactttatcatcagcatttcctaacctactgttttgatagatcccctgagctagagaactttgttcattttcttttattctgccccattttttgttctagaactatcccaggcatttcttaggcactcgggaaattttactttaaaatcagtatttctagcggctagcacaatggctagcataatagtaagggctcaaaaaatgtgaaacaaataaataagaaccatacaagaaacattcacttaccactctacatggctacgtactcatctaactgtctctatttgcaatgccaattttaaaatgaaagttaaagctgcatttagacatgatagtttagatgtcactgtggtctattgttctaaagctttttcttttgcaatattaagtctgaagtgctaccttttgttatacagagaaattccgtttttttttaataagctttaagatcacaatgtatttactctttgctctgtaagacctgaaatggctcttgacctgttaacagtttgttgaccatcatgggaggtggggtgggaacatcttttcaattttgtccagggtagggggaggagagcaaaggactcattatgttgatctatcttcactctcttggccaaacccactcacttccatgggcacaaacacatgggacacctggctggatttctgtagagagtggtctgagccatgggaaagaaaacaagttaacagtcagaatctgtacctcttgattgaactgttaattttgccacattagcaccacactctcaccacttcgcttgggaaggtattgtacagacatttatactcaccacacaaatagcttccgaaaaacttggggatccaaaggctgaaggagccttgttcattatcatcattatcattatcaatagtaatacaagctagcatttattgagtgcttaatctgttctaactgttctacacctgttaatacatttactcctattatcccattttataggtaagaaacccgaaacagtgaagttagataacttgaacaaggtgacacagctagtaagcgtctgagtatggttggctttgagcccaggcagtctggctctggagctcactctgttttgttttgcaattcgcaaaagataaaatgttctttttttgaaatgcacattttttggggggagggggagatttcgtcccccaactggagccctccaagctgtcatcggtcagtggcgacaccaagtggtaaactgggtgtactgcagcccttttataactcccaattccccccaattccttgctccctcccaacccctcctactcgctccccagctctcccaaataaacctgtatgtactttaagtaaagccaatatgtttgctctgcagaggcagtttcgtgacatgtctccttccaaccagactgccatccttcaaaccgttttttcctgtatcagaggaagaggtgtccgaggttagtttgtgttttgaatctcatttctcgcctctcaattattttactccattagttatcccctccttttcttgactcttttgtgtgtgtatgtgagacagagtttcgctcttgtttcccaggctggagtgccgtggtgcgatctcggctcactgcaaattctgcctcctgggttcaagttattctcctgcctcagcctcctgagtagctgggattacaggcgccagccaccatgcctagccatgtatttttagtagagatggggtttcatcatgttggccaggctggtctcgaactcctgacctcaagtgatccacctgccttggcctcccaaagtgctgggattacaggcgtgagccactgcacccggcctcttgcctctttattattgatttcaccagtagtttttctgctcgacctacatataagctccagtttcttttacttcaatgacaaaaaaaaaaatcaagcaaacaatcaaacctttccttgaacaattactttagattcaccttttaaaagatgaattccaaaagaggattgccttgctcagaaacctcaattctttctcagtcactttttgaattaggtataaatcttagtccaatattcaggatgctccaaaattgggccccaatttaccttctgggtattatcttccacaattcccctgtacttccttaccctaaacttcaaccacataggactactcacgggtcctcacatataacttcctgcctgctcacctttgccaacggtgttacctccacttggatttacctttattagaggcctgtactgatattttctagttatttgtggctatcccatacaccatgagtgcctgaaggaagggactgaatgttaccagctcagaaagcaaaaaaattttggactgaaaaaataaaaatccggccattcatcaggccggaataacacacagataaaaccagatgcaaatttaacagagaacaatatttctttggcggacatattgcagctgtaaagtggtaacgatgtttttatttcagtgaccaccacttttttattcactgagagactttgttctctaaaatcgtagattatcagaaacttttctgcttgaaatcgtatcagtaagaatgaaacatcccacatgcatctggaggacataagtttctttgacacagagaagcagcctcaatttccaacccaggtgcagagcttcagataaggggtatctggacacaacattccacatctatctttattttgtggttcccaaggaaacacaactctgggttcactttgcagttcagacctgatggtgaccccaaatgacagtactgctttgctttgagcttaccaaaaacactgctttgtttaaaattcacctaaactccactcttctctccaatcctataatgactccatgtttttctgtttgatgaaatgcctaccgtgtgcagtctctcatattgcaatgggtcaaagcctgactatgtcggattacaaatttgtccccggtagccttatgctgattgggctaggataggggtttttaaatccctgaccacttagcttgtccaaagtaggcattccaaattgttcactgcagtagagtaccctggttctagttagattacttggattatatggattccagtctcaggtctgccaagaactaattagctggatcatcttaagtgagtcagtgcaccccatttggcctaagttttctcttctgcaaaacggtgtgctgtttctttcaaacctagggtaagggctttggagtaagttagacctaggttggattcccagttctaccacgtactagtcctgtgacttcagcttttctgagcctctgttttgtaatgattaatatggagataatacagtactaacaactgcagtatagtttttgcagcgttgctggaaacatcaagttggctgttaaaagtatcactacgtttgatcactattcctattcctactattatatgagtttagacaagttacttaacctttctgtgcctgtgtatttttatgagtaaaaatggagaaataaccctcggggttattgtgaacaccaaatgagacgaaaaaagtaaaggggttaggagagtgcctggcacataagaagcagctcaaattatgtgatctaatgttattagtattagatttctactactaattactctgtgggccgaaagctcaggatagacagtttcattctaaggacaaaccttctccccagcaaaaaaaggcactgcaagctggaaatagtgaaacacaatggggcattgcgttttcaaaggcaactgacacgcccagcactgggataggacccgcccgcccagtcctcattaaatatggcagcgagcggggccgacgtactgcggctgcgcaagttgaaactcctcctggcagctcctccccggcgggcctcccctcatctcggctgggtagaggtgccgggtgtgagctcggcgtggcgcgcacgcgcagacgctggctgggctgagccgatactcgcgaggcgccctgtcacatgagccgcgcgcccgcttcgctccccctcctccccggctgggctgtgtgaatgaagctctgccggctacgtggggcgctcactcaacttggtgtcctggacgccagagccgaccgagcgcgctgcccaccggcggcggacacgggctccgccgctccggacctcggcgacaggtaaaggcaaacgggctgtcccttccccaacagtccttggcgggccgctggcccccggcccacccccggagcaccccctaagcgcagcgacacaggggaagcgcaatcccgctggcttggacccccggagatggggcttccccgcgcccggcgttggcagcccggcgcttagaggaggtagacaggctagttccagccagtgctgagcggcgttttcccgggagcccagccctgttctccgagttatggtccctgggttgcccgagcgaagtttccttgcggagcggcgccaagcccgccccgcttttgaatcggagtgtttagccgcctgcgtcccctttcccggactggggtagggtgacttaggctggcaaagctcagccgaggcccggctcttctccctccggctctggacttgccgctggttttgtatgggtcttagcaaagtggagaaactctcggaaaagtagttgctgcgctgttttccttttgccacttaacgcgcgtagctggttctctccagactttcgagccttgctcttgagcgccttgatccacacgggaaaagctttgcctttacattgacgcacgtttcctttgattaacatttcagagcaaatcagttgcctggagttcccagtgaagttgtacctgtgcccgtgcgataacgtcagtggaagctgccccgagtaagtgagggaaatctagaagtttggagcataaaaaaccagcacgaatcaactttacataaacttcatacatttattagcaactgctcgggtttaacttcagggatgttaaatttcgcctagtcccacgggacgatgatcattacttcttaactgcacgcgaaataggagaagaaaaaaggcaaatcaaaacagactgtcccaggtctcagagaagtc

SEQ ID NO: 12504 - DNA, 6000 bp, Homo sapiens
agcctcttttactaggagttctggaattagggaagagaggaaaggtacaaccctcctcccgaactccaggggaggagaatctcattgcacagatgtcctctgttcactcgattctcctggagcatttctaaggcacacagagctgctaccatcatagccattactgaccaagtactctgggtgaaattcctttattaactgaataaacttgttctgaagtgctgaccggacactctggggacagggggaggtttcggctgtatccttgctggcagatgacccccacacttggggggtaaggagagccatggcagaattcaacccacggtcccctaggagtacacaggagaccaccctaccctcacctgagggatgtgtgtgtgcaagggttgggtcagggcagactcttcagaagaggggaggtttgtgcggcaggcactttgattctgcacagcttacagtccagagagccgaagaacaagaggaactagattcccattctcagtctgttgatttccacaccacatttggagtctgatcaactccacagctgtgttgcagccgctaacgctgcctctgctctgtttgcctctagattcttcttatctgttaaataaagtgaggctgatggagatgtaatttagggcaggggtggattgcaagtgtctctgtgatagggcaaagcgcctcccggtggaggcgcagaagctaaactcgactggtagctgtgaggcaagggacgccagggcagctcctgtggactgtgttagaacttttcagggtggctttgccctgccaggggcctggatctcacagggggacgtcgtgttaggaccaagctgactgtcccatcacagaataatatctgcagctcagcatggggagcataagcaaagtacgttgtcgtgagtttaaagaggcctggctttggagtctgacagaacccgcgtgtgagtcccagatccagccttttctgcctcagtgccctgacctctttcagcttggttccttatctgtagatgggagtttgatacttacctctctgggtctttgggaaatcaacactgtacatgagtagcacacagtaggtcctcaacaaccaggctccagggagagagagccattcacactgtgccatgttagaggcacatcagtgtgcaggccagcgtgccaggacagtgggagtccagtctaccctccagccagggtttgggcttgggctgatggtggcaggaccagggccatttccatcttttctcttttattgtccatatgtccaaagcagacacttccattcatattcaggtgtgcaatgctaggagctgaaataacaggctgtagtgaatgaagcgaagcctcacagttcactctatggcaggaagaaccagctgtgaggcaggtcctcagcccacatcacttcatggtactgaacctggggccacagttccaaactccatgttcacacatgatgagtctataggaatgaaggagagatctatgttgtgtatctttattattatgttttattgtatatatttaaggtataaaacatgttgttatacacacacacacacacacacacagtgaaataattgctacagtcaggcaaatgaacctgtcaccttcctcagttaccttcctgcatcctatttttgcaagtaaacttttcctaaaaaccctactctcacgtgacattccagttggttggcccattgggggaattttcatgaatctccatcatgtgctattcagtaaaaatatcaaacccactaagcatgccttttcatccagttgctccctaggtaaagtataatttgctctccttcacttgagagctgaaggtaaggagcaatcaggcagcggttgatggagcaagtgcaggccagacagagggaagggcggttgtgaggcggcagacacgagagagagacagcgagagagcgagcgtgcacgctagacagagagaggcctggtagtagctggggcctgataccctaatccaggaggctggactttatcctaagggcagcaggcagccctagtagaatttgaaaaggtttgacatgaccagattagcagtcaagaaaggtgccccactcactgggacagagaatgcgtgggaaggggtcaagactggcagcaagatgagctatgaattgttggtggtcatcgaggagggagatgagggtgactggactagggaacttcctgtggtgatggagaggagtcagtgtcaaggtctcacttagaaaaacttgggaggtctaactggccaggctcggtcaactgtgggggtggtaagaggcagcaatcaaggatggctttcaagatctttggcccaagctgctgggtagagggtggtgcctgtcactgagtcaggcagcacaggaggaggggcaggcgtgctgagtggggatgggtgcgttcactttgggacatgctgagcagtacttgctatgggactcaacgacttatgacttgaagacttcgcagagctgacctaacctccctgtgcttaccgtgcctcatctgtaataggagaataagaataattagaaaaaataactaattagtttcatttgttgagtctaggagaatgttctccttttatactgcagagtggtattttcttgtcaggtcttcccaagtaaaatgggaatgtctcgacttgcccatacagtggcttgattttacctgtctgctttgggtatcaccaccattcggcatgtattgccaatactaaacaaataagtaaatacataaattcaaagtaacaggtgtttattatcacgtgtgtgctgtaatagcccatcagcctgtccctcagacaaataaactctctttaaatcttctaaacttcctcttgaagcccacctctccctccaggggctggacagggcatttgggacccaggatctctaacactctcttctctgggaagccatctcccactgcccaggatgctggatgggaggtgagtgcaacgggcctgtggggttgtcagttggcggaagaaatctgtagatccagggagagaatcgagccacatgtgtggatttggaaatgacagtgtatggctgcacagcacgaaggggatgaagtcacagacacctggatttaaatcgagactccaccatttatttcttgtacgactttggggaggttacttaatctctttgtggctcagttacttcatttgtaaaatgaaatgataatattctgggagaatggttcatgtttccttccttcataaactgctgttcacgaggcggcttcttccagggttaaaaaggaatctactatccatgtatctgctaggacagacattgttgcgtgtcacttgactcctgaaatacgccacggtaaagaaatctctgtacactttcgtgttctgggaagtcactgaccacacaggaccaattattctccatgagacttagataagggatgctgtctgcccactctgtgccgtgactcccagatggcagacaccaccagtccttgttcttttgtctcatgaatgtgttgtaaccaagcgagttatagagaaacgccacacttttgagacaaattaaggggacctttattagctggcgacctacaggcagctaacgctcaaaattctctcggccccaaggaaggggctagttttgtttttataccgtggtctaaacaggggaggggggagtttagctgaagcaattttacagaagcagaataggcaaaaagttaaaaaaaattaattggttatagaagcagttacaaaaaataaacagttccaggtgcaggggcttaaactatgattaagagataaatgcaggggcttttaggtaccttccaccgagcacattcccgagctgttggtacagcctgcctcaatatcttaccagcaggtgtattcttggatgtgcttggactcagcttgcactagttattcccttaagggggataaagggggctgcaagtgaagaaactaaaatggagtctgtccggctctctctgctaggaaagagtcactcaggttaaaacaaggtagggtatcacaaatgattcacttagacgggaagtctgtcctcctaaaagtagctaggcacagagagaaacattccctgttcagctggctgagacttccgctgattaaaaaaaaaacaaaaaaccctgccccataaatctccccactgaaaccggtgtactccttcctatgaaagtaaaagacacccccgccccgccccggttaccccaacagtgtgatttccacttctggggcgctctccctaaggcagtagcctgaataatttcaatgtattggattgtttggtttctgtctttaccaaggtgcatttatcattcatgcaaaaacagtaaaaaaaaaaaaaaaaaaaaaaaaaaatgaaacagcacgtgtcggttctcagcggcgcgccctagctcaaaactccagccaatcacaggagaagtcggccgcctcccaaccctccagcccagttcccacgtccctcgcccgggaagtcacgtccgctacagggagtgtcttcccatggcctccggaagcattcggcagtccacaagccacgcttcagagaagccgctccgggaacgccgcggcgcacctccggaagggatgacctccacgccttctcccctcgcagtccacccgagcggcgtgggtcgcgagaagccacccaaccgctccgtcttccggctccggcggtccgcggcagccaatcaaaggttcagtttctcagcggcgtcgcatccctgtgacgtgagcacatcctcgccggcgcccccttccgcgctgcggcgcctctagcccgccggagggcggctcctctcgatggtcttaacccttcaattacgagcgggcggcgctgcgtttccagggcagaggaaacgaggcgccgcgttggcgcttggacggcgggaaccggctccggagcgagaacgcgcgtgagagagcccgagagagacggagagcgagcgagcgcgcgggagagactgagagcgggggggtgggagagagacttccagagagacagagcgagaggccgagacggaggctgtccctagcacaggccagggtgtcttgggactcgaatccctgggttgggctggccgggagtggggctttcgaaggaagcgggtgattttccacgtcgtccatatctccccggtgtgggaatggcggtcgtgcactctgggggtggcgttgttctcgttccctacttgggggtggcctttttcagcggagaaagaggatgccgcgggcattggtagccggcgggactacacttgggctaggatcagtgttcagcgggttcagaaatcaccgtgtccttggcatcacctccctccccacctcctctcccatcgcacagcaggagacagtgactggagggttttcaaggaggactgcattgcccctattgaaacaaaccgtccgacaaaccctttctccgacgtgtgacagagggacggtcgtaatgtgaaatacgactagacatgcgtttaatgggcggtgtgattgctgcattcgtgcgcaatgaatggtccaggccatttgtgtccagtagccgcacaagctgcagggtctcatgtttagagagggagggcctctccgccgtccaccttgctggagtacaggcgaccctgggcggtagccctctccgccatcagaaatgtggtgctctgagtagccacagattcccatctgcatctccaataccatttccctctactcactgacccgttgggtgcgttggatttgtgcgtgggtgtgagggtagtttggtgtgtttgcttgcaaatggaaaagcgaatggccttggttggctgagcttatcagggcactagcagtggagagagaaaggactactgtattcttaggagcagaatctcaacaacttcctataaaacgggcagtgtgtcttacctggaatgctttggcatttaataaaatgtcctgtgaatacttttcatagggaagcactttgtttttac

SEQ ID NO: 12505 - DNA, 6000 bp, Homo sapiens
ggataaaagactacacattggatacagtgtacactgctcggtgatgcatgcaccataatctcagaaatcaccactacggaacttattcatgtaaccaaacaccacttcttcccttaaaacctattgaatttaaaattaaaaaaagaaatacaactgatttttgtatgttgaatttgtttcttagttattttttgtggattctttatctacatataaagttatgtggtctgctaacagggacaattaaacttcttttttttccaaattggattacatttctttctcttgctgaggatgtcagtactatgttgaatataagtggtgagagcaggcatacttgctttattcctgaccttagagaaaaggctttccacttttcaccattgagtaggatgttagctataggtttgttgtatatgagctttattgtattgaggtacgtttccttttatacctaatttgctgagcgctttttcttaaaatcaagaattattgttgaattttatcaacgccttttctgcatctactgagatgatcatgtggtttctgtcctttattctgttaaggtattctatcacatttagtgatttgcatgtgttgaaccatccttgcatccttgggataaatcacacttgatcatgatgaacgatctttttaatatggtgttgaatttggtttgctagtattttgctgaggagtttgcatctatgttcctcagggatactggtctgtaattttcttttcttctagtgtctttgtctggttttggtgtcagggtaattctggttctgtaaaatgactttggaagtgtttctttctcttcaatgtattggtagaatttgaaaaggattgatattcattcctctttaaatgtttggtaaaattcagcagtggatccaccaggtctggagattttctttgatgagagacttttatcactgatttagtctcctttcccattacatatctgtttagattttctatttcttcaagcttaagtcttggtaggttttatgtgtctaggaatgtatccatttcttctaggttatccaatttcctggcatataattgttcttagtattctcttaaaatcttttgcttttctgtggtattaattgtaatgtctcctctttcatttctgattttgagtcttctcttgttttttcttagttgatctagctaagggcttgtcaatcttatttatcttttcataaaaccaactcttggtttcactgatttttttcctattgtttctctaatctctacttcatttacttctgctctgatctttattatttccttttttctactaattttgagcttatttgttcttttttttccagttccttgaagtgtgatgttagattgtttgggatcttttttctttttgatgtatgtatttattgctataaacttcgttcttagaagtgcttttgctgcattctataagttttagtatgttgtatatacattttcgcttgtctcaagatattttaaattttccctttaatttcttccttgacgtattggttattctggaatatgttttttgatttccatatatttatgaatgttccacaattcttatcattaatgatttctagttccataccactgtgcatatattacttgatgtgatttcaatattcttaaatttgttaagacttgtttttgtctgtcactttgaaaaaattcaacaaccttcatgctaaaaactctcaataaattaggtattgatgggatgtatcaaaataataagagctatctatgacaaacccacagccaatatcatactgaatgggcaaaaactggaagcattccctttgaaaactggcacaagacagggatgccctctctcaccactcctattcaacatagtgttggaagttctggccagggcaattaggcaggagaaggaaataaagggtattcaattaggaaaagaggaagtcaaattgtccctgtttgcagatgacatgactgtatatctagaaaaccccattgtctcagctcaaaatctccttaagctgataagcaacttcagcaaagtctcaggatacaaaatcaatgtacaaaaatcacaagcattcttatacaccaataacagacaaacagagagccaaatcatgagtgaactcctattcacaattgcttcaaagagaataaaatacctaggaatccaacttacaagggatgtgaaggacctcttcaaggagaactacaaaccactgctcaatgaaataaaagaggatacaaagaaatggaagaacattccatgctcatggctaggaagaatcaatatcgtgaaaatggccatactgcccaaggtaatttatagattcaatgtcatccccatcaagctaccaatgactttcttcacagaattggaaaaactactttaaagttcatatggaaccaaaaaagagcccgcatcaccaagtcaatcctaagccaaaagaacaaagctgggggcatctcgctacctgacttcaaactatactacaaggctagagtaaccaaaacagcatggtactagtaccaaaacagagatacagatcaatggaacagaacagagccctcagaaataatgccgcatatctacaactatctgatctttgacaaacctgagaaaaacaagcaatggggaaaggattccctatttaataaacggtgctgggaaaactggctagccatatgtagaaagctgaaactggatcccttccttacaccttatacaaaaattaattcaagatggatgaaagacttaaacgttagacctaaaaccataaaaaccctagaagaaaacctaggcattaccattcaggacataggcatgggcaaggacttcatgtctaaaacaccaaaagcaatggcaacaaaagccaaaattgacaagtgggatctaatttaactcaagagcttctgcacagcaaaagaaactaccatcagagtgaacaggcaacttacagactgggagaaaatttttgcaacctactcatcagacaaagggctaacatccagaatctacaatgaactcaaacaaattgacaagaaaaaaacaaacaaccccatcaaaaagtaggtgaaggacatgaatagacacttctcaaaagaagacatttatgcagccaaaaaacacatgaaaaaatgctcaccatcactggccgtcagagaaaggcaaatcaaaaccacaatgagataccatctcacaccagttagagtggcaatcattaaaaagtcaggaaacaacaggtgctggagaggatgtggagaaataggaacacttttacactgttggtgggactggaaactagttcaaccattgtggaagtcagtgtggtgattcctcagggatctagaactagaaataccatttgacccaggcatcctattactgggtatacacccaaaggactataaatcatgctgctataaagacacacgcacacatatgtttattgcggcattattcacaatagcagagacttggaaccaacccgaatgtccaacaacgatagactggattaagaaaatgtggcacatatacaccatggaatactatgcagccataaaaatgatgagttcatgtcctttgtagggtcatggatgaaattggaaatcatcattctcagtaaactactgcaaggacaaaaaaccaaacaccgcatattctcactcataggtgggaattgaacaatgagaacacatggacacaggaaggggaacatcacactctggggactgttgtggggtggggggaggggggagggatagcattaggagatatacctaatgctaaatgacgagttaatgggtgcagcaccccagcatggcacatgtatacatatgtaactaacctgcacattgtgcacatgtaccctaaaacttaaagtagaataataataaaataaaataaaaaagacttgtttttggcctaacttatgatctatcctggagaattttctatgtgtgcttgagaatattatatattctattggataaaatattccgtaggtcctttttgtctaaagtgtatttcaagttcaatgtttccctatcgattttctgtctggatgatctgtgaattgttgaagatggggtcttgaagtctcctaccattattgtattgcagtctacttctcccttcagatctattaatatttgttttatatatttaggtgcttctatgttgggtgcatatattaaatatgtttataattattcgatattcacgatgaatttatctcattatcattatataatgacctttaagatcttttatggtttttgactttaagtctattttatttgacatatgtgtagttatccttgctctcttttgaatgattgatggaatagataaatgtcatgaattgttttctgcatgggggcacagtgcaccatgtcacaagagacagtctaagtacaaactgatattgttaaaacatcaatatagtcattgtgggatcaataaaaacttttcatagatttttatacattactgtttttattctgaattgcataagatggacgggcaccctatcttttagtgtttagaacctctaaatgttttaatgtggtaacacttgaaaaacagaaatgaatatgacctagtcccctgctccagagcagctctagggaagagagacatagacacaaggtataacaacactatgtaaatagtgttgggatagagggtctgtaggaagggttggtgtgggagttcagagaactacattcctcctaggggaaacaggagaatcaaataggaacggagatacagagtggggaatagagaagtcaaatggagaataagagggagtgataactgaataggggtagtaagaagaaaaagggagctacattgaggagaatggaaagttgaaagtaggtatggaggggaggagactgacaggcaggaacggagacccccctctggaggcggaaagaggcaggaccacttccggccagggagggggataggctcagacacaaggagaggcttggagagagcagacgccttctggattcaagaagacgaggtgagctgaggtacctggctttagtgaagaccctgtgggggcttcctggctgcggcttcgacgtgcctgactccacacgcccctaaggtttgaagaaaacctgctggaggtttgggacctaaccgcatcaaagtcgcctttagcggtgcctggacccagttcgcacgggaggaagtaggaggcagaatcccctttgggccacagaaagtaacgatctggactcggttcgggccgtgaaagggagggatgcagacctagttgggaccgcagaaaggaaggatcgagaaatccttcagacggtagcaagaggggaggaggatacacacagttcgggagggagataggagacggcaggactccgtttaggctggagaaagggggcagtaccccgtttgggccacagaatggagggatcgggacccagagataagagtgggcagcatcccttttgagcaacggaaaggaccagactcagacaggagaaaggaggggatatgacccggttggttccggtttgaaagggaagagacaggacctggtagggtttgagaacaggaatacacagaaggttcatacagttggatttgggggtgaggtattcatgttgcagaaagggcggagctgcacacttgcagacgtggaaagaggggggagtggtgttggttggggaaggggtggtgcagagacgtaccgcagagcggagggagggggcttattaaaggaagggaagatgaagagaaatgctgcagagcggagggaggggggtgtattgggaaggggcggtgcgtggcagtaccgcagaggagagatgggcggtgttggggtaggggcggtgcggagtggtactgcagagcggagggagggggctagtgttgggggaagggttggatcgagatgtgatgcagttagaaagagtgggtcggggtggcgccaagatgttctgttgctctgagagcag

SEQ ID NO: 12506 - DNA, 6000 bp, Homo sapiens
tttgggggttaggtgcttagaggaataggactgggccagtggatggattgattggaaaagtacaggggttggtagtgacatacacacagtccttttagaaacaaacttggtcaaacaatggaactgtcaggtacaatcaagtcaaccttttaactagaaaagcctcaagtcatcttctgaaatgtgaagttaacacgcacttttttttctagtaggatcttgctgaccttgaaggtcagctctaaggctgctgtcttattctttcactaatcattcatgtattcattcatccagcaaatatttattgagcaccaactctgtatcaagtgctgtgctaggcattgaggctacagtagggagcaagaaaaatgtaatccctgaccccacagagcttccattatacggtgaggagagagttaagcaaacaatttcaacaaattgttgttagatgtacggggtgacttgggagcacatcacaggaggacctcacccagaagcatagaaagtcagggaaaacctcttagaggaagggacttctaaactgagacccaaaaaatgagtgggtgaatgaataggtgaaaaagtgattgaggcagatgaaacaacatatcagaatctgttggagggaagagagagcaccatgcacattggaaactgacaaactgacagacctctggcatgggtgggacgcattgagtgtgaggagaggaagggcaagcagtgacctagaaagattaggaagggctgggccataaaaatgccatataggccatgttaagaagtttgatctttatcctagtgaaataataaggaattaattttcttaatgtaacagatatgagtttcttgagagaatagaaatacaaagaagacaacaaaagtggcttcatattcactttccaagtgacctttttttaaaaacaaaagtaactaatatataaggcttgaaaatctaaacagttcaaaacgaaaaatgaaagtcacgcttcccccaaccaagttactctccccaaggaaaaccaccattaagaatattttgtgttatttccagaagaaatattcattgtcccctcatgtaagtatgtatatatgtgtgtgtgtgtgtgtgtgtgtgtggagatatctatatctctatgtatgaccaatcacaatatgctcactcttttgcaccttgctttttatttaatgacatatattgaaaatattttcatatgtgcattcacacacacacacacacacacacatatacgaaatatttcatcagtttgagtgtcatccttactagagagtcttactaatatcattattattccaactttagtcaataagggaggcattgctgggggattttaagcaataaggatttacaaccacttttgtgttatgggaaaaatagctttgactgttatttgaagaccagattatggggggtcaagagtggagtcataaagaattataaggaggctattacgctggtccaattaaaagattatggtgacttagaccaagtccatggcggtggagatagagagaagtgggtgcattgagaaaaagatgtaaaatataaatatgacaggacatatcaatgaaatggttgtagagagtgagagagaagagagtaatctcagatgacattcaagtctctggcttggtatataggaatgagaatgctaattatgtcatgcagtcgttcaggaggcttattctgaatgatattcacccattgaaaatatcctctccctactctaaaatgttatatcacattgtagagacctctattctcttacttactatgtctatttatagtaatgaaacattttatttgtacattgttttagccttcttacatgctatgtactccttagtagtgtggctggaagtaggcaggtatgaggaaaatagaggaagaaaaaaaaagactaacatttactgatcatttactatgtaacaggtgttacacagggccatttttcagacattgcattttattttcacagcctgattttacaaataacaaaatggaggctcagagcactcaagtgacttccccaagatcatacattttagggagagacagagctaagattcaaaccaagtttgtccatgcccagggcccaccatcaggaagccaaatgagaaagtatagaagagttgggaggaacagctgatgccatgtatagagctgctccaggcaggcaacagagaggaaagcatgttaattgcacagggagaggagaggaagcttcacccaggcaagcagaaagattcttgggcaaagggagtggggaaataggtgttgggaggactctcagggagacgccacatgaatgaggtaccaggaagctgaataaaatatatttttgacctagggccaaagagtgaatactcaaagaccaggtgagtctggagctaaagaatcagtctgcagatgcaagtaagctggtggtggtgggaggttggggggtgagcttcagagcaagcatcccttacagcagtggtcctcaaaccagcagtggtcctcaaaccagcagcagcagcatcccctgggaacttgccagaaatgcaagttcctgggcctcacccaagacttactgaagcaaaaactcaatgccttaacaaatcctataagggattctggtacatgttcaagtttgaggcctacagccttggaggactagggaaagcagcaagtggagttcaagagccagagtacaagaaccaaacagtgtacccagagcaagcctagggctgtcacacatcacagcaatgcagagcaacctttccaaagcataacagagtctgctggtcagaagtggtggtggggagtggcttcagagatgtggtttctgggggacaaccccctcttccctgcacccctccacctttccccagaggtcttctttttaagaaactgctaagggcaagctcatcagaggatcctgaggtaaaggggttagactgtctgtgccaaggcactgcccatggcttttaattttctcctggtacctgatactgtcacaaaatttaactgtggaaaatataggaaggaaaacaacatttactgggggtctgaacatgctgagcactgtgctaagggttcacacaaatgccagctgatttaatcctcacaatatttcagtcatggaagtgttattattcctgttctgcagatgagggaccagaggctcgaaaaagttaagtgatttgcccgaggtcacatagctcagaaaaaggcagccaagatacaatccttagtctttctgactccaaatgccatgcttctcaccctagaccatgttgactctaatgtgaaggtccctggggtcctctcctctttgtagccaccccagggccatgtgttattgatggcccatagatgagtaacctggaaatattggttgaatgaataaacgaaaagatgttctagtgacagagtttaacacatgaaggacccttaaggatattctggtcttacggttttccaatctgtttttagtgtcctagacatttcttactggtgctccagacacaatcacattgtctaggaaaccagtcatacccagtggacaggttcctctgtctcttcacccttgcccatttctatctccttccctgccttacctagaacaaatcactttcatcttccataagtagtgggtgtttactaagattctgtttggggaaagggttctgctgccaaaattaattttgagaaacccaaatctagaccacctttttcatgttataggtgaagaaactgagtgatagaaaggcaaaaagacttgtccagggtcactgtgtgctctttagtagcataactagaatgtgaagccaggattcttgaaacattcttcttttttgacacaagttaatacagtttgtgtcctaacgaggaaataattatttagatttcaacaattatttagaattgaaaaattaaaaattataactctaatttttgcctttactatgttccagttattgtgctaaatagttaatacgtatagccttatttaagttcttataacagtcttataaaataggtaatattattatctccatttgaaaactgaggtttagggggattaaattactttaatcatagaatcaggaaatggcagagttgggatttcagttcagaatatctgatttcagttttcatgctcttaacagtgatgccatattgcaaatgtctatattgaaaaaaaagtctatttagcctgctgcttgttttgtaaattaatttttattggcacaatgatataccttgagagctacaaagacaaatttgtgtagttatggcaaacagaaactgtatgctctggaaataaatgatttagtagctagccctttatagaaaaaatctgccaacctctggtctgtagacaccaactttaaaatgtttttcaagtgacctccaggagaaggaaccagaaatgtaccccggatttgcagaaaaggtgggtgctgtttgtactctcagtgaaattggtgaatgaataatacaaacctggaaacctggcctacctggcctcctgcagtcttcactgtgttgattcaagtctattatgacctgttcttgttgtctttcatgagtcagagcagaggccttatcccttcccctccctgtcataaatgccttagagcttggacttggatctcagcttaatcagttttgtctccacttcccctttcttgcttcaaggttcacatgtgtgcgaggcagataattctaggggctgccatggcttggctaagcttcccttgaccactgagcatttctaagggagttgaggctggtggctcctccttccttcctactggtgcttccacctgccttggtctgagttgcagtccatggggcagcgcctaagtgtctgagcacacttaagaatctctagtggtttatgacccagactttgccctaccacctcagtcttctgaatgttctcttccctggaccctgctccagacactttaaattcagaagaggaaaatgtgcccagcctgcctggagaaaagtgtctgctcctagccaagatctcctcatcacaaagtaagaatatcaggtggtggaacccccatcatacctgtccccttcctatacctgggtctgttgggtagatgcagtcctttttagagaggcatagtattctcagacctgtcgccacaaattgctccccactcattctttccctatactttgtgtctttgaaacctctttatcttctatgtttaatatctagactatactttcttcatggaattctagatgtgtaaatttacagggctgggagggtccatatctagtttaagaccctcattgtagaaatagaaagaggcccagagaagagaagggagtgggccaaatccacaaaatccacatagctgattactcctagagcaagtggggcgagaaccttggtcacttgactcaggacagtgacttttcactcttctctctttccaccaggaatgggaatgacctttgactttaaacaaatccagactccagttttaccctgaattgttgggggaacattttgttttttttttctttttagtattttcaattcttccatgtcttagtttttagggtgttgacctgtgttaatccaggctatcttctagctatatctggtttcctcaggtggaaaatgttaaatatagttaatataaaatttcactctagaatctgctagaaatgacggaggcaaagttaatgtatatataaaaaaatccaccagtgactggtggccagtaggctttcaataattgtgaagtcccttctacccccttgaaagtactgtgtttctcccctaagcagcacattgtgtgtggtggtttcatggttaaaagtttagacagacccagcaaatctctcttctcttttacttcctaagtgtgtgaccttggacaagttaccttccctctcagagctgaattttcctcagttgtaaaatagagagaattagagtattcatctcacaggataattgt

SEQ ID NO: 12507 - DNA, 6000 bp, Homo sapiens
gcctctgagggcccagggtcccagctgcccttcagaggcttgtccacctgttatgcacaccaagccatgctctggctctcagatgccctatttcaggctcttacagggacaggggggcaggtcatttgcctgcatggagcttgaggctttgggacagatgtctaggagtccagggtaggggtaaggggtatgaggaggagataaagagagaaggagggagggggaccagacccatctgagggagagaggggctcctcccatccctagtgccattctgccatcaacctgacacaggctagcatctggcaaatcaagatgatctcagtgcaaatacccataaaccaggcatgcagctggggcagggacagggaagggctggggagagagtctggctgaacctttggcctttgggacgacccccttcttccccagccaccgggaactctcgtgggtgcagtgaaaacagacttccagatcttacccgcctgaggctagatctcacctagccctggggtatgatgcagccacgtggggaaaggaggaagagtgggaagtctcaggtcccaccccaggcttgcccagagactgacctacagatagggtgaattggaaaaaagcaaagtattcattgaagagaaagggcaacccaagatcagcatagaccccagctggtctcagctaggaggcaagtgtgggcagagggaaggacagcagagaagggggtggtgggaataagctggctgagcaaaagagcactttgcagactgaggttggtggagcagaggatgcagccagattgagcctggagccttagttttctcatctctaaaacaggtctatcaatatcaacctcagggatgttgtgaagattaaacaaacataatagagcaccaggtgaaagcacccagccacactgcctggcatacagtaggtgtttaataaatggtagctctccctctccttgtagggaataggtgccagtgtatgtgagatgtgcaggtacaggtagtaggtcttctaggaggaaaataggaggcatggggcaggctagagatgactgcagacaagagagagggttgctagccccactgggttgtcccagttggcaatgccttggacctcaagttaggatccttgctccctgactcttcagtctgcttttctaactgttagctctggctgggcctgctggctttcccaggcccacaccttggcacacactcctttccacagccttggtatatcagtgtggcctagtttacatcctgacttttccacttcctggctgggtggccttaggtgagttatttcacctctctgtgtctcagagtgcaaggcaggcagggagaagtcaaggacaagggccacagaaatagaaaggtgtgtgcatgttcatacacatgtgtagatgatagtgaacatgagaaactctgggggctagattttaaattccacgaggacagtacccggtcctgccaccttctgctgaataaatggataggtgagaaagaatgagagtttgtgtgcatatatgtacaagtgtgtgagaatatgagaggagataaaaaatgtgcatgtgccacacaaagcatgtgtgaacaggtgagaacgtgtgtgactggggatgagagtgtctctgtgggaggctctgcagaagagtaagagtttccatttagtaagtaccacagtgggccaggcatgatactaagcccttcacatgcattgtctcattcacccgtcaccacggctctgtgaatgagggacgacctctaggttacagacaagtaactgaggcacacagaggtgaactgacttgcccaaggagacacagttcataagcagggaactctgtggctctgaagtttatacctccctgctgctcatgggtgtgggaagctgagctcagaaggagcagctctgctctcccagggctgcacgatgcccgaggcttcctgcagctgccagatgttctcctgcatctctgggtccaggatcccccacatacaggtatcagtgtttggtgttccttgtgggcagggcttgttggagctgctctttgtgtcaacagggatggccccgctcagaggtcagcacagaggcactgctcaggaaatgctggtggacttgaaacctgatagttgtgtgtgtgtgtgtgtgtgtgagcacgtgcgtggatgtgtttgtaatgacacagtaacctgggagaaatgggtggggagtgactgccaatggtatagggagggcttggatgagagggcccccattgctcacagatcctgacttcctctcaggctcccttgggagtaatttttccctacctcgggggcctgaatcattacatctgaggccccgccagggtgggtcaggaggtgggaacctggaatcactggcctagccatggcagggagtaggctcagctctgctcctgaggcccctgtagctggtgtgggcaggttgaggcagaaaggctgtgctgtgagcagggataagtagcatgtggagcaggtctggacataaagagtcttcttctcatttcctctgccaccctgcccaccgggattaggtgctggcacactcaggaactgcttgtcttcccatgtttcccaagactggccgcatagcctcatctccccatcccccacctggccttgggctctcctcctgtggggcaccgggcatgctggctgtggggaggaagaatcaaggctggctctagggttggcagtggtggtcttagatgagaagaactctgggctatggccaggaatatagatgaactttccaggcctggcaacctcttgaaggacagtgagggaagagtcctggccagccccaggctgctgctgtccatgcacgacccagccttaaccaggaatgaaccaaagaagcaaagaagcaaggattggctgggaatttgagccagtatggtacaggggaatggccacaggctttggagacagatgtcccaggagtcaaatcctgctttcaccactgatcagcttggtgatctcagatgagtcacttctctctgagccttactttcccctgtaggtaaaatggggatactgaaactcatttcaaaaggttatgaaaggaaaagcatctaacttggttcttgacaatagtaggcactcagtaagcagcaggctgctttctgtattcaggttttgatgtcctagcatgcactccagggatcccagtctcccagctagactactggtgtgtccctacaccctattcatctcatctctccttccttacaccccaatgcagggtccagctgagagctcagagaccccaaacagctccttctttccctacctacccagagccacttcaccctcaagggctgcccctggaagtgggaagggcccagattttccctattttctcctctatttgggagaaaataaaaagacaaaatctgggctattcccacctctacagccacaaagatcatcagaggatccactgagaaacgcagtagctcagtcacctattaagcgagatgatggacatgaaactgtgtgaatggtggagcactttgggaatgttgctcatctaattatctccataaagaaaaagtggggagaccttgtattcttggcagtccctaagcctaccccaaactcagatatccttctagttctttcccttcctccccatacagggtgacggtttttgccaaggctacgcctgtcccaggtcttgtgctatggcaagctccgggtttatcccaggcgcccgcagtgctatggaagtccagcagggggagacattagcacgtgggtacgtcctctggggtccgaccagcgagagtgggtcggacctggaaggtctgagctatgggatcgagccaagttataagcaaagaggcaaggcggggcgggaagaatgggccagggctgggagacaaagacccagatggcgaggccgggacaggctggagtccggcttctccggtccaggatgcccgcttttgctttttcaaaagtctcatgccctgtgctttttcctctttgccctcgaggtgtctttctttatcgacgtgccctctcatccccgcttgcctatcccgggaccttgcccgcgccttcggacaggacaagactaaatcttggctccagaggtcccacaaggctcccccagaaagctgagattccgaaggcctggtccccaggggcgatgaacacgccttctctccccaccacaccccaccctgctccccgccccacctctaaccccaatcaagtactggaccctcaccagtttccccctcccactgttctcacttttatgttcctgactccgggtccaagtgcaagcagacagtgcattttgagggcgagaggaggaaagcccactaaagccttacgtgggactggacgaggagcagacaggctgtccttgacacggaggtgggcacagagcaggacttcaggggtcctgtgtgtaaaaagaaaatggaaatactttcctggggtacttgggacagggtcagtgggctggggtgttgaccagacgcgtggagaggagagcaggccggcagctcttgagagtgccaacttcccacgggttgagctctctgggaacaggactgagagggacccaaccctaaccgcacgagccgcacactcagattggtgccatcgggcgcgcggcgtccttaagagctccctgaaaccccgcccccttcctgctctgggggcgtggtatggggcaaggaccccgccactgagcttgctattggctaagagagcagggttggccttgcgttcgcctgagcaagggagtagacagcacagcggcagcggagggagtctatgcgagctggacagcagtgggaggtttgtgaggctcgcactggccgcagaccctcgggctcgatcgcccgggagccaggactcggcgacgcgaggctgccgggctacccggccgaggcttcgggggcgcaaactaatgggactggctcgctcggcagcatctccccgctcttctaagtacactgagcagggcccgcgctgaagtagaagctgtccgggggcgcgtagcccggagtcccagtgtggcccggaggaacggagcccgtgccagggcggcccagtcgggagcccggggaccgagcttgtgctgtggggaaacccccacttcttccaagggacagcgatcccgggacggtcgaggcgtcggggcggtcaccgagacctctgcgggaagaccccgtcggggagagggcgcgcagccccgaagcgtctcgggaagtcgagcggaatcgggcgggatcacccgggggcgcagagcccccgtcgcgcctcgtgcggcagcggagagcccaggagaacgagccctcgggggccgaagcccatgcccgggttgggggcggctgcccagtgagtcctcctggccggccgggcggagaagagcgacaccgaagccggcgggaggggagcacttcaaggccggcggctgcggaggatgggcgcctgagcggctccgagcgcagcgcggcagaggaaggcgaggcgagctttggtgaggaggcgccaagggatcccgaagtgcagtctgcccccgggaagatggctcggcctgggcagcgttggctcggcaagtggcttgtggcgatggtcgtgtgggcgctgtgccggctcgccacaccgctggccaagaacctggagcccgtatcctggagctccctcaaccccaagtgagtaacttatctcctctggacgctggggtgggaggcactccttcagggtgaggccgcacgccccggagtgcatgtggggaggtcttcggaggaggagcggcgcctcattttgtctccggctttttcgagtgttttcctgcgggcgggcggatggagcagggtgcggcggggtggggtaggggcacttggctgggttgtgaccccccgggcttcccaccccctgcctctgcacgtcttggatgaagtcgaggtggtcgcacaggcggagctggggagtccgggcgcccgag

SEQ ID NO: 12508 - DNA, 6000 bp, Homo sapiens
tgtttaagccactgttgtagagttgtctggtatttgcagccaaaaatattcctaattaatatagtaaccctacatgacagaaaaactggggttccaaatggagggcaaacatgactacaggaatccagaagaagaagatatgtagaaatacaagcgggcagtcgggattagaggagtctgtcagtgggccaccagacctctcagccactgggttagggcgcagggtcaggacttccttcctggatggtgaactgaaagagcatgactgggtctagtccttgacagagcactggtagaggcaggcagggtttctgactgagggactcagatacaggacatgagacagaaggttagggatcagaagtggggaatgaggtagagactcgatggaaacttgagatcggactcagatcagtggtgaagggacaacttgatactgagtttcagtgtgcatacccaggttacttcaatccttcctgtcttaggacagggatagcctgcaaataggagagaaattactccaactatgaaggcaggatccaggcagatcctgacaagcgtcagctcaagctgcgctttagccatcctgacactcttcttacagattcacccttaattacatgcccttctttccatctttttcccccatgaccttttaagatctgagcttaacagaaagctcctgatgcaaccacactggtcactttaaacagctcccactttgtcttcttcctaattgtcagcatttcactgcaagaaaccttccccttctccctctccctcaagttgtcttcccctctgcctggtttgagggcactctattgctcttcttgttcagtctgggccccctcaggagtgacccgcctccatcccctggctttagcctccactaacccgggagcaggtggaaagaaagggctgagaagaaggactggccagggcccaccagctctgggggaacagcgggccactccagttcccctccccaccttggctattctgctccaggggccgattaaggccaatgccttcccttcccccatcccaatttcttgggtcatctgaagttagagaatgagagcctcttctgactgttggtttgctagcacttcttctttgtgtgcagcgggaactgtctgggtaagttattgttatattgtgctcctgtgataaatggacctttgtgagacacttttcaccctgtgtgtgcttggggagagggagggagtcttgcctgagtgacttctcacagaaagctccagaggtgctcagagctgatagcctagacctggcaggctgctctttcattggcagtcaagggtgtcaatcactgtggccctgccaatcagctccgaactaggtatctgtaagcgattagctttctttgttagaacactgaaccctccaaggactaaacaaagaatggctcaggaaagacagttcctaggtgggcaggggcagtcgtgccagtgtcactaactggaactctttggtttcatcctctttctagccctgcctcctagctcctttcaattctacttctttcatttccctcccatgtgcatttattttctctgtctccactgctgctgcctttgttcagccctccacacctctcacctgactactaaccagtctcccaactagtttccctgcctgccgtctcactccctccaatccagtctccatgctgcagtcaaatcaatcttctaaaaatacaagtctgatcgtgtcacctcctgctgaaaacctttcggcctgttccatggctcctagtgcccttgggataaagtccaaactacttagcatggcacccagggcccttcatgatttggctcctgccaaatcctcagcctcattttggcagtgctcccacttcacacctagtcatgatgaactactttgcaggtttctgaacgtaccattcctggcgttacttctggtcctttacacataacattcccactgcctgggacatccttcacacaccgccttctttgctacctgtccagccggtccttactcatcccttaaggtttcaactaaactccttcagctcaagacacatattttactcatgtctatattgctgatgcctaatacagcatctagaatgtaatagatcctcaatagatgtttgacaaaggaatgaatcaatgaatgaatgactcaactccagcggctgtgtgcagaatcatctctgagggaatctggcaaagttgactggtccctccctctatgggagggacacctaccatccttattgcactaggttgcaatttcttctttaacatgtctgcctctctaattcaactgtgagcacctcaagggcagggccgtctgattcaccgcagtatcctacttagcccctagcacagtgcttgtaacataatgaataaataggcctcccaaatgcctgacagttttgtcccttgtctcatttcctgctactcccttccccacaaattctcaccatcaatatagccaaactgccacactcgtggcttcacaaacatacaaagctgctccctacccctgaaacttttcatctgcattccttttatttggaatgcccttctcaaccacccaccctaatcctgctactttagaaactagctccatttgtccctcttccagaaaccttttatgtacccaccccagtccacctctgagtagtgctaacgatgcccacccatttcatttgatccttggcatcccttcgtgttactcaggggaaaaccaagactcagaaaaggaaaagactctcaagggtacacagcatatcagcagttgagttatttatccaaggctctagttcatgaatcctcccactagccaatatacatgtcttgtttccttatatagactataatttcctttaaggaaggaatgccttggctctttcatctttccagggccttactggagtgttaagagaattctagagtcagactgagtttcttttttagctgctctggttactttaggcaacaaccacactaaacctcagcttctttgtatgtaaatgaagataacagtagtacctatctcataacactgttgtgaagattggatgacgaatgcatgcaaaatgtatagagcagtacctagcacatagtacgcgctcaattaaggctattttctttattgttattcttaacattaacaaatgcttgccggcaacggttgacaaaaaattacaatgtgagttactgggagtgaggaaggcaagcagaccacagggtcagtggagtccaaacaaggttagtggcgcgtcaggatgtttgtacgtccgaattcctagtgccatgtgactctgtgagggcccaagcacatggttccatccgggcggcgcagcttctctaactctcagtcagctattctcagcagcctgtagggggagccaaaaagctaggacgggggctggtgcttgggtggggggcgggcgggtggggggtggaggctgctggaaatattcctaagggcaaacaccgacaccccaccactactatcttagcccaccgccttgccccctccaggacgctctccaaactcagtcttcctcagcagctaagctgggagctgtccttcagcaccaagggccgccttgtcctcgggcaggacggtgagggcgaaggtggagttagggacactggactggtccgatccgcagccggctcgagcgtcttccagtcacggggacggcggaggcgacccagagaggcagcaagcagctacgagatgcctgctgctccttgcctccaagaatcaccctcagaagtcccctagccctcgggggagtgagggacggccatggagaggaaggcgggcgcccgggttagtgggggagggggagcgccgaggcctgggactcagcgtgtggcatgtgcacgcgggcagcgggcggatgaacggaggcgctgaagtgaatggagttgggggtggactggaaacatccccaaacagcaccggctgcggccggcgggggctggggcggggtggggtggggggagtcctgaggcgcaggcgcagtcggggcaccagtcccgctccctcctcctctccgtgcctctttctccgccctgctccccgccaaacacacttgcacaggggctctcaaggtgttctccgcacagcggaagatggcgacagactgagggtgcatggccagcgggagccacggggccgtgccgctgggctgcagccacagcggtgcgaacgagaggcggaagcgagaggcgcactaagtaaagcccggtgtctgcgtccggcgcctgtggcgctgccgggagccaggtggcccgcccgagccggaactccaggagcagcgggtgcggagccagagcggagcccgccagggactggccccggcgaacacccggagcgcgaacgaagcccgaagggcccggcaacggaccggccggccggcctaggagggcgcgagcgaggcagggagcggcgtggagcgggcagcgggcggacgggcgggagcggagcggcgcggggcgaggggagcggagcggagcgcggcggcggggcccgcacggcggcgctgaggggcgcagagctgcgccgaaccgagacggccggtttggagtgcgagccgggcggccgccggcgcggagtgaagtggcacggagccgagggcagctgaggggcccgacactatgaggagtgcggcgccgccgccgcagccgccaccgccccagtgccccgcaccgcccccagccgggacgccgggcagcgcctagcgggccgggcggcggcgcccgggctgagagcgacggagcgcgggagcggcgcggagacggcaccagagcgccccgcgactccggcctgagcggggcatcgcgccggccggcctgcctcaccatgcagcccccgaggtagagcctggacggcgccgaggagcgcagagcggcgcgcagcccgcccgccccagacggccgtctggcctcgcgcctgcctgttccctccagcccggacccccctgaaatatgttcaggggcgcttggatgtggcccgggaaagacgccgccgcgctgactatctgctgctgctgctgctgctgggctcccaggccgagcgacaaaccttgcgccgactccgagcgggcgcagcgatggcgactgtccctggcgtccctgctcttcttcaccgtgctgctcgctgaccatctgtggctgtgcgcgggggcccggccccgggccagggagctgagcagcgccatgcggcccccatggggggccggccgggagcggcagccggtgcctcctcgcgcggtgctgccgctgccgccgccgccgcccggcgagcccagcgcgcccccaggcacctgcggccccagatacagcaacctgaccaaagccgcccccgccgccggctctcggccggtctgcggcggcgtcccagagcccacggggctggacgcagcttgcaccaaattgcaatctttgcagagacttttcgaaccgactactccggccccccctctgcggccccctgactccctttcccgtgccccggccgagttcccctccgccaaaaaaaacttgctcaaaggccactttcggaacttcactctctccttttgcgacacctacacggtctgggacttgctgctgggcatggaccgccccgacagcctggactgtagcctggacaccctgatgggggacctgctggccgtggtggccagcccgggctccggggcctgggaggcgtgtagcaactgtatcgaggcgtaccagcggctggaccgacacgctcaggaaaaatatgacgagttcgacctcgtgctgcataaatacttacaggcggaagagtactcaatccggtcctgcacgaaaggctgtaaggtaaggactggcttccgcagccacagcagccgccctgggcagcggcagcggccgcagtgggaccgggagaaaaaaggaagtctccctttctacccaccccaccactcccaccgtgcccagtgcagcactaccagtgccaccc

SEQ ID NO: 12509 - DNA, 6000 bp, Homo sapiens
ctcaaaaaaaaaagaagacttgagacggggagcctggccagtagactcttgaagtgatatacacatgtggtagaacaacttgaaatgttatttgggaacaacaacagcaacagcaaaaaacctcaatgagtgtttatagaatgcctatcttgtgctaagactatttttttcttttcttttctttctttttttttttttttttgagatggagtctcgctctgtcatccaggctggagtgcagtggtgcaatcttggctcactgcaacttccacctcccaggttcaagcaattctcctgcctcagcctcctgagtagctgggattacaggcatccactaccacgctcagctatttttttttgtatttttgctagagatggggtttcaccatgttgccaggctggtctagaactcctgacctcaagtgatccacccaccttagcctcccaaagtgctgggattacaggtgtgagccaccgcacccagccctatttttcatttttgtaacagaaaaatagctaatgcagaattgaaaaattcctaaccattaaggttatgagacactaaaatagagtatcatcttatgcaacttattccccagactggaagtctggttagtgacacgaggaatgaatgaaataacctgctaacgtttctttcaggtcagggacccaaggtttatactgaccccctctcctcacctccctcatgccttgacctctgaccctcttatctttggaggttttcacaccagacactgcagcagacacccatgataagtaccatgactccaatgagtgcccagggcgtccaggcaggcgtccgttcaacagccatcctacctgagcagcagcagcagcagcaacagcagcaacagcaacagcagcagcagcagcaacagcaacagcagcagcagcagcagcagtaccacatccggcagcagcagcagcagcagatcctgcgggtaaggcactgggatttcatctgggacctgggagcccagggaggaagagaggcacaagttcttcccacacagttaccgagactaaacaaggcagtgtaccaaaacacctagcagagcggctggcctctagtggtgctggagaagttttctaccctccccctttttgttttctggggatcatagtgggagagagttggacattgtctgctgggtaccctagatttggtttctttctgtgcagctgtctaaaaagggaaggcagtagaccccgagctcccaccctgcttcctcatcccctgccctcagccctttagttctgaggcttagcttcctccctctgctccttctgaagtatcttttgtgttcttatagcagcagcagcaacagcaacagcagcagcagcagcagcagcaacagcaacagcagcagcagcaacagcaacaacagcaacaccagcagcaacagcagcaacaggcggctcctccccaaccccagccccagtcccagccccaggtagctgctggactacagccccaggctcagggacagctgcccaggttgggcacgcagccagtgaactgggttggggacagtatggaatagggtagaggtgggaggcagggcatggcaccctaaaaatggattgggaggccaggcgcagtggctcacgcctgtaatcccagcactttgggaggccaaggcaggtggatcacttgaggtcaggagttcaagaccagcctggccaagatggtgaaaccccgtctctactaaaaatacaaaaaataataataataaataagccgggcatggtggcaggtgcctgttatctcagctactcaagaggctgaggcagagaattgcttgaacttgggaggcagaggttgcagtgagccaagatcatgccactgcactccagcctgggggacagagcgagactccatctcaaaaaaaaaaacggattgggaaaggaggttgaagaaggagaaaagttcgacttcagtcttccacttcctatttccacccagttccagcgccaggggcttcagcagacccagcagcagcaacagacagcagctttggtccggcaacttcaacaacagctctctagtaagcctgcctgccttcccaaggagaaccccatggaataaatttagggggcggggtgggccaaagtagctgaaacgatagcttcaggcccaggttatgagaggaggcattccattccatccccttccctcgatacctgaacagctttcctcgtgcatacccacacccctgcctggtcttccatccctgataatctctggtttttcacagatacccagccacagcccagtaccaacatatttggacgctactgagccacctggaggaactgcttgtgcactggatgtggccccaccctttcctcttaattcccaatcccattcctgggctagcaccagtagtggttggggccctcccctcaggctccatttttaataagtttttagtatttttgttaatgtgaggcattgagctgttgggttttgtatattatttatatagagaccccagagctgttgcacccaatacacagagcttctttgcaaagggagtgtgcgagttctgcatgtctgggaagggtggtctcttgggagaatgcagggggttggaccaacaagtcagagtcttcattctattctgatcatctcccctgtttaccttacactctaaaatttctttttttctttttttttgagacggagtcttgctctgtcgcccaggctggagtgcagtggcgcgatctcggctcactgcaacctctgcctcccgggttccagcgattctcctccctcagcctcccgagcagctgggattacagttatgtgccatcacgcccggctaatttttgtgttttttttggtagagacagggttccaccatgttggccaggcttgtctcgaactcctgacctcatgatctacctgcctcagcctcccaaagtgctgggactacaagcgtgagccaccgcgcccggcctaaatttcttaattctaattggattgctaccctctcttcctcttcttcaacatggcaacacattaaggtataggcccttagtctctttttatttatttttgagatggagttttgctcttgtcgcccaggctagagttcagtggcacagtctcagctcactgcaacctccacctcctgggttcaagtgattatcctgcctcagagcctctcgagtagctgggattacaggcatatgccaccaggcctggctaatttttgtatttttagtagagacggggtttcaccatgttggccaggctggtctcgaactcctgaccgcaggtgatctgcccgccttggcctcccaaagtgctgggattacaggcatgagccaccacacccgtccccttagtcttttaagaaggggcaatgaacattctcaactaaatgttggagcttctttacagctttcctccatgggggatataccgctgggattgaggaggggccattaggccaggggaaacatcaatagaacctgattcttcttccacaacaccccagatgttgggcctcaaacaagctggggagggtggagatgacagacactgcctacccttcttgtcatcttgtgtggtccccatcatgcaccaagtggcatacctttcataggacagagaacttccctgagagtcacattcctggatgaaaaattgccctccattggcatgtgccatcatagaataggtcgtggaaggaccgtttggttctaggaggaagagagaccagtaaaaataagcaccctttctctctctgccctactgccagaactgcctgttctcacgtgacccaccttggcagttacccaggatgacttgctcgctcccattttacagtagagaaaactcaaaactgttgccccagagtcacatttggagctgcggcagggccattctcgccctcttgctttccagtttgagttctagatccaaggctgtccaggagagccaactggtttactacaatggagtcttggagtcttctgccctgcctagctagggctggaagaggatcagcctcagccttgtgagtgggtggtacaggatgatttgacaacttaaggataacatgcaagccatagttgcaccctattactgggaagtgtctagtgtgctggcaaaaccaggagcaccaatcagtacccaagttataaaaaataaaatagccctctttgaggcccacgaagcccttgcttatatgggacttaccaagtttaagagttgcgtgcacaaggaatggaactccccaacagtgtaaaggcaaacatgactgaagctttcttctcacttattctatcctgacataaacattctgaggagccacaggagtacaggcttggctgggatgagggacattcagaggggcttgggggttgctaaacaaatggcaggtgcgccacatacaaaaacacaagacacaaagacactgaacctggaggggagagactgaaatggtcagacaactggcatgctgacagtctgacatgccccagcagaagcagcagaagggaacagcattgacctttgggagagtgacaggatgagagcagagtggccccactggttgctgcttgggtagtgctggcgctgagaaataagggatgctgattgaggtggaggtgtgtttttgtgtagtatgactgagggttcctgcaggcagtgcctcagtttctccctttgggacaaagtctcaagctttgcgggtaaagtttgggctagctgccctggaagatcacctgtctgatagcttgcaatctgaggtgtgtgtgcgcgcccgcgtgagagagagggagcggaacgtgcctgagcatggggggaattgggccatgccccaggacttgagccatctctggcacaaaaggagttaatggcagggaccgcgcccccccgtgtccgggaacgcgcagcgcgccccctcggtgcgcgggcacagcagccaggctgccggagagctgatctcggggattcgggtgcggagcccttggcctggaggcgatatgggtggtccgtggcccggttcagtcgcttgcagcagcccggggaacaggtgaggccgcctgccccggtctctcatcctctagctgcccataccttgcccccatcctaacccctcccaatcccaggctcctccactccccagccagtggcccccatccctctcaaccccatgttctccatcggtacccctgacccccgatcctcccccgcttctgttctcccttctacctcctccctaaatcccgcatccctaacatcctcccgcccatggtccctctatttccacagcccatcccgcatgctcatcaaaatacccctattgagggcccccagccccatcccgggattgcacattgccagtcccccctcccctgcagtgcagccccatcccccttccatcatagcatctcatagccaggctccctcccccactatctgcagcccccccacccaatggaggcctttatcctatcctcccccattccagtgcaactccatcccccaatccattccaagccctcgtagcccccaatactgcagttctcaatattggtccattcctgcacaatgccccgcgcccagcaccgctgcagccccaaaagtaccccgagatgccattctcatccccggcattgctgcctccccttgtcttctcccaaattgcaagttggaccaggatggagatcttggccttggggattcacagtgggtcctagggtacagagggcgtttgggggtcggtccgattgtctaggtgttcacgggggaggggctgcagggaattgactcaaaggagaatttggcatttggcgccgaagggttactggagaggagggcatcccgaaagggttaatggaatttgtgggttgggggcagcaccgagggggttaatgtgggggggttgctggtggggaagctgtgtgaatgagcggtctgtgccctggagttgccatggagacggtgaatggggggattgtgtg

SEQ ID NO: 12510 - DNA, 6000 bp, Homo sapiens
gagtgcagtggtgtgatgtcggctcactgcaacctctgcctcccgggttcaagcgattctcctgcctcagcctcctgagtagctgggactacaggcacccgccaccacgcccagctaatttttgtatctttagtagagacagggtttcaccatattggccaggatggtctcgatctcttgactttgtaatccgcccgtcttggcctcccaaagtgctgggattacaggcgtgagccactgcgcccggtttcaactttgcttttgttctccactccaaactgtccttagagcaaatggcatacgtctaactctcaagtgaattggggcactatctggtacaattcttcagaaacctccttggaaaaatactgataactccctctagttggcttcttcaaagaatatgaattcctggggcatagatccattcatataatcatgtggccttttgaaaaggatttgtaaaaaataataccaattatgaatacaggaccaattccatgtttcccttgcacctctcgctgggaacagtttgcatgatcttccacagcctgagctggcatggggatttgggaaatgttctgcagcttctcagggttagccatctccttaagcctatggacccatttgggaagagtttttgcctgtgtgtcataaacaatatttatattggaagctgtccctttgatttctgagtcatacagcaatgctgtctcattgatcaaagccatacaaaatgccacattttgttaggtaatgaggcccagggatgggctggatgatggactccacatgtgaggctgtgctgctgcctgccatcccagaaagcctcaagattgccgttgctgaggcagctgccacaactccctgaagtaatgagcagagctctcaccaggctgccaattctgtttatgaggcctaaagctctgaactatgacaatgtcggtggtaagatgcgcttttaaataatgtgatcggtttgctccatcaactctcttagtcttcggtggaacaggaatgaggaaagcccttgtttgggctgatgtttgagccatgctggagacagcaggcttgtgtttagggtctcttaccttgtatgtctcaagatttaatgaagatttccttgagtgaatctcaagacataagcagactgatttttttttttttttttttagacagagtctctctctgtcacccaggctggagtgcaatggcgcgatctcggctcatcacaacctctgcctcctgggttcaagcgattctcctgcctcagcctcccaagtagctgggattacaggcatgtaccaccacgcctggctaattttgtatttttagtagagacgaggtttctccatgttggtcaggctggtctcgaactcccaacctcagatgatctgctggcttcagcctcccacagtgctggaattacaggcgtgagccactgcgcctggacgtaaagtttttaaatattcccccaaaacattcattgtaatgagaaagactgggtggagcacctgttatctcagcactttgggagtccaaggtggatagatcactcgagttcaggagttcgagatcagcctggtcaacatggcgagaccccatctctaccaaaaatttgaaaattagccggtgtggcagcacgcacctgtagtcccagctactcgggagactgagatgggaccatcccttgagcccgaaaggtagaggctgaagtgagctgtgatggcgccactgcactccagcctgggtgacagaccaagaccctgtctcaaaaaatcaagaagaaagtttgcttaggattccaggtagcagctgaattcacctgcatcacaggagcaaatggatttacattgttcgctgtagtaattttccctttgtcctccctctcttttttttttttttttttttgagacagagtctcactctgttgcccaggctggagtgcagtggcatgatctcggctcactgcaagctccgcctcccgggttcacgccattctcctgcttcagcctcccgggtagctgggactacaggcgcccgccaccaaacctggctaattttttgtatttttagtagagacggggtttcactgtgttagccaggatggtattgatctcctgacctcatgatccaccttggcctcccaaagtgctgggattacaggcgtgagccaaggtgcccagcctgctctccctcttttccctcccttctctttccttgcctttcttctctctagcagccgcactccatccagaagatgggctcaagtaacagtaaataggcagcagacaggtcaattctagcaacaatatattttatacagctacggagtatccaaatagacttcctatagtttagaactataagcaccacaaagaaatcctgccagaactccaaggaacaatgagtacacactaatattaacctgtagtttcccttcctaggaactccgctatatataggagctctctcttctggtcaaacaggtctgcctaccgttccccaaacacagctcacagcttcctgtcacctgaaatgtttgtccctccatctcctttatgacccacgtccaactctgcctttctgttaaacctacccttttcttctgcgtctgaacttctggcatctcatatctgcatatggcatttaggagaaactcccttgtagttactcaggtgagtgtctctatctgtcctgttagcttagaatcttctggagtcagggaccacctctaactcagattatcagtgggaccttgtagagttcatcagctgtgatatagtggccaagtgaacaagttctggaaccagactgcctgggttcaaatccagctttgttatttaccagtagccggctaacctcaattatgtcacttaacctctgtgtgccttaattcccctgtaacatgagaatattaatagtgcctactttgtagggttattttgaagatcaaacaaagtaatacaaaacaatttgaacattgcctttaatgcattaagtacacgggaaacggtagtcctctctatccattacaacttgtactctcagcgggaagaatggtgttcagcctgtcccccacccaccatgatgtccagctcagttttgccttttaccaagtttaccaggcacaactaaaggattccctatctggctttaaatgtcctccatactctaagcctcttaactgactgacagtttcctccacagcccctcaacacagtcctgcctccttactggctcccagatatgccttgctcgttcctactctgtgccttcactcacactgttcctcctccctggaatgctaacccggtccttccccttccagctcctacctgtcttttacttctccactcaaacctcacttcctctaggaagccttccctgattacttcagtttattctcatcattcccttctctggactctctcaggaatcaaagttagtgaatacgcactgatatttttcacaacaatttattgggtcttggtcccctctcctccagaagttcggcagggcatgatagctcacacctgtaatcccagtgctttgggaggctgaggcgggcagatcacttgaggtcaggagttcgagaccagcctggccaacgtggtgaaaccccatctctactaaaaatacaaaaattagctaggcgcctgtaatcccagctactcgtgaggctgaggcagaagaatcgcttgaacccgggaggcggaggttgcagtgagccaagattgcgccactgcactctagcctgggtgacagagtgagactgagtctcaaaaaaaagaagttgataaatctcttatgaacagttgggatgttttcacctcctttgccacctgcacccagcacgtagccctatgctgggttcctagtaggtgtccaatactcatggattgatgtatccatatgcccaggtttggctaagggaagctgaggccctggctccctttctagcagtgagctcaagctggagtgaagaacagaaggcagggggccagtttctctgctaacttcccttgtttctccactgccattcaggccacagaacacagcagggtcttcaggtaagccgtcagtggtgcagaccttgaaactagactgatccctcagttaatggttgacagtctctgtttaccttaatgattgccaagattcattactgaacatgatacactttgcagttcaactgccttggccttgagggtagaaagcaatttctgaggttttagggttctgggataggattagaaatacttgggtccatccccagccactcaggatgtggacaataagcaagtggccggagggcaccctggtactgccatatgggtgggaagcactgccagctcccaccttgacctcaggtgccagcaggcatcacccatggctttttcctccccattgtcatctaatgtgtttatttatttatactttttgtagagatggggtcttactatgttgcccaggctggtctcaaactcctggcttcaagtgatcctcccgccttggccaaagtgctgggattacaggcatgagccaccatgcccggccctgtcatacagttttagaggctgggagctagaagggttgaccaggatggcagcctgtacaggatccctctctgcagcttgcccgcactgtggatctgcctaaggccagggcatgggggaagcctgagggatgctgaggagcacaggtccagctcagtctcccagagagactaaacatgggtgggtgacaatgatgcctctcttcctctgggacaaggcagtgactccaggctatgtgatctgtctctccaaacccatagggagctcagaggatcaatcttgtttaatgattgtatgtgggaggaggtggggctggttaatgtttgtctggttcctcttgggctgtgggccatttctggctctggccctgggttcgttgtccctcccctgggctgggctgacagtacctggtggcatagggcagacacgcctgcagacattctctgggaaagggcagcagcagccaggtgtggcagtgacagggaggtgaggagactgggggctgagggaggtgggccagggagggctgatgtggcacagtgggccggaaataggggccgggtcttgccttctactgacctccgccttcagccacttaggtcccttccatgcttccctctgaagctggggtgaggcccctcctgccaggtgccagacttgcttagcctctctctgcagcctctttccaggttcaacattgcttttcctctcactttttttcctctggccaaagattccccttattcccatagggccagattctcaggaagacttgagggaccccctaggtgcaaggtggccaagtttgtctctctgagacatttcctgccacacagggttagggtttagtgggaatgttgggcactgccaggtgctgttttccttccttgattacaaggcaagccaggcatgcacccaacacggggctgcgagtggatgaataaagcgtgctcagcgggctgcagagggctagccaacagggccaaggatttgggagcgtgtgtttccactttcttgaaggaggcagactgactcaagctgaacttggagtaattgatggttcggagattttttttttttttttgagacggactttcactcttgttgccctggctggggtgcaatggcgcaatctcggctcactgcaacctctgcctcccgggttcaagcgattctcctgcctcagcctcccgagtagctgggattacaggcatgcaccaccatgcctggctaattttgtatttttagtagagacggggtttctccatgttggtcaggctggtctcaaactcccaacctcaggtgatctgcccgcttcggcctcccaaagtgctgggattacaggcatgagccaccacgcccggccggtttggagatctaaaggaggggtgttccccagctgtttgaaagttgttgcagctgttgggaatggcacagcaga

SEQ ID NO: 12511 - DNA, 6000 bp, Homo sapiens
aggtccacagtcagacaagtaaaataatgtaaagggctacaggagccacaccttacttacttgttgtgagcataacccaagctgattaatctacacatggtagtagtattctctaaagatctgttgttgctgatgatgtttattgatcaagcatgatttagagatttatagaggaaacttcatgcatcttaggacactagccctatttctacaactttactctcaaccttgtctcatcttttatatacttctatctcaaaatgtcttcacccaatttagtagagttacattcaataaatggtagttataattattaacagtttctactacaatgtaagctccatgaggacaagaaccattgtatgtccccagtgcctaatatagtgaatggtacacatagttgcttgataactatttgggaaatgaatggctgagtggtatgagaaaggcaagtgacatgcttcctcagttcaagactaactttgctatctgttttgtttaacctactctggagagtcaagaacggtatgggatctcaactggaagatagttaagagaatggttggtgaaggccgagagaccagcagacgctcataagtcatggaatggtggctaaccagtgtgtttgcagcatggtatgaaagggagaaaagggtgggaagaaaatgacagggagtaatgctagagtggttgaatatgagcccctcagaaacaggcaccaggtcttttatgtttgcgtttggtatacagtacagagcctgacacatagaggttctcagtaaatgatgaatgaatgaatgaatgaacaaatgaggctggtcccaaaccacagaggacctttcatgcctggctgaggaatttaaacttgaaagtcaaatggacaatcattgaagatttgtaaagtagaggagtgtcatgaataaaatcgtactttagagctataattgacaggattgtttgggggccaggggaaaagagacaggaagccacaggcacttcaaacctgattcagctcctaattcccaatctccattaacactataccatcctttcctttactcaagcaagaaatgtcagtttcttccctttctctcattacacaaatctgttctatcaactctaccataacaatgattgacagagatatccctttgtctccatttccatagtcagtgccctatttcagatgatcacctttttttcttctttttttaagacagagtctcactctgtcattcaggctggagtgcagtggttcgatctcggctcactgcaacctctctcgcctgggtttaagccattctcctgcctcagcctccaccatgcccagctaatttttgtaattttggtagagatggggtttcaccatgttggccaggctggtctcgaactcctgacctcaagtgatctgcccgcctcagtctcccaaagtgctgggattacaggcatgagccactgtgcccgttccagatcatcaacatttttttttgacttagtctattggttcgtttccttacatcttatctttccatgccatcatctaaaccggcagtcgccaactttttggcatcagggactggttttgtgggagacaatttttccacgggacaggggttgagggggatggtttcaggatgaaaccgttccacctcagatcatcaagcagttagattctcataaggaatgcgcaacctagatcccttgcatgcgcaattcacaatagggttcgcactcctatgagaatctaatgctgcggcagatctgacaggaggcagagctcaggtggtaatgctcactcacctgccgctcacctcctgctgtgtgacctggttcctcacaggccatggtcttggtatcagtctgtggccagcggtttggggacccctgatctaaactgtcaccacaatattctttctaagatgcagttctgatgttactctcctactcaaaacagtggtgatcttgtattatatatcaaaaataaagcgtttacctcttagcatggcatttagtaactctgcaaagtagtttgcagataaactgaggctcagaaagggaaaagaaattgcttaggatcatacaggcatgcagcggtagaaccaaggttaaaaccctggtctcctgatgccagtgatttagccgttataaagtatcttctaaagaggggagaaatggtagtactgcatatgttactagaatggtgaaatggcagttacataattctgtcttctgggtggggcacatactttgaaacccacacaaatgagcaaagatccctgttctacctcttactagctttgtagacttaaaacaagtaacttagcctcttggagcctccatttcctcatttacaaaatgggaacaaatcatcccaatcttatagtaatgttatgaagattatataagatctcatatataaagggcctagcacagtgctagattcacaggagattctcagtgagggtcatcacccacccatactcccattccagtgatctaaaaaccagtttaaacaatgagggaagtagaattcaagatagtaagaatctagatggatgcaagattccagggtctattcctagttccggggtaggaaataactatttttagggtcttcttcaatcaggttccctgcaagtggaaaccaaactagtgttctcctggggcaacaggtggtcatatgtatggggagacccctgactaaaaagcagaccttaagccccggtgcccatagtgtccatgacttgtcactcctcgtagctgaagcattatgaatttttattaaaatgtaaacgtttcctaggagaggcagacggcatacatattaactttctggcctgattagccttcacttccctctttctgtgagtagactctatagctctgtgctttgagctcaaagcatgctctgatgtaggggaccaccttcccctacccttggccttttaaaatcctactcaacattccaggccttgcaggaacggtggctcatgcctgtaatcccaacactttgggaggccgaggcgggtggatcatttgaggtcaggagtttgaaaccagcctggccaacatggtgaaaccccatctctactaaaaatacaaaacttagcgggtgtggtggcgcacgactgtaatcccagctactcgggaggctgaggcagaagaatcgcttgaaccagggatcggaggttgcagtgagccgagatggcgccactgtactccagcctgggctacagagcgagactgtctcaaaaagaaaaaaaaaattccaggcccatcttgaacaccacctcttccagaagcccactgtgatagtgcagtcagatcctgccttccctcctctgtctcctcccagggagcctcaaatcctagactcttttggtgaaacacagggagcatgaagcttctcgttatatggagacctgccttgaattctagcttgtccttgacttggcccatgatcttaggctaataaatgccttgacctcgttgagcctcagttttcgtgcaaaaaagcaggtaataataaaccttagggcaataagggacgtgctctgttcgggcaatgccttccctgctgagtggcgtggccctgtgatttttgaatttggctgattcctctcatatggcagcgcaagcccctcaggacgtctatatccttccacccagctccgccagccctcaggtgcttaatgactgtatttacaggcatctagcgcagccacgcagccccggagctgcatcacctctggctatgcagtctttcacttatcaggagggttaatgagatgcagggtagaaaggtcttgccactcgcccgcccgctcgtggaagccgagtagcttggtaacgacaccacgacttcacgtttagtgcattagacgcgtagacccttaggggaggcagagcttcccggtatcgccgagcgggccctgagggctgaggctgggcacccctgcgcacccctgctgagtgcccggccaccagaaagacagatcccccacctttccttctccctgacccggcgcgcttcctggggaacaaactctcccttaccctcagtggggctggggcctcagtctgcgacatacagtgggactcccatgtctgcatgcctgaggtgggcggaagggggcggtgggtgctgggaagacatccgtccgcttgcagctccgctgagtctccagcacctgaaaagccgcggccgaggcctgagggaccagcccagccgagatatcgggggcggggcagcccaatcccaaactggcggctggacccgactccaactcgttcctcctaagtccgggacagattgtcgggaggagcttgaactgagcttcggctcccgactgggcctgggcccggcccccactggtgccacctccctcccttcctggcccggctcctggcccacactcggccctggcccggccctggcccggcccagacccggcccggccctggcccggcccagacccggccctctgaggctcctccgggctccaggttggcgcaaacaaagccctgattgactgcccggaggggcgggcctcgctgcatggccgcctcctcccctcccaggccgccagggatttgccgggaagagcgggggcagggggagactcccgggggtgcgcaggaccgcggggggccgagtcctcgggctcgagaagattgtgtccacccgctgtccgaggcccaggctgtcccctcaggtcgtcctcctcaagtccaaggagggacatgggagctcctgagggcagggtggggttcctcgcgggccagctgtcgtcctagggtccccggtgccacctcagttgcgggctgcttgtgaggaaggagggtatgggagcaaaaaataggaggggtcttcccgaggctcggggttgatcagtgtcggttctagagcctgcggggaaaagagggcaggagaacaggatagtttgtgcttccttttttccattttaacttttcctctaacgggcatccgggcaagaacagggttcagtagtttgggaagggagctgggggaggcagtggcggctggagtaggtaggcgagtaaaaggaggaggaagggctggggagaagagcgaggctgtagcggctgcctgttgagggaggaagaggtggggggtgtggaggagggggaggagagagagatgacatggggagaggaggaggggggttggacgtgggaggaggaggagagggctcgagggaccgtctgtcgcgggacgggctggccagctggggcgcggagcctggaggaggaggcagcggcagcggcagcagcagccctccgagcagcagcagctgcagcagcagaaacaagtaccagccacaaagcggctcctctggcccaagcagccacagtccccccgccgcgatggcgctgcaaagccaggcgagcgaggaagcaaaggggccctggcaggaggcagaccaggaacagcaggagccggtgggtagcccagagccggagtctgagccggagcctgagcccgagcccgagcccgtgccagtgcccccgcccgagccccagccggagccccagcccctaccggaccccgcacccctgccggagctggagttcgagtccgagcgggtgcacgaacccgagcccacgcctacggtagagacccgcggcaccgcgcgcggcttccagcctcccgaaggtggcttcggctgggtggtggtgttcgctgccacctggtgcaacggctccatcttcggcatccataactctgtcgggatcctctactccatgctgctagaggaggaaaaggaaaaaaatcgccaagtggagttccaagcaggtgagtggccccgcacgccccacttggcattttgggcaaggttggccgctcccgctgccaccgaccccatacctcccggtccgaggcgcccctccaacgcgcctctccgactcctccccttaccccttaccccttgccccttgcccctttccatggctctcctagggtgcgggttgcggggc

SEQ ID NO: 12512 - DNA, 6000 bp, Homo sapiens
tgattgttatagaaattattgtttatttccttgaattgttactaaagataaaaatttgacatcctacaagtctgacttatagcaggctaatgctctgggctgcttactgtagttaagtgggttggtttcctaggcaagttgttgaaggttgcgggtcactgttctactttttatatatggtccaaccattgtccatttgtacattcaatctttcagtatacatcccaccatacaggagatagaaacaataatgagaagcctgatatcaaagctaacctgggaagaaacttattggtgacatcacattgccacctctaaagaggtcacccttgaacttattcgagctatacaaatggactccctagaaaagtttccctggaataaaaatgatggaacaggtggcctcccactaaaattagaacaacatcatcataaacagggaaataaataggccaaatttataatatgattgatggttatttttgaaataatttgccctacctttgaggatcacatatgtgagtactccacagttcagaatcaaatttggtgcatgtataaattaataactttttaaaaactgccaagagatactgtgaagcttactctagacccatgcaaacattctgatgctatttactactggcaatcacccggaaactcaagcaaggcacaccaatccaaataaggaggaacattcatttgcctaaacctgcagatatcttaagtcacagaaacacatataatgacaaatttaactgcatgttggacttgcttctgccaatctgattctagcattatggatagacaggaacatgtagcaaaggggttataatgtcactctactgactgaacaattgaacaaattaaaatctgctcctttttctaatcgattcccctggctttcctccattacgtgggcagattggctatgaaagggttttgaaatccttgtttgtacccttataggattctgtctcctttatttctggcaagaaacttaggcactgcaaaataacatacaattttaattataagacaacattgggccaggggatggactgttatatgcatgagccaaagatagtctctatatattgattctgccagtaccaaactcaattttttacacatcaattgttttaaatatagaccaataagtagattgttagccatttagaggctgccttctttgcatgtccctgtgaaactacaatcatctgttagctatagataggataaactccaggagataaaaaccctaacctactgctgcccttcagagatctctgacccagcaactccctgtcttgctgctgagagacatcgctacatgtataagccatctctttgattcccctccctctctccagttagcttgtcctctcattttctaggttgtgacctcccaccagcctctggaagatctcagactttgattaaccccatgcccttgcaaacctgtcaaagggttgaccaaatgaaattcgtatgcttatacactgttggtgggaatgtaaattagtaataataaacactatatatagttcaaccactatagaaagcagtttggagatttctcaaagaacataaaacacaactaccattcaattcagtaatcacattatcgggcatatatccagaagaaaagaaatcattcaaccaaaaagacacatacactcatagttgtttgcagccttattaacaagagcaatgacatggagtcaacttaggtgtctatcactgatatttgctaaagaaaatgtggtacatatataccatggaatacaacacagccataaaaactaatgaaataatgtcctttgcagcaacatggatgcagctgaaggccattatcctaagcgaatttacacagaaacagaaaaccaaataccatatgttctcatttataagttggagctaaagattgggtactcatcaacataaaggtggcaaaaacagacactggaggactattagaagggggaagaagaaagggggtcatgggttgaaaaactgttgagtattatgctcactacctgggtgatgagatcatctgttttccaaacctcagcatcatgcaatatacccatataacaaacctgtgtatgtatccccagaatctaaaataaaagttgaaattctaaaacagacaaacaacaaaaactcattgtgtgttactgaaaacgtgtggtagtatatatttttcttgatcagtccccaaatctcttgcactcacttgtttcctatattttaattctacatataaattacacaaaacatattattattattgttttacattgtcaatatgtctgtttacccacatatttatcctttctattactgttcgcttcttgcatctcttcagtttcagaggagaacctttcagtatttcctcagtgtgggtgtactggtgatcaatttactcagcactgatttctgaacatgtatttattttgccttcatttttgatgtactatttcagtaagttcagaattccaaattatcagcttacaaatcattaaattccttaagtgacaaacttgtatacaatgtaagactcacctctttgcacttcccttttttctgagatcattactcttgaagtcctcattgcctttataggtttctgatgctatattggtagcctttgttgccataaaagggtttctttacctaaatttctggggttttttttccgcagggctgctgcaatcaactatacattattagaaatggaattctttgatatcattataatgacttactggtattccatttttagtaccataatttcttcaaatactctttagttatttaacattcatttagttttcagctctgttatactagaacaaattatataataaaagttattttagctaaatatttgcacatatatcttattatttctttagaatatatttctagaggtaaaaatttttagtttataggtttgaacaacttcagggtctttaaaaatcactgtaccctaggttaggaatatctgttgctaaagcttagaaatatcttaggtttttttgtgcctcccattctgaataggccccaggcataaaaactgcattggacttcacagaaccgaaactggttattcatataagggattgcttctccaattggagacagagatggtgacacattgtgactgtagccagttattttccctttcctaaagacgtattaaaaaaaagtattggaaccaacccaaatgcccatcaatgacagactggataaagaaaacatggcacatatacaccatggaatactatgcaataaaaaaggatgagttcatgtcctttgcaggggcatggatgaagctggaaaccatcattctcagaaaattaacacaagaacaggaaaccaaacaccacacgttctcactcataagtgggaattgaacaattacaacacatggacacagggaggggaacatcacacaccagggcctgtcaagaggtggggagataggggagggatagcattaggagaaatacctaatgtagatgatgggttgatgggtgcagcaaaccaccatggcacgtgtatacctaggtaacaaatctgcacattctgcacatgtaccccaaaacttaaagtataaaaaaaaagaaaaaaagacaaaagtatactcccagatttttgagaagatataaagaaagacaacatataataaatgtttgcagcaagatataaacatatcaatagagggtcaatagtggtaagctgaattgtagtggttgtgtgagtgtcagaaagttagtgttttccctctatctctcttcctctctctctctcccctacttctaaaaacagcctgcccgtcctcttcagtgttttctttcttactcactgctgccgtgctactctcagttggaatgattttctcatccttgtccttttggtaaatatctacccactcatctttttaaacatctcctcttttatgaagccttttctgcatctacaggtagaactgaccctgccatcccctgcattctttacaaacttctagaaaatttagctttactttttctctgactcccatttttacatcgggtgctccttgatgacaaagagattaactgtaacttcgggatagatgaccagtgtttgttgagtgaatgaataaagggatcagggttggatctgctcaaaagtgctagagtaatagagcaaaacagagcaggtaacacatcccttaacactcggtatctcaactgactttcacaaaagctctattaaatgagcaggtgattgtggagtgaaagaattaaacaaattttcaagagttttagtggctttcccactaaagcctgggtgactgggaaagtttgggctgggaatgttgggcttttcaagcgtgttcgaagctccctaattggtactaaatttcaggcattcagaccctctaggaaagagttctttctagctcacaacattaggggaggagttagacacataaatggagaaagtgatagaagagacatggtcagggatgggggttctacccttccagagacaatgcacattttctttgaaacagcttcgggaaaactgcaaatctcaatgatatttaccaattttgagaatctattaagtgcctggcactctgtgtagaagccctccaatcgtaccctaaatctgagaagtatttattattatttccatttttactccctaatgcatctactctaagctccttgcttcaccctaccaaagtttcccttctgctagtgctctcctttggtgcagaaccaccgcatccactttctcaggcccaggggaggggcggggcggggcgatttcgccttgccgcagagccagtctgcgcctgcgcggactgcggcagagggcggggtgtgagaagcagagtacagtgagactagcattcactgctggccagtgcctgcctttttcaccacctctaatttcagcttcagcagttgcttggaactttggttctggcagcagcagcaacatcattaccgctagcggcagttttgtgccgaggcacctacacacctcccgtcctctctgccagatcgcgggcctgtcggtgtctgctcctacacgccaacgccggtgggcaggaccatgtctctggtaagccagaattcgcgccgccgccgccgccgcgttgcaaaggctactgcgcacaacagcagctggggcgaaatgcaggcccctaatgcccccggtctccccgctgatgtgccaggctcagacgtcccccagggtcccagcgattcccagatcctccagggcctctgcgcctctgagggcccaagcacctccgttctgcccacctccgctgagggcccaagcacctttgtgccgcccaccatctctgaggcctcaagcgcctccgggcagcccaccatctctgagggacctggcacctccgtgctgcccacccccagtgagggcctaagcacctccgggcctcccaccatctctaaggggctgtgcacctctgtgacgcttgccgcctctgagggccggaacacctccaggccgcccacttcctctgaggaacctagcacctccgtgccgcccaccgcctctgaggtaccgagcacctccctgccgcccacccctggtgagggaacgagcacctccgtgccgcccacagcctatgagggaccaagcacctccgtggtgcccacccctgatgagggaccaagcacctccgtgctgcctacacctggtgagggaccaggcacctccgtgccgctcgccgccactgagggcctgagcacctccgtgcaggccactcctgatgagggaccgagcacctccgtgccgcccaccgccactgagggcctaagcacccccgtgccacccacccgtgatgagggaccgagcacctccgtgccggccactcctggtgagggaccgagcacctccgtgctgcccgccgcctctgacggacaaagcatctccttggtgcccacccgcggtaagggatcaagcacc

SEQ ID NO: 12513 - DNA, 6000 bp, Homo sapiens
tcgttcattttctaaatttaagactctttttctcatctataaaattagagggtataagtaattgctagtagtcttaaagtcctaagagtataggactccaaatcacaaacgtttgaaaacgcattgttaaaattcctctacctggattgcttaatggtgagaatactgtatctcctccacttcctaaagcctatgagttccacaagatcttagttttgttcatttatgtatatcaagtgcctagaacattgcctagcatgcttacatttgtggaatgattgaaaatggttaggagctttcaatctggtaaattgccttgaaacaattatttggacaaagtaataaatctggcataatttcactctttggtctaactctcacactcctgaaatgaaaatgctagaaaatagagaactcttacacatcattcagggagttacatcggccagcagtatagagtctcagatatcctactcctgggatctaaagtcgaactccccacccccaacacctgacggggcccacactcaaaagtgtcaaaactcatagctatgcacattcacaagactgtagaagtcgggctgtcacctacgctactccactctcagattctacatccccagaagacaaagagttacagttccttctctcacgaattccacaactccgaaaaccgcgtaattgaagccaccaaaggcatagaagcggcagggaaagggggctgggaagaggcgaacagaccctcttaagccccagtcattgggaaaagcccatgctgctggaaaccgcgttctcacctccttctttctttgggcagaggctgagggaacgtcgcaaacgatgagcagcgccaccaccatggtcacagagacacaccaaaaccgccaacgcgctgccatgttcgctcctctcccttctataagtgaaactttgctccggctaggtctgagggtggggcgtgagaacaggcaaatcggccccttgcctttcctcattggtccagctcagccctgccgggagacccctcacattacgtcacagcgcgctggcgctacacgcccgctaaaagaaggttgatttctaattggccccggtcggccaatagaaaaaagataatctggagcgttttcattggtccgctaaagataatgacccgcccctttctcgatacgtaaacatctagcgcgctgacgctttccaagcacgcatgcgcagttgtgaaatattgcggagttttcggagtccaaaatggcttgaagttgctagaacagaatctttcaaagactcatttagaagtccttgaaattcgccgccttcatgtaatattctagaaaaatgggacctagccgcgtgagggataagagctatttagtccgttatcctgcctccaaagtacttcaaagtgaaaaaataaaagtaggaaagcaaaaatatacctaataccactgagggaaatttttaaaggtaaatatgaacaagagcttgttgaatacctattgtgtcctagaaactgccaggagcgctgaaaaaagaggacatcaaagattattttttaaagtttttgtttatttatggctttttttgagatggaatttcgctcttgtagcccaggctggcgtgcagtggcgccatctcggctcactgcaacctacgcctcccgggttcaagcgattctcctgcctcagcctcccgagtagctgggattacaggcgcccgccatcacgcctggctaattttttgtattttagtagagacggggtttcgccatgttgggcaggctggtctcgaactcctgacctcaggtgatccgcccgcctcggcctcccaaagttctgggattacaggcgtgagccaccaagcccggccggctttttttgtttgttttttcagttaaactccttgacttaatatttaaagcaccaacaaggactttaattgcaggttatagacagcaaattccttctttttattcattattttgtttgggggatgggtacaaaagtaaggttgtaaagaaggaaaacaccaacaagataaaatcaatctgcctacaatttggatttattttgatggtgtggaaaatattatatgactattattttaggcgctactggataaaaaaaccaggaaattaatttcagtatgttggagagacaaggagatgggatggaaagaaaaatagctggttccgaagtgaagagatgtgaaatacagatgtgaaaaaaagttaaatcatttatggaaacttatattaagaaaatgcaggccgggtgcgatggctcatgcctgtaatctcagcactttgggaagtcgaagtgggtggatcacctgaggtcaggagttcaagaccagcctgaccaacatggcaaaacccccgtctctactaaaaatttaaaaattagcccggtgtggtggcgcaggcctgtaatcccagctacatgggagtctgaggcagaagaatcgcttcaaccctggaggcggagtttgcagtgagctgaaatcgtgttatcacactccagcctgggcaacaagagcgaaactcaatctcaaaaaaaaaaaaaaaggaaagaaaaaagaaaaaatgcaaaataaaagtacactgagacatactgtatgattcaatctatatatgacattctggaaaaggcaaactcattggtacagagaacagattagtggctgccaggggctaggggtagggaaaagggttgatcacaaagaggtcaaacaagggtgtttttatgatgctagagctattctgtccttaattgtggtggtggtgacacaattgtatgcatttgtcaaaacgcatagaactgtacaccaaaaagtgaattttactatgtgtatgttttaaaaataaaaattttaaagtttaaaagggatatcttacctatcatattggcaaaaatccaaaagcttgacactacatgctattagcaaggctgtggggagtcaggcaccctttatattaatacgttgctggtgggaaggcaaaacgttacaacatctataatttggcaatatctaaaaaaactacacatatatttatcctttaatccagcaatcccacttctagtaacctaccttggagagagacatccagcaatatgaaaatatgtgtgcacaaagttattcatttcagcattattgaaattgaaatattcttgaaactacctaaatattccaacataggagattgactgaatatactatagcacatatacaccacagattttgcagctgtaaaaaaggaatgaggaagacttatgtaaaatgataatggatttttatgctacatttgtataaaatagagaaataagaaaacatacaggtatttgcctatttttgcaaaaggaaacacacaagataaaccagaaagtaatgaaatcggttacctataggaattggtggaaatggaatgcaacagttaggggagggaatgacacttctctaagtacactagtctgtttagttttgacttttggaataatgttaatattttcaatagtcaaaatgtataatcaaagcatttagttttacacgatgaaaaagtcttagagatgaataatggtgatagttgcacaacaatgtgaatgccattaatgccactgaactgtatgtattttattttttttgttttgggacaggtctcaggctagagtgcagtggtgcgatcttggctcactgtaacctccgcctccccggttcaagcaagtctcatgcctcagcctcccgagtagctgggattagaagcatgtgccaccatgcccagctaattttttgtatattagtagagacggggttttgccgtgttgccatttcttttctttcttttttttcttttcttttcttttcttttttttttttgagacggagtcttgctctgtcaccaggctggagtgcagtggtggtatcttggctcactgcaacctccgactccctggttcaagcgattctgccgcctcagtctacagagtagctgggattacaggcacatgccaccacgcccagctaattgttggtatttttagtagagatggggtttcaccatgttggccaggatggtctcgatctcctgacctcgtgatccgcccacctcggcctcccaaagtgctgggattacaggcgtgagccaccgcgccaggcctaacagctttcttttctttctttctttttgagacgtagtctcgctctgtcgcccaggctggagtccagtggcacgttctcggctcactgcaacctccgcctcccgggttcaagtgattattctgcctcagcctcctgagtagctgggatgacaggcgcgcgccaccacgccggctaatttttgtatttttagtagagacggggtttcaccatcttggccaggctggtctcgaactccgacctcgtgatccgcccaccttggcctctcaaagtgctgggattacaggcgtgagccaccgcgcccggccaatagctttccaaagttattttatcacgtatttatctacatattacagaagtttttactgttcttgcaacttttctctaaacttgacgttatttgaaaactaaaagctaagccaattagtatagtagtaatagcagacaaaaaaaatgagagaagtaaaggaagttttgggggaacagaaagaagaaagagctagtgtggagatactaaaccgaagcttgtggaacttgaacgccattttgaagctagttccttagacgattcggtcgaagatctgtctctcggctgccctctatagagctctaaacctggcttcaaggagttctttcattcttcattagataccacccaccatacgtcattttataaagccggaaactacatttcccaaaaggcctttatttttcctcgcgggaaaagggattgcaattactataggttttacaggtatcgcgagatttcgtcaaatctcattacggatcccggctgaaagccattttgtttttcagctcacttcaagggtacctgaagcgaattggcaccaaagcagcagctgtattgccgcagttctagcttcaccttcacgatgtttcccttggtcaaaagcgcactaaatcgtctccaaggtgagcaaaaattatgacaaatcatttacaacaaccttatatcaatgtgtcctcgcggcctctcgtgtgctttccttttacgaacatctcggccttctaatcttgaatgctgtctgtctcccatctcgtcccaagtcattgggatgatgtccttagcattggctttatcacccagtatttctgtttcggtttccagctctctttctgttatcggagtgatagtctagccctgctttttaattcttcagtaacctttgatttcagggaaggacattcttggtagacacctcgttccttaagtgatgtcctacattttagctttggggatatgtttactcctaaccctgtatagaaaaatatcttctccaattcctattactgtaatagacggaaactgtaaatctagctcttcacctggtttaattgcagggaaacaacccaaatggtatcgatgcagctttgaagttatttgtggattaacaatgttagctggccaggcgcggtggctcacacttgtaatcccagcactttgggaggccaaggcgggcggatcccctgaggtcaggagttcgagaccagcctggccaacatagtgaaacgccgtccctactaaaaatacaaaaattagccgggcgtggtggtgggcgcctgtaatcccagctacttgggaggctgaggcaagagaatcgcttgtacccgggaggcggaggttgcagtgagccaagactgctactgcactccagcctgggcaacaagagcgggactccgtctcgaaaacaaaaacaaaacaatgttagctgtcctgaaggcaatcgtggtcatttttttcttatccaaaggttgggcaggtacagggagttttgagaccagcattatgtagagaaaatgcaatagattgaggagaacaaattaattttc

SEQ ID NO: 12514 - DNA, 6000 bp, Homo sapiens
attctcctgtctcagccttccaagtagctgggattacaggtgcacgccaccaggcccggctaatttttgtatttttagtagagacggggtttcaccatgttggtcaggctggtctcgagctcctgatctcgtgatccacccaccttggtctcccaaagtgctgggattacaggtgtgagccaccgtgcccggcaatttttgtatttttagtagagacagggtttcaccatattggtcaggctggtttcaaactcacgacctcaggtgatccgcctgccttggcctcccaaagtggtaggattacaggcgtgagccacggcacccagcccttaaatggcttttatgaggtaatgtgaaaggaaaatttgcctttgacctggaagtcaactttatagtaagctgaaattataaataactgatcatggaactattgcagatcacctttgagccaaaaatttggcctggattttggttatgcctactactatgtgcctctcatttgtatttatacctggaattggcattattaactccttttcactcctgcctagaaaacttaaagtgtcaccagacccaagggcggagtggtcctataaaacaaactcgtagcctgtctgaagactagctactagctccttggctgttttggcatattcatcttgattatagctcttggtctttcatcatattagggatgtttatgatgttattaaagaaaatcttgtcaaatgcagtctgttcctagttatctactatcagtcacctgttgtataattataacaatgtttggatttgtggattattattttagtatataacattggattttatgtatgttacctgaagaagagcaatatctgtaccacatatttctttgtttttcttttttgagatgaagtctcactctgttgcccaggctggagtgcagtggtgtgatcttgacacactgcaacctttgcctcccggattcaagtgattctcctgtctcagcctccctagtaactggaattacaggcgcctgccaccatgcctggctaatttttgtatttttagtagagatggggtttcaccatgttggccaacctggtcttgaactcctgacctcaggcgatccacccacctcagcctcccaaagtgctaggcttacaggcatgagacaccgcgcccggcttatatatcattactttcttggctgagagctgtagtctgtggtagttgttttgttttgttttttgttttttttttgtagttttcttgatcgtgatcaattaagcagaaagtagaatttcagtcaggtaacctgtctatattagctaaattatcttttgcttattacatagagtgctagaagtatgctgtcatggcatatgtcctagtttctcatcaaatggaccaaagtcagtgattttatttgaagaggaaaaattgaacgtcattgtaaattaagttgcaagtttagtaaccatattgtaccactgtttgataaatttgaacgctttatggtatttcatatttagaatgttcaaaatagtactgaagtattcaaatacatacaaccctgagcgatattgaagtaaaataaacatgtatttaaggaagtgtcaaccttcaattatatacctttttgtcactgaattaacacttatttctcacgacgtggaagcagtttcagtatggtttgtactaagctaagtgatagttgtcatctgtatgacaatttagaatgttttctgtgtccatttgtgatcaaaattatatgttgctttgtgtgataaaacctggtggtggtagtaactttgaacacactttttgaacttaattttgtagttaatcttatcctgatgagtaattctaaaacttatgaccactactagaaatgaagcagttttttgtgtgtgtgtgccatcacagtatatactgaccttggagctttcctagtgctctcagagccatgaaaatatcctttcacacaaattttctcaacttacccgtaacatcgctttgagtttcagtcatacctagagttggaaagtcgtcaaattagtcctctgtcctcaagtatctgtaagtctgaagaatttaggtaagttacttaccttaaaatcattgccaatcctttaaactctatttggatggctgtgaaatattttaacattagggttaatgtcataaatcccattctttttttttttttgagaccgagttttgctctgtcatccaggctggagttcagtggtgtgattttggctcactgcaacctccgcctcctgggttcaagggattctgcctcggcctcccaagtagctggaattacaggcgcccaccatcacacctggttaatttttatatttttagtagagacagggttttgtcatgttggccaggctggtctcgaactcctgacctcaggcgatccacctgcctcggcctcccaaagtgctgggattacagtcgtgagccacggtgcccaacctcataaatctcattcttaatttcactctaggacagaattattgtagcacctgtgttctgttattttagattcattttaacttacctagacacgggtactgtggtagttgtagaggtacagatgttgagttcccatcctcctggcttaatgtcactggggttattaatacacttcataagcattttagggacacctgctgtctgctcaacccccagcaaacctgattatttcttgaagacattcccttctatgcttgtgcattggtaaggaggattagggatgatgcatttaaagacaagagttttaggctgggcctggtggctcatatctgtaatcccagcactttgggcagctgaggtgggaggatcatttgaggccaagagttcgagaccagcctgggcaacaaagggagactcccatctccacacacaaaaaaataaaaactagccaggtgtggtggtgtgtgcccatagttccaactacttgggaggctgaggtgcaaggatcgctttagccccggagtttaaggttacaaggacctatgatcacacttctgcactccagcctgggtgacagcaagactctcaaaaccaaacaacaacaaaatatatatatagctctctaggtttttatgttaaatattagagtgcctaagaatgtacatggttggcagaggatcttgcagctcatagtgataaactttagtatttacataaaaatactagatagctagtagattcaatgttctgcttctgaaaaagatatatttttggttttgccttttagtgaatttcttttggatgcttaacacaatgttaatatagttacaaaccaacttgctaatatttggaaacccacttaaaagctatcttcatttcatatgatgtgatttttaagattttaaatttggggctgagtttgtatcttaataattaaggctgcacacattgacaactacaaaataatgcctgggaagatgagtcctgaggctaattttatatttatgtggatgagtgtggagggggataataattctgaaatacttaatcacagacctaaaatgtagatctatgggtaattttaaatgttgcctgtcaaggcttaatagggacttgacaacagctaggatggaaattatttcaacacttaaatatgcttactttgtgccggacgctgttctaagtcttttacaaatatttacttgatatttgtattttgtgtactattttgatttctgcaacattattaggcttcatactcttctgtgggaactgggttcaaatggttccagatgaaaatacaaatagtcctgtgattagttttgttctacatcttatgacagatacttcatgaaaggaaatatgaaaaggccacatcttgctttgaaataagtgagatggagcctctccctctttttactgttaatgttcatagttttaaaaatcctagaattttgctgcttttcaaaatgttaagttggaaagcaagaataaaatgacccttttttcaaatgttttctgtaccatttattgcattgtttacattttatgcatctcatttctaaatgaactcatggtaacagagactgtaacacttttgcatcaccggaatcttctaggtgtgtaaaatgatggacgagtgaatgaataaatgggggagtggttcagagcttggaatggcgctatgaaggtggtgaagtgacgtccctaccccctcaacacacatataaaaattatgaatttataaacattttcctcttgatgtaatttttcaatggagggaagaggataaattcatagttctggcacttacatctggaattaggctacacagtctacgggaagcaagttaacacagtctaacagatgcacgtgaatttcatgctgggcgaagatgaactatgtggaagatgacttataaggagcttttatgttacatcttggcagttaacacagtctaactgatgcacgtgaatttcatgctgggcgaagatgaactatgtggaagatgacttataaggagcttttatgttacatcttggcagttaacacagtctaacagatgcacgtgaatttcatgctaggcaaagatgaactatgtggaagatgacttataaggatcttttatgttacatcttggcctgaggttaggaaactaaagatgacaaaggcactgttttagtatgggttttctggtttcgcttttgtcgtgggggcggggtgggatagtggactcgtaccctaacaaagacccactcgaggctgcgtgtcggcccgggggcagcagggggcaggagaagctggctctagaccacgcgttccttttcacgtgaccagtcgctctctttcccgtggcggccctgcttccggcaggggcatcacccggaagtgggggtagtcgagggagggaggggtaaaggcggctggccgccgcggcggggggtgggaaaagagaagcagagggaggagttgttgctgccgccgccgcagccgcagctactgtgacttctccgattgtgtgagctttgttggagcctgcgtacgtggatttatcgctgccacggtctgcgtagctccagaggtttaaccataggatagagaaaccaggtaagtcctacattggcttcccgtcgtcctttctcctggagggggtcttctgtgctgtcagtttgtactacgagtgtggtgagaaggtcatgttagtctggggcagtctcgaaagtttcacttattcacaattcaggtattaactacatttatgttttacctcccctaacaggggatagaggaggggaaattaaatcctgacctgtgtcactttcttgtaccctcttggagagaatgtcctgatcatccatggcctacgttacccaattaattgagggtacaagaaagtttgtgtttggcattgaaagtcacatggactggggtctttgcttagtgacacctctttatactttggaagctaaggttactaaaatgaccataattgatgaaataataattgaaaaatagatatttggcttcttgtcttgctctgggagcgtaaggtaaactgagagaactcttgtttccacttagttttgttcattgtgccccctttccagtaaagttactgtccattgtccgaccctgtggcatcttatctttgacacttttcttcgttgtagacgttgagattatcttaagcacaaacacttatcgtttcacaattcagcgtttgtccaggatctgatctttattttaatcacagactctttatctacaatagtatggctttgtattgagaatatgtgcagaacattgaattagatgatactgaggttattaatttttttttttttttgccgggtgcgggggggtggtggggagggggtgatgcacaagaaataagacagagttcctggcctcaaaagagtttacttacagtaggctgggcgcagtgtctgacacacctgtaataccaacactttgggaggccgaggagggtggatcacctgaggtcaggagatcgagaccagcctggcc

SEQ ID NO: 12515 - DNA, 6000 bp, Homo sapiens
atgcttggaattgagaaagtacttttaacttctcatatcattttcatatgcactataatatttgtaggtcacagtattgttcccctacccctatgacggcacatgaatgtttgttgttgcttttaaagagagaagcagaatgatttcacttgggataaagagaaatgaattcttaactaaggcttttgctttaagcattctctattcctttgaggtttatgttatcttttaattttccttaacatctttatttttttatgtcttggagagtgacaactttttagctttattttagacattctgctgagcattttagatgaattaccttatttaaatatcactacaatattttgaggtggataaggttattatccctaattttagatgaaggaactgtagctttttaggacagctctgtccaaaaagctacgtaatgcaagccacacatgtaatttgaaattttctaaaaatattaaaaatacacagttgaagttaatttaataatatatttgttgaaccaatgagtcaatatattatttcatcatgtaaccgatatgcaatgataatggtatattatgttatattatattatattatatattgaaacagagtcttgctctgttgcctaggctagagaaaaatgccacaatcatagctcaccgcagccttcgagtcctgggcctaagtaatgctcccaactcagcctcccgagtagcagggactacaggtgtgcgctgccacacctggtgaattttttatttttagtatagatgaggtctcactatgttgcccaagctggtctggaactcctgagctcaagcaatcctcctgccttggtcctccaaagtgttgggattacaggcctgaaccatgggacctggtcaatatattttacatacgtgtgtgtgtgtgtgtgtgtgtgtgtgtgtgtgtgtttatgtgatataccttcaaaattgggtgtgtactttacactcgaagcatatgtcaactagggcaagccacatttcatgtgctcagtagccacatgtggatagtggttatcttattggacaatacaggtctagagattaatttcttcacagccagacagctagaacatggcagagccaagactccaaatttggtcaaaaatcaaaggttttttcttaactactgagcatcactccctcctactgattgcaattgttgctgatggtttaatattaaacattaaaaatatcatggagaatgtgttttatccagtctttctgtttcattcccatacaccaatctactttcccaatagcaatgatgatctattgattataacatgtctgtgcaatgaatagtgcaatttgtgatgtaaaacacaaaaaaagaatggaatttagtgcaaaataactgtcacatgataaatacaaattactctgttgtcatctatctgcatgacctgtacactccttctctgaacagagactataaggaaagacagatcacaatgagatgacagattgcttgataagggatgtttcatgcaaggtgaattgaaataacaatatttgattggcttcatcaatctcatgtcaagggtgattttgtcagagaaatgaaaatgtacatgaataggtgttgccaatgctcatctctctcagttttctttcaccaggattctatggctgatcaatccttttttagatgggcatgttatttcttggttttaatcaattcttacaggcctgagaaacatccttactcactgatgtttttgaaaactcttctttgatccattatataatcagaatggctttatagtttatccctcagagaatatgcatatttccatgtttatggggtatatattaccataatttcccttttatgatcatagcagaaccctggtctaggttcctaatgggaacactgaagaaacaaaatgcaataaatatcacagttccttcctgacacctcatccaaaaaccagattcccacagtgtcctttttgcttttgaggacttttgttagtcataaaatttttatgtaatgcacattctgaaaatgtgtcactacacaatctgaagaccgtatgctgaggggcagcacaatggactggacgtaacacgggttggaatttcctgtgtattttatagctataataccttgggcatttttaccgagtctctgttttctcatttgttaaggaaaacatgaagctaataatacctacctcttagaatggtttggaggattaatgggacaatttatataatgcagatggtacattaaaaacattcagtaacggggagtccttctgtctgtagtcagaaaagcgtcttcatcagtccttttagagttagaatgcctagagctttttgccaggtgccttttggttattccgttgctcattggtgccaccatcagacagaacacaggagaaaagaaaatgggggaaaattttcattattttcagatgtggatttctgtcagtcttttcaacagactcaatttcttaggtaattttctggattgcttagttcaactagtagagtctccttggtctgtaagtaatgtttctaatctattcagatcatttcctattggactatacacctaaaactaaatgctctgctccatattatatatagaagaattcagattaactataaagtaaccatgtagctgaatttatgagttatataccctgaatagaaatctagagtctgttactctttagcgtcatggtcttgtgcaaatcacctgtcctctatgaatttcagtttcaggaattgcaaaatggaataataatattaacctcataagtctgtcatgataactttaaatactttaaacggtgacaaaatagttctcttctcctgcctagggattaaatggaaatcttcagaaatcaattaattggtatctaatgtggatgttatgaataattcttagtatttgaaagcactcccatagcatgcctgtgccacactgtccctggatcaatcagtgattttatttgcattgagttcctgccatctcccatgacacagtctcatccagtattgcaatccccaagagtcagagctgtaaccatttagcagcttctgatttcccctctcagacatttcctagctcccaagaagagtgcaatgcatgtgctggatactgtgaataatgaagggacggttacaggaggagcaaaatgtaatagcgaagtgtctcctcacacctgtgcaagtaaatatttctctgttttctttcatgcagacctgcattgagctgcggtgctgatgtttctcctagtagcatggctttcggtataaaaatatgcaaaaaagtgacgtgaggaatatttgaaccaaggttttaaccttcaaaatatcaggaatgggaaaggaggcagctaagaagatggagaaggatatactggggaaacaagtcataaggatttgcctttcagttaaaaaactttccctgaagcagctattagagaaaagcaacttattataattctgaaaatttttccttcttgatgttctatctctatgcagatgtcatctcctcttccattcagtagacaaaaaataaaaaatggatactgtgttattggtgctctgaaacattctctactttttctccttttatttcaggaaaaagagccacctcctttcaaataattgcacagcaccagaaagataagtttttctacaggataagcacggaaagtggattttccccataaaatcgtacacctttctggagagaggaatttagaaaattcacctggttaattttctggcgtctgggtaaatttaaggagttgttccttgaaacaagaataagagttgaccagctggggtggttttgatgttgttactactggttttttaatcacatgccaggaacgggggaattggcccctacttccttatatccacgacccttcgaaggcataaaccagccacattcctcctggtacctttagtggtccttggggacctggcacccggatgcccacccagccgtcgcccaccaggcagccagagctggctggcaagcaccaggcatgaggctccgggctggtttcctccctctcttgccccctttcctaccttggaaaagcgccgtccatgcccgcgacgctgcctggtctctggcagcaatgccacctgactcactcctgcttgctgtctggggtagccaaatgctaggtcgctagaacttctccttccctccttcacacacacacacacacacacacacacacacacacacacacagcccttcgctgctgtcagaggattaatctggaaaggcgatcgaagtaccagaccccgctcacagttgagtatgatatatgcggacagcctctcagctccaactgtgactttgccaggcttctgcccctactacccctagtctgccttaagtatcctttgtatgagaaaatggtgctgtgggatgcttgttctctagctggagtcggcagccagcggtatcacaagaaaaacacacaagaaaaatcaaacttctctgagaaaatgtgaatgggtgaaacttaaagggaagcctaagagaagagtgagcagaggaccgaggagaacattgtatgcccagggttttgctcaggaaagctagcagcccgaaagcggcgcgttttcttcagcagcgggtcccgcacgcgagagtgctgccagcacgctttctgcctccttctccaggaggcgagcagtaacttcctaagcttacctccatctctcccccgcccttcttgctggttctccgtcagcggggaggggccgcccccggatcgatgggggatgtgaggtgcagggagtggggaccagaggggggtactcagcagttggtgctgcgccatcccttcccagcaggcggcccggacactggttcacttctctccccacgccttcccctggttcaccccccttccttcccctttctccccctcggttaagtccctccccctcgccattcaaaagggctggctcggcactggctccttgcagtcggcgaactgtcggggcgggaggagccgtgagcagtagctgcactcagctgcccgcgcggcaaagaggaaggcaagccaaacagagtgcgcagagtggcagtgccagcggcgacacaggcagcacaggcagcccgggctgcctgaatagcctcagaaacaacctcagcgactccggctgctctgcggactgcgagctgtggcggtagagcccgctacagcagtcgcagtctccgtggagcgggcggaagccttttttctccctttcgtttacctcttcattctactctaaaggcatcgttattaggtaagtaaccggactgggtacctgtacagggtgctgtcagggaggcgtgaggtccacacttagtgcgcggacactgcccgctgcctgcccctgaggtctgaactatgacaacggggtggttttaaagacgcttctgctattctcccttcccccttctcttcccgggaggtaagagaaagagcaaaccccggaggtgagcgcagggagaatatctttttgcactaccaccgctgcgcttggttactttgggaaaactctcacttttgtcagaaatgtgtcggcgcatgaatttccccgacattggctgtgcaaaaaggtctctccctttaatgggtacagccagcttcagcgaggctgagggaaactctaagattggggcgggtgttgacaaaagagcacgtcccggactcccagactcgcccggctgagagattggagctgaggggcgatgcctctagctgagaaactacccctggcctccctgcgctcctctgggggctcgggtttggatccctgccaggctggctccaacccttgagggtacgacccttggcgcagagaggagagccaggagagccaggagcgcacagggttcccggtgctgtttctcttggcgctcgcctccccgcccttccttcccgccctatttttatggggctgtactcagccagcacctgctggatgtggagat

SEQ ID NO: 12516 - DNA, 6000 bp, Homo sapiens
tgttgggattacgggcataagactccatgccaggcaaaataagcactttaaatggattacctcattaagttatcacaacaacctataggtactgtttgtatcctcctgtttttcagataagaaaattgaggcacaataatggctattcttggttggtgcagatttgaagggattttttctcttttttgtatttttatatttctccattatttttataatgagtgtgtatcttttttataaaatgaaagccattgtgaaagcatgtctcaaaataaataactgtgaagattccctggggctcagtcttgagctcttttctccttttgtcctgaactctcttcctagaccatatcatagactcccataggtttgaatgccatccaaaggcaaatggcccccatatctatatttccattcaagcacctgttttccaagctccagacacatttgcccagctgccaactagacaactcctgttggatacttcatagactgttcaagtttaacatgtccaaaactatgctcatcacttaccccagactggtcctcctcagtgcttcctaatcccagtgaatggtgccactgtccacccaaaggcacaaaccagaatctatgttattttttgttcttccctttctctcattctctatatattcaatctatcaccaagtatatgctttacctaaaatatgtcccagatctgtttacttatttccatctctgctaccacttcctagtccaagccactataatctctttcagttacctcctaactggtcaaccttttaaaactcttgcccccttacaattcattcttctcacagcagccagagagattttaataaacataaaaggaattctacttagaacttttcaattaattcccattgtttgtagaataacttcagttgagtacacgggcacatgcctgtaatgccagcaacttgataggctgaagtaggaggatcacttgagtctgggccaagtccagcctgggcaaaatagcaagaccctatttctaattttaaataaataaacttcaaacatttaccatgacctttgtggcagaaattataagttgcctactcaatatgtttcccccttctatatatacataaaaagatattattaagagtggtaacaggctcagttgaaaataaaacctccccagaccccactataagtaggagtggtcatccaacccagttctggccaataagataagcaaaaatctacaggacagggcttccaggaacactattactttcttaatggaaagggacaaatttagctgccacatgttcttttgccctttgctatcccccctttatcctgcctagaggtggagcagccatcttggaagcatgatgatggaggccatgctcaaaagatcacagaacagaaagatggaagcttgggtccttgtacttgaactagccctggactgctgactttgtgactcccattatgtgagaaaaataaacccttcatttggttaaactgccataacttggtttctattacatacagcaaaaaacagtcctagcagatgcaactctgaatatgtctcctgcctacctcttcagccttatctcaagtaactctcctcctcattcactacatcacagctacactgactttccttttattctctaaataattcaaccccttttttgcttcaggatatttccatgtgctgttcctttggcctggaataatcttttccccactcattaccagctaacttctactcattattcaggtcttagcttaagtgacaactcctcagcatggatttccctcacccatcccacccaatccaaattaggtgctttaaagcacctgcacttttccttcttagcatatatcatcatttatgtacttttatttacaggatttttttccttttagtttaatgtctgtctacccaacaagactctgagctctataaaggaggaactgtgtttgcttgtctactactgaatatatatctagctcctataacaatgcctgccacataggggacactgaataaatacatgctaatcaatgaacagtctattgaaatgccatgtcctttgtgccatttttcctgcttttctgaatcagaattaatcactcttccctctatgtttccatggaatattgctttgactcttggtttaattcaatccttttaacaagaaaggcatgttttaaaagatctcaaagtctattcaggagaggaacacataaaaaagaattataatacagcatacaaagtataacggttgaagtatgagcaagatacaaaagtagagcaagggaaagggtaattaacttaacgaagtggaagagatgagaccaggaaaggctttcagggggtgataacatctaggcagcattttgaaagccaaatgggaattttccaggtaaacaagggaaggcagaaaactccaggcaatgaatatagcatgggcaaatgtcctacagtgtgaagaagtagggcatgttcattaatagggtgtacagtgtgaggcaggcatcagaggcatagtgtgaataacatcactgaggggaaccatctgacccaataaacataagtttctccatgagactgctcttgtggcttttcttttttctctctttaagcttgaccaaagaattgtagaacatatagaatcgtgacatatttcataatttatgtaatcagtttaatgcacaatcatgtatccaacaattagaaaattattttccttgagacattaggatgtggaggtagtcatatgtacatgccccattttcctgcccagctgcgacctcccagttggctccatcgctgtagaaaaaaattgtccaaaatcaagactagagagttggacaaagtcgagatcattaaatgcctactatgtcacaataagtggcttggattttatagacaatgaatagatactaaaggattttaagcaagggagagattatcctcaaatttgagtcttagaaagatcaccttgaagacaatgtatgagagacaaggaaaacagaattctattgcaatagtaaaagtgactgagaacctcaacttaaacagtggtgattgacaatggagagaataggattgcagagctaattcagaggcagaattaactggacttaataattgattagccatggggatgaacaagacaggaagaaatcaaggatcatctggaagtttctattctagagactgattattgtgtcatttagtgagagaggtaataccaaaaaaaaagtgcatgtttgaaaggagagataactaattcagttcgggatatatggaatttgaggtgtctgttgggtattgtagatgtctagcaggttagatggacatatggatgtggagctccaagagaacagcctgggtaaaatatatggatgtgaaagttctcaaaaaggatgacaaactaaactggggtgttagcagtgagcacaataggaaagaacagctttcaaagatataaaaatttagaatagataggatctagtgattgattggaatagataggatctagtgattgattggataaagggaatgtgaaaaagagacaaaacctcagatttttggtttgaaagacaaacctcacatttttggtttgaaagacaaacctcagattttggtttgaaagactgggtgcgtgacaattccactattataagctaagttatgttccctcaaaattcatatgttgatgccctagcccccagtatttctatatttgactgtatttggtgatagggtttttaaagaggtaattaaggttaagtgaagtcatatgaatgggaccttatccaatataactgatgttcttataatgaaaggagattaggatacaggcatacatagagggagaatgtcatgtgaatatggagatggtcatctacaagccaaggagagaggactcagaagaagccaaccctgataacaccttgatcttggacttctagcctccagagcagtaagaatataaatttctgccatttaagctactcagtctgtggtattttgttatggcagccctagcaaactaatatagccaccaactaaggttgggaatatgaggggaaaaagtaggttaggagaaggtgttgaaagaagactttgatatagaacatgttgagtttgagattcctgaggtatatccaggtggagatgttcaaatggccttgaaattaaaagatataactgggttacaggtacagatgtggaaatcactgatatgtaggtgatattttcaactgtaggaatgaatgatatcatctacgaagtctgtgtaaagtgagaatgatcatcaagaagagaaccataaggcatgtgaacattaaaaagcagactgaggaagaggacccaagaaaggagaaaaatcagagacagaagatgaagagagagagcttagaattagtctttattttatcctgttttcattataattagttaagtacatattgatagcaccatttaaagagctttaacttagtgaaggaggcaatatcttattcatttctgaatctcaaacaccaagcacagtgcctgacatttaatatccctgcaataaatatttgttgaaccaaatggaatcgaaattaggacttcattcccttctttgttttgtttgcttatttctggagtgtgcagcatgtattgccactgatattttaagttcatagtgaaaaatcatttcaatgtgttctaggcttggtccccttccaacccaacccccaggacaatagttttcattataaccttctgtctttgccattctggatggaattctgtgcacagaagttatatacatatatgggtatatctatgtaacaaatcgcagcacaggagtcccctgggctccctcaggctctggtatgacatatttgagccatataaattcagcttctcctctggcatctgttagccgactcacttgcaactccacctcagcagtggtctctcagtcctctcaaagcaaggaaagagtactgtgtgctgagagaccatggcaaagaatcctccagagaattgtgaagactgtcacattctaaatgtaagttgattcatattttttcccttttgagcagaagcatggtttcacagatttatcatattgcaaagtgaacattagaaagtggaatcaaaggtgactttgaattatggcttgcttattgagatttattgtgtattgttttattctctctgttctttggttaggcagaagcttttaaatccaagaaaatatgtaaatcacttaagatttgtggactggtgtttggtatcctggccctaactctaattgtcctgttttgggggagcaagcacttctggccggaggtacccaaaaaagtaagtaaatacacatcataatctgatgcttctgttctgagtttgattgaatttaattagtaggcatataaattattctgaaaatgaaaatcattaagtctcttttgtgtttattttctggtggtatgaaaaactgaatcaagatttttctctccttcatttgcctaattattttggtaagggaaaaaaatttatcttctatattttggttagtaatgatagggtgtagaattacccattcttctataatgcttatatttaaggagttaagactcctcctaggagcaaagtttttaccttaagaaaaaatacttttaatctttctttcaattatctgggcagaaactgatggaaaagtaattagaccaccacataaggagaaaccacccaaagtggcagcaaaggattttcagggattatgtttctgacttaatgcatctgcagtgagaacaggcagcaagctgcttttcaggaggagcaattctcatacctgacttcacatttatttatgactttaaaaagaaactagagcttttcagctccttgccagctgcaatcatcactgtcccactgagatagcaatgccacaaggtagaagcatgcgacaccaagtcattaatcacagataactcagaaagcttctgata

SEQ ID NO: 12517 - DNA, 6000 bp, Homo sapiens
tggcacgatctcggctcactgcaacctctgcctcccaggttcaagcgattctcctgcctcagcctcccaagtagctgggactacaggcgcgtgccgccatgcccagctaatttttgtatttttagtagaaacagggtttcaccatgttggccaagatggtctcaatctcctgacctcgtgatctgcccacctcggcctcccaaagtgttggaattacaggcatgagccaccacacctggccaaaaactgctataattctaatatgacttagtatatgttatcagtaataattataattattacgttaaatgactgtgtgccacagaggtaaatttccttgtcaattgtgcctttaactgtggctgccctaaaatgtttttgtcatccacagacaattgttgtctcactttggtcctctttaaaagatgattttataatcagctataaaatttaacaggtgctcctaaatgtgagtttctgattaattactctgggagattgtaaaattagaattgaaaaatactttcaaatagaagagtgaatggtgtttggttttctttggactgtatttgtataaatatgttattggtatgtgttccaaaattacgggaaacttctataatgttgatataatttagtgtacattatcaataatcataattgatatgtaaaattgttgtatgccacagaagtaaccaaaattcctagccaattgtagctttaatagtggctatagacttttgtcatccacagacattttgtcttcctttggtccttttcaaaaggcagtttataatcagatataggactctgaatgcaggtctcagataactttaaaaattgagctattggaatagaggaaaaaccaatcttctaggactctcatggagagctaatgtattaaacattgctagaccctttgttttcagagtcaagagaacttatttctttagagctatttgcaactgttaacaagtgagtaaaatatactgctgtggacaaaatttggagcatatttgttcctctctacctgatttctccagaatttggaaactatctgtgagtattctcaatttatggcagtatagttaattgcataaattcaataagaatttgttttcttttgtaacaggacacaattggagaaattggttactttaccaaggctttgactggaatggcatgcttcctttaaataatcaaagttgacttatagagcaaattaaagcccattgaggcatctggcctcataccttatccacacagagtccctgtgcaaggttcctgtcctgtggtaagtaaagaatgtcactttctaacaggcccaggaaccccaagttatcttgggacctcaagaggagaggaatttgcccaactcataggtatttgagggtgcaaacccacggctgggctcggcttttaaaacatcttatctgagattcttcatggaacagagttctagcaaagccaattaaaaaaccctaagtgaaaaatattcttgctgcactttatgcaaataatcaggccacatacagtaagactaaagcttattttgtaaacaaatcagttctatcatgttgtttttaataaaaatggggactggagagagaaaaattatgcttcaaaaaactatagtacactgttgttagctgttcttgagtttttttctgcagtttagactaaattctaaattgtttgtgggttagaagtccccaaactaatgctttcaaatctctgcttttaaaattgggaattgtactcctcatcctaggactcattatttaccttataaggtaaaataggctgttcacttaaacactgtagtaaaactatagatgagagtactaatgtttttgccatacaagccttggaagctcaaccaggccggcatgagtatgctcagacaattaattgtaaagcagttccactcttctcaccttggggttcactcccaatcccactacatcccctgtcagcaggaagaggccagagtgattgatggccttttcccatcttcatagcctataccttaagattaaggtattataaaacccaaagggagggattgaaaccgcctttgtaaaattatgactgagagagtgaaagagatctaacttagctgactccatcttgcttctaacctccaagctgttcttgttcattcctgggggtaggctgaactaacttcgggagaaatgtagtttatagtttatagtttaaacaaatatggtaacagccctttcccaaagcagacctccttcctgcctggcgactagattgcctttgtaggactaacattagccacaagatcagaaattatggtttaggggtcatgcagctggaggctataagattctgagcctccctaaactgctccaaagatcagtgtttgagatattttgtagaccctgcacttgataaatcagctggcaccacccagatcaataaactggctcatgtgatcttatggcccccacccaggaactgactcagcacaagaaaacagctttgactccctatgatttcatccttgaccaatcagcactcctggctcactggctttccccgacctaccaagttatccttaaaaactctgctccccggccaggcatggtggctcacacctgtaatcccagcactttgggaggccgaggcgggcaaatcacctgaggttaggagttcgagaccagcctggccaatatggtgaaaccctgtctctactaaaaatacaaaaattatccaggtgtggtggcatatgcctgtaatcccagctactggggaggctgaggcaggaaaatcacttgaacccaggaggtggaggttgcagcaagcctagattgcaccactgcactccagcctgagcgacagagcaagactttgtctcaaaaaagcacaacaaaacaagcaaacaaaaaactttgctccccaaatggtcagggagactgatttgagtaataaaactctggtctcccgcatgtgggctctgcgtgaattactctttctctgttgcaattcccctgtcttgatgaatgggctctgtctaggcagcgggcaaggtgaaccccttgggaggttacagtttcaccatgctggtcaggctggtcttgaactcctgacttcaggtgatctgcctgcctcggcctcccaaattgctgagattataggcgtgagccaccacgcctggccatgcatcacatttttatttgtaaaagtaaaaaccatggaaacaacatcaatatctagcaataggatgcaaaatgaatgagaactatagtacattcaagtgatgctaaagttttatacaatcattaaaaatgattgtttagggctgagcatggtggctcatgcctgtaatcccaatgctttggcaggccaaggcaggaggatcgctggagcccaggagttcaagaccagcctggttgacataaggtagccccatgtctacagaaaataaaaaataaattacccgggtgtggtgacacgtgcctgtagtcccagctacttgagagacttgtagtcccagctacaagagagagcctctcacttgagcccacgaggttgaggttgcagagggagaccctctgcagggtctcaaaaaaaaaaaaaatcgtgtagggctgggctccgtggctcatgcctgtaatcgcaacactctgggaggccgaggcggaaggatcccttgaatccaggagttagaaatcagcctggacaacatcacaaggctctgactccacaaaaaataaaaaaattagccaggcatggcggcatgtgcctgtgatcccagctactccggaggctgagatggaggatcacttgagtgagactttgtctctaaacaaaacaaaactctgtgtgtgtgtgcgtgagcatttacagtgctaaacaactttaagtaccacactaatagtgaaaaatattacaggagaggcagcagagcaattgttaagagcctgggccctagaaatgactgcctaggtttgaggcctggctctccacttactagctgtatactcctgggcaagttacctaccttcccagcccctcaatgtgcccattcatagcatggggactcatacctagtccatagtgttgctgtaaagattaaattagttaatacaagtagagggcagcgtctagcatctagtaaacagttgacaattattggttattgttatagaaaattggaggagggagaaatcatatctaactgacaatggatcaggaaaggctttatagaggaggtgacattaaagaaaaggtttaatgctaatgaagagtgatggtggggggcggggtcaaaagatagggagttaaaggtagaggaggtggtaaggcgtaggttgtgtgaggccgtgagtagatagatgagtggtggcgtgtggcagtgggagccattgaaaactaaatctccaaagagagacaggggtcaaaatgtggagggccttgaattccaaatttaaaactggagttaaccactggctatgagagtcattaaagatttctgagcaagagaaagaggaagccttctttggcagcattgaaggctgacaaatttgcagttttatccttgagtgttacgaacttcagaaacaactctctgagggctaatattttgatttaggaaaaggaaagggggacacaaaggaagagatggaaaaagggagtgaataactgaaggatgataagtgggagggggagatgaaaagtgagcccggtgggaaggtggcagcaaagcctgtcttccctaattcctcattcctggggtcacttggtgactgaactcatacataacctcccttctccccatttaagatttgaagtttccgtctttcctttagggcttcatttaacttcgagactgtccttttggcctgtgagcacacgtagggcattaggacccagcgtttgttgtagtgagagtggttgaatctcgatctctcaatttttctctcgagctccctcctctccctttgtcattctagctgcctgctgcctccgcagcgtccccccagctctccctgtgctaactgcctgcaccttggacagagcgggtgcgcaaatcagaaggattagttgggacctgccttggcgaccccatggcatcccccagaaccgtaactattgtggccctctcagtggccctgggactcttctttgttttcatggggactatcaagctgacccccaggctcagcaaggatgcctacagtgagatggtaagtgaagcaaacgggtgatgaggagcgcactcccatgggattgcgaggacctctccccttttttccttctcagtttctggtcccacccccttagcccctatccccacctggaccctccgttctcaacaactttgcagctcggaaggagcagctgggcaagagcgatttcttttgtgggctatgctgttctggagccactgaatgccagttgggggaggggttgcgcagcgaataccccccatcccaagtaaaccagaaggctgagacctgcgtagcacctgtcattggcaggagcccttccctccttccagcacacacccaaagtccgggcaaccagtatacaagtctgattccctccctgtgagctaagagtttagcaagcggagagtttatttattttagagcagaacaaaagggaaagaggaaaagagctgggaaaaatgggctactaaaacaagcaatttttaggggctgactggtattcctcatcccaggcagacagctgatagtattcctccagccacctgggtatgtatctggatccttgagacaaagcattcttggcccaaataaaggtcactaagctcttgtttcttccccttctctcaagggagagctagatgttttgttttattttgttttgtgtgtggggtaatctacaaaatctgcaaagtctgctttttctctcccgcaaacagtccgtaatccccaccttgccttctgtggatgaccagagccaggccctctgcaggttttcccctctgcagagttggaatcaatc

SEQ ID NO: 12518 - DNA, 6000 bp, Homo sapiens
gaagatcgcttaagcccaggggttcaaggcagcagtgagctatgatcacgccactgcagtccagcctgggcgacacagcgaaaccctgtctaaaaaagtaaaaattctgaatatcaaaaataccataaaattaagatgttagtgatagattgagaaaatatatgtacaacctatataacagaaaaataactaatatacagaaatgtgtaaagaactacaaaccatttaaaaaatacagctgaataggaaaatactcaaaggatattaactaatactcagagaagaaatgcaaatggatgttaagcatgtgaaattatgctcaagataatagatatttaggaaaatgtgaattaaaaggacaatcttgccaggtgcagtagctcacacctgtgtgatcccagcattttgggaggccgaggtgggtggattgcttgagctcaggagttcgaaaccaacctgggcaacatggcaaaaacccgtctataccaaaagtacaaaaattagctgggcgtggtggcatgcgcctgtagtcccagctactggggaagctgagatgggaggatcacctgagctcaggaaggtcgaggctgcagtgagctgtgattacatcactgcactccagcctgggcaacagagtgagaacctatctcaaaacaaaacaaaaaaaaggacaatcttttgttgactcttatattggcaataattactaatacagacggtccccaatttatgacaattcaacctatgatttttttactttaattggtggtgcaaaagcaatacacattcagtaaaatctgtacttcaagtactcatacaaccatcctgtttttctttcaatgtagtattcaataaattatgtgagatattcaacactttattataaaataggctttgcattagatgattttgccgaactgtcagctaatgtgagtgttccgagcatttttaaggtaggctaggctatgatgtttggtaggttggatgtattaaatgcattttagatttatggtattttcaacctataagtttatttgaacatgaccccattataagttgagaaacatttgtacacagtgtgcatgagagtgtggggaaatagatcctgtcttatgtttgatgggggtataaattgccaagcctttttggaggacagtttggtggtatatccattaactatataaaatctcacatccttcttttggcaatatcaaatgtataaaatctcatacatttaagcaaataattatatttatagtagaatatcctaaagaaattcttctacctgttggcaaagctttatgtgccagactgttcattgtaaccttgctttattagctccggatccagaactcataatatgcagcagttaaaaagaatgaagcagctttaaatgtactggtatgtagagctctttgagacataattttaaatgaaaaaaaagcaagttgcaaaacagtatgttaattatgatcctggccaggcgtggtggctcacacctgtaatcccagcactttgagaggcccaggtggttggatcacttgaggccaggagtttgagaccagcctagccaacatggtgaaacccagtctctactaaaaatacaaacattagctgggcatggtggtgcgcacctgtaatcccagctactagggaggctgaggcatgagaatcgcttgaacccgagaggtggaggttgcggtgagccaagatcgcaccactgcactccagcctgagtgaaagagcaagactccatataaaaaaaaatctcatttatatattttaataagacatgtatgtgtatatcatgtatacaaaaggttaatacaccaaacttaaaatggagaggtaactgtgatttgggtgaggataggggagtgaaagtggtactagtgctttttctgggtttgactattcttttcttttcttttcttttcagagacagggtttcacgccattgccggtctggagagcagtggtgcaatcatagttcactgtaaccttgaattcctaagctcaaacaatcttcttgccaagtagcctcccaagtagctaggaccacaggcatgcaccactaagcccagctattttttttttttaatagacaggtttccctatgtcgggaaacctatgtagggtggtctcaaactcttggcctcaagtaatgctcttgcctcagactcccaaagtattgggattataggcgtgagccatcacacttggccttgggtttgaattttatactagaattgtactcttgtgggatttgtatgtaaagtaaacagcaaatattaaaacaccccaattatctttccactgggatacacagagctaactccatcagccacattgtataaatataacatgagttatttaatctctcccctatcaatagccattttatgttgcgtcaggctttttttttttttttttttttttttgacagagtctcactctgtcagccagactggagtgcagtggcgtgatctaggctcactgcaacctccatcccttgggttcaagccattctcctgactcagccttgcaagtagctggggttataagcgcctgccactgcgcccggctaatttttgtatttttaatagaaacggggtttcaccacgttggccaggctggtcttgaactcctgacctcgtgatccacctgcttcggcctcccaaagtgctgggattacaggtgtgagccaccgtgcccggctgcgtcagttttttcaaaccttacaagcattgcgaaaaaaaaaaattctagtaaatatatctttgtgaaactgtgtaggcatataggttggctaaattccaaggaatagaattattgggtcaaagaatttgtgaaatattatagttatcatttaatagagtttgccaaattgccctatataaaaagcttgcatcaatatctgcctccaacagagtagaggagtgcccatttcttgacaaaccagtcaacaatattatcaagtttctaaactttgagaaaatcatacttgaaacatggtaaggcatagttgctttgatttgcatttctttgtttgagcatcttttcatatgtttattagtaatctatttcttttctgtgaacaaatctgttcatgtcttttggcacatttttctattgggttgtttatcattttactaatgatctgtaagagcttttagattattacaagttagccttttgacagtcaatgtttatggttttttttttttactttaccaaagtttaaaatttgtatgcaattaatttatcaatattttcctttggtggagaaagtaagttcgtcactttcaattgagttctgaaaagccattagtaagattgtaaggcactaggacttcctttcttggctcctgaaagggcctcctccacacaggggcccctcacagtggagcccctccctctggggtgtcctatttcaatgttctaagaaagaggctgcctggagggtctatatttggagtatgactcctcagcggggacaggtggatgcgtggggactaacttctgcatatttggtccctgagttttgggattattctgaggggcttgtatgggaggtgcagtgaagttgtaacacaaggcaggacatgaaaaaacttctttttcttggcaattgcttgggatcctgtacattgcccttccacttgtgagggaaaaaaataatgacacggacatcaggtgtgttgcagtgattcacagtcatccacagaccctcaccaccatctccactggaaaatattgaacactcgccactgctagggtagtatgtagtacatgaatggcagacaccggcgagatctcaagtgttacgacggatgaaaattccacctgttaagtctcctttccatccaagctctagcagttggttgttccatgggtgtggtgaggctgatctgattacatgcttatgtaaaatccaaataaagccccttgaatggaaaacaggttaatttgggaagtcactagtaaagcaggttaatttggtaagtcactagtaaagcactaggctcatcaggagttgggtcttaaatatatcctctagaagtcttctctgaagaaggtcttagacacctgaaaaaagatgctgagttcagccagaacttcaaaagttacaaatcacctgtgtaaaattgtcaatattagaaaacgaaatgtctttccaaagattaacttatagatcatattgaatacgtgctggttttgtttaggacaattttgtatttaaaatgtcaagaattactagtcaattttgaaagctgtaaaatagtttgcagtaacagaagacattttaaaatgtggcacaaaataatgtaaacaaaagaatgagtcttttgttatttttacaccctgaatattttttgtgtcaaatgaaaatggctatactgtattttctgattacaatattagaaaagaatgtcatattaaaagaaaaaaaaggaacacgaaaaagaaaattaaagctctacttgcaccttctgctttccttcctgatacccccttccacagcccatttggtgcaggcattgtacttagagagggcaggtcgtgtagggggcgggtggggagtgctggtcttatagtctaagagagaaataagtgattactcaaagaagaaacataaaaggccacagccaagggccgggagtgggtagggggatgcagaccctcccctgtaactgaagatgggtaaactccaaccacaaggcgatgatgccacttgtgggccctcagattggagaggacggagatgagtgacaacgcgtgcgcactggggcaccgagcacagaccagagaacggggatgtctgtgcgtgcggagtggaggaggggggagttcctggtgactggccgccggcccttggtgggtggtagggggtgctggggaggagggcgagctcggcggtgacgcgcggtcctcacgtgacccggagctgcagagctacgcagccttcgttgcagtcgtcactcgcatctggctaccagctccccgctgccctgcgctcggcgggctggcatcgggcccggggaaagcggagcaggtaagggccctggggcccgcgcgccctggccaggccggcagaagctcactgaccccggcagcggttacggggcttgagggggcggtggtctatgctgcctcaagttcgaggagcctttgcctctgattctccctagcccccttgcccccgcctacatctgtgcaggcgaaccgtgggctttgatttgtggggagattgtctctgccagagggaaatacagagattgagatgcccatcgctctaatcactggccacacatgtccgctcgcttcctgctcaatttagtggaagggatgcgccacggtggcgtttgcagagaaaatggtgggccttagagactggacggtggggttggtaagggtggtgtctcagactgtggggagggacgtttgataaccaggttcctgaacccggaaaggcgagtattgggatctatgtcctgggctctagaccaacactaagtggttttactctctcctgtctgtcggacagtagttcggtgtagcactgtttgcggcgaggagaaaggaaggagaggagaaaactgcactggatcaaggaggttagtgtgagtacagacactatctaaaccattggagttccatatgaattctatgacaggaacttaggtgcggctgtctgaatgggatgtggggtggggctagcttggggactttccctaaactgcattttacttaccaagcttaggacttttaaattgtatgttgaagaccaatgaagacagcaaacttttctacagatgcttttatttgcatttcagataatattgagaaaaagataaattatattaaagaatattattattattattattttttagatagcctttggtggggaaggatagtgattttgtagaagcaaaaggcttcccctatagcttttctcttctgctggagactcctagagataggttgaaagggacg

SEQ ID NO: 12519 - DNA, 6000 bp, Homo sapiens
aaaacacatgaaaaaatgctcaccatcactggccatcagagaaatgcaaatcaaaaccacaatgagataccatctcacaccagttagaatggtgatcattaaaaagtcaggaaacaacaggtgctggagaggatgtggagaaataggaacacttttacactgttggtgggactgtaaactagttcaaccattgtggaagtcagtgttgcgattcctcagggatctagaactagaaataccatttgccccagccatcccattactgggtatatacccaaaggactataaatcatgctgctataaagacacatgcacacgtatgtttattgcagcattattcacaatagcaaagacttggaaccaatccaaatgtccaacaattatagactggattaagaaaatgtggcacatatataccatggaatactatgcagccataaaaaatgatgagttcatgtcctttgtggggacatggatgaaattggaaatcatcattctcagtaaactatcgcaagaacaaaaaaccaaacaccgcatattctcactcataggtgggaattgaacaatgagaacacatggacacaggaaggggaacatcacactctggggactgttgtggggtggggggaggggggagggatagtattgggagatatacctaatgctagttgacgagttaatgggtgcagcgcaccagcatggcacatgtatacatatgtaactaacctgcacaatgtgcacatgtaccttaaaacttaaagtataataataataaaaaaaggagatatacctaatgtaaatgacgagttaataggtgcagcacaccaacatggcgcatgtatacatatgtaacaaacctgcacgttgtgcacatgtaccctagaacttaaagtataataaaaaaaagaaaaaaagttggtaaattttgtactgtaaatataaaaaattctatatagaagtccaaaaaattataaatcgggaaaatatttataacacttattgaagtcaaaagactcatttgcttaatttgcagaaagttcttatgtattagtaagaaacagatgaacaacttagtaaaaaaatgaggaaagacagtacacagaaagataaatacagatgcttaacaaacctctaagaagatgtttaatctcacttataattaaataaattaattatttggagcacaacatagaatgcatatatatatatctatctatcgatcgacctatatatatatataaatttaagaggtgaaagttggcagcatgggtaaaatttaaaatgaacacccattttgacacaattattttacttttaggaatttatcttgaggaaataatatcatagttgccaaaatatatatagacagaagtcttcactgtggcatctttgtaatagataaagattaggaagaggctaagtatccatcagtaaaagattggttaaattctggtaaatccacgcttcagaatattagtgtgtctgctaaaaagattcacatgatatatcaggtgaaaaaaatagttatgcagaataatatgcatagtataatcccaaattattttagaaagatatatgtgtacacacacacataatgtatctacatatattttttagtaatatatgtgaaacaacaacaaaacctggaaagagtcacctgaaaaattaacagtggttttcataggatttatcctaggattgaagtagattggttatcacagtagttatcagaggggtggggaagttgagattttttattttctgttcccctcttttcctagttaccacctgcttttcttcatctcagctgaaaacttcactctctctgccccagcaaggaaactttccctgatcctcagactatgccccttttttaaaaacgatattaacagaggttttttcctttacagtatttttctctctctctgtgtgtgtgtgtgtgtgtgtgtgtgtgtgtgtgtgtgtgtgtatgcgctcattttattaaggtcttatttccaccacgagagaagagtctgtgttgtttttgctcaccaatacattccccataagctcagcacttgtggccgctctccctatttcctctccttcccagtattatgatatggacaatttaattttcctcagtcttatataaagggttataaaagtgcacctttaggcatcccccaaatcatccatacacagatgaagaagaacacatgaaaaacaaacagcaaatgtcaggttgcactaaacaatgaaatactaaggacactcccattttcttcaagaataagatctggaggccctcaatcaccattatcattcaaactagttctgcaggttctggtcaatggaatacatgcagaaaataaaagaataaagaatataaatactggaaaagaagaaatgaaaaatcatcatttgcagatattatgcatgcatacctggaaaaaccaaaagtatcgatgaaaaaactattagaaataataagaatggtcactaaagataaatatatcataattaattactttacctgagacaaacaataaccaggtagaatgtgtaatcataatgggaatgtcattcatataaacaaaacacaaacataataagaaatgagtataaagaaacatcacatttattgaaaatctcaaaagttggcatggatagaaagactccatttttaaagatgtaaattctccaattaaagtgcagatttattgcaagtactgcagtaaatgtcaattgttttgttttgcatattgttcaacttggaacttgacacatccacatacatatactgtatatttgcaggaagaaaggtcgatatcattgaaagtgcttggtggtagaataggcattgcagggcagttttgcattctactctacagatttctgcacttaaaaaaataagtatataactagagacagagaagaggggagaggaatagactttctttttctttttctttttttttttgagatggagtcttgctctgttgcccaggctggagtgcaatggcacaatctcaactcactgcaacctatgcctcctgggttcaagcaattctccttcctcagcctcccaagtagctgggactacaggttcgtgccaccattcccggctaatttttgtatttttaataaagatggcgttttaccatgctggccaggctggtctcgaactcctgacctcaagtgatctgccagcttcagcctcccacagtgctgggaaggagtagattttctattgaggggatatatagctttttttcaggaaagtattaatagttcttagttattttttaaaagtcatacatgcctgtgagaatctgatgaaagctatggctcctttctccacgaaaatgaatatacgtatgaccacaattgcaggtggtccacaaggttgtccgtgtgagaatgcctactctgggttaatccatggggattgttccttaggcatacatttggctgagcgggcaccaaggtggatatggactggcaggcagtaactctgcaacaagattaggttctctttttaaggaagccagaggcaagaagcccagcggctgcacctctcaggtcaggtggtggcagcacacagtattaggagcaatgctcactcaggcaccatgaataagggcagaggggtaggtaggaacagaaagcccttcgatgcattgctgttacctctgtgggaatttggggaaggaagggaaggagccaaaggtatttactctgattggtcacctgagtaaacgtggcatttaccaccttggtcactcatctatatatatttttggagtgaacaatagatgggtgcctgaatacaggggatgagaggctatggaatgtggaagggtgggagggcagcaccttcttccgctcttgacagggcaggaaggattagaacatcgctgcatccctcacaccctcaggtgcctcagccttggtagactggaattcaattcagaggcaggtgatcagagtagccatcaaatcacaagaggttcatataacagtcggtcaagactttgggacgttaaatacatgcttttctttaatttaataagacagggttgtgttgctttaacttatcaaattgcaagttgattcaaaaatagaaaaagtaaggaattatttgtgtaaaatggccaagattagacaactggtcgtctctttgtggagtaattcatagatcatgtaaaaaaaatccattttttttaagagatagaggcttgctctctgtcacccaggctggagtgcagtggtgacatcatagctcactgcagccttaaactcctgggctccagcaatccacccacctcagcccacttttcaattttaaaatgagttattttgttttaaaagctactaattggctgtaaccagtagaaatattttcctactgttacaaataaaataacgaaattaatgaggccttttgggttttctctcccgtttaaactctccactcaaaggaaaatagcatcattttattttctcaatataaaagtaatgcgttactgatttaaaaacaaatgagcagaaaagtttaaataagacactcccacgatctatctccttttctaacatcttgctccacattttacaggggtgcagaagaaataggacattcatgacttgtgatggggggaggtatagagagagacagttggactgggactagagaagataaaaaattattcctcgaagagaagaaaaggccaacggacacgggagcagatacagcctctccctgtaaaccaaagaaaggcaaattcaccacaaagagaagctacttctagtctccggggttggcaaagaggaaaatgagtgacaggacctgatgtgtcagggaaggaaggggagggccggcttctgcggcgctgctgatgggagtggtaattggggtcctgatctcatggttgacgtggccctcacgtgagctggagccgacgcgtgcagacgtccttctaatcctagtcttcgtttggtccggttgcactcttcctatagcccagagggcgagagggcctgtggcctgggggaaggaggacgaggttctgcctggatcccagcaggtttgtgtgtggatgggcgttgccaggggatccctgcggcgcgggcagtgaaccgtggaggccgaagggggagcacagttcactttctccaaacccttgcagtatcccttgccctttctagaacaaaaatggtagaccttggggccggattccaggggcgaccccagactcgggcgtcgtgggacctttaacatccagggccttgaatcagggagggcggatattcggattcatgtcctgtgtgctggcccatctaccaagccagaatcttggggctgtgcgtctgacagtcataccccttttctttcagtaggacgctgtgccatttgggaacaaaggaatagtctgcctggaatccctgcaggtcagtgtaaagctggagctgtcccgcggcgcccagaaggactgggatgactgaggtccttgccttaacttgggccctttaccgactctcaagcaatcttcctgccattttttttttcttcagtaaaagaggatgtaacagtggctgcaggaaaagtgcttgtgattgcgggtagggtgcgttggggagaggaatagaagagatcggttggttttgtttttctcctcggattttccatatcccccctcgccccgccccgcttccagtggtttgaaaggggtgtggttttgctgggaaaatggccgaccgctggggctgcgggagggagtgagggccgggggcggggacgggggtaggggaacactaccaagcgacagggctggtgtcagcggagtccagagaagtgagggtagggtgagaaacaaaaaggtaaaatccattgacagccaggaccctgaattaggagaagtggatattgggactccccgaagtgcttttctgtccgctgagccttcagtttctgccttgttgcctgtgtctgcagatcttggggccggaggccagtcc

SEQ ID NO: 12520 - DNA, 6000 bp, Homo sapiens
cctgagtctacccttcatttacacttcttggggaattgtctcatcctttccttggctctgaaacttctgcagcccctttcttaaatttctacacttttccgtgttcagtctctacaccaacattgggtgagggggcagaaacggaagtccaggcagtggtgagattttaattagtattttgataacatttaagttatattttgtcctttcttttttattgacttgaactacactattttgtaatcggaaaaaaacaataaagcttttcccacttggagaagaaataattcaaatctttttttttttttacagatatatatatatataacataagcaagatttcccagttaataggaggcctcattgatttgatgaagttagtttgtatcaagttgaacatattttcttcggactgcacaggaaatagcagctttcaaacaacatattaaaatgtaaaaacacacccttagaaacaaaaccagttgtgctttcaacatgatttataaattgatggataaatgaatctataccgagaaggtcagtgttctaattttgaccattttaagtaagtgaactattgtccctttctttctcctggctgaactcatagtgttaggtgtcagatgactgagatcttcatagaagattgctgggtgactttcactctggcttcaaaggacagattttatgcagaccccaacttcagatgaatcttacatcttcagatgaactttacagattagtgactccacagattagcctgcctttcattcacagggctttatttacaatctattctgaagtttgtggtgcaacctataaatcttccagaaattagagaatttcctgttatcctattgatgaaaatgagacttgatagaggtaattttctttccatcatgacactgttggcgatctctctgttgtctgccattcatgtattttatgctaccctagcagtggtgagtgttcagcattttccagtggagatggtggtgagggtctgtgggtgactgggaatcagtgcaacacccctgatgtctgtgtcattttttcccctcacaagtggaagggcaatgcacaggatctcaagcagttgccagaaaaaaagaggacttttcatttcctgccttctattacaacttcattgagccaccagtacaagcccctcagaataatcccaaaactcagggaccaagtatgcagaagttagtcctcatgcatccacctgtccctgctgaggagtcatactctaaatatagacactccaggcaacctcttagaacattgaaatatgacaccccagagggaggggctccccagtgaggggctcctgtgtggaggaggccctttcaggaggcaagccagggagtcctagtgccttgctggtgaatattcagaagtcaatatgtcacaactttctggtcttccccttttatagtccaaactcaccaatatcacatcttatctctctaaatctttacctcatttttttttcatgaccctttattaacttcccctagacaagtgaattatacttatgaaggcttactaacagaactctcagattcaacagtccatcattcagtgtttggctgctaggtagttgtataagtggcttttgtttgttttgaatatatacattagaaaaaactaaggagtatgtaaagcttaataaagacagatgacttggtgtcacagacatggctttacaataagaactcactttcacaacacttagccaggcttcaaggacaaaaactttactcctacctctcctcagtagtataaaatatctccacccttttggtatattctccagttagtccgatgtataacttctcactaccattctcccagtatgccagacctttcctggtttgaatccactccctgtctaaaacttcctaaaaccccatggttataaaaaccctttcaattctcttacctctttgttcttctaatccacgattctatcaattcctacctggagactagcattaaaaaaaaaactactttgctctccattatacatctaccaagaaatatttacttaaggacatgttataaggctcacatacctttcaaaagtgagaaaggaaaatgcttaaagaagtcctcagacactactgttaaaagtttctgagtccgcaaaaaactactgtgaaaccactgccaaaacaaaacttttggcttaaatcagttcacatgtgatatgtaacttacaaagcacccagaaacaaaaaacgaccagcaaatggtgacactaatggaattgtggagggtgaaaaaaataaattatagaaggttgttatcttgaaaagttatattactttttgtattgtgtaattttggtattgtgtcttacttaaggttgtttggttgcaagcaacagagaacaagcctggttaacttaaggaggaaatgttgaagacaaggctcatctccgaggggtttaggtagaaggaattgatagacgtcttttcaggatgtcataagtccaccggttttcaggtttttatctctctaatgaagattgaaattttagtaaggcagcttttggttgttctgttttgagcacaatacccacccttttgctgaggaaaacaatagggtcagtaaaatgtaaaatgcacttcctttcttttcccagggagaaatttaaactgtttcagatgttgttgttgatttgcaggagcccttttatcactttgaaaattaaccttttgtttatctataacggtagtgctgggggcataatatgccacagagtatcttagttgtaatttccaccattaactaaacattagaaaggtatggttatgaaatggtgatgcacaaggttgtcctttgagccaaggccatctggcttctcccacaggattcccccaaggttgcgtctacagttcagggtctcttcctcagtattgcatgaccaaatcctgattttgtttgtatgctgagaagaattgcctctggatgcctcaaggaaagactcccattcatagagacttatatataaacagatctgaatgctcaaacctagggatctctgcattctctccccataagtagaccacaagggaagctgtttcaacaggagtgacaactgaataatttgccctcagaaatacaattgtcagggggtactggaggtttccgtcagtcttacctgcctattctttccctgtagacaagctactacttgggaaaccacaaccttagaaggttgtttggtgagcctgcaatcagagcaagggtatttgttcattttaagaagggggtttcagctgaggacgcatgaagtactattacacatcatgggcatgactctgccagagaaagtgaaatgttccattctccttagccaacactttttctcctccaggcagtgcttgggtgggaaataccaacactttcttctgactgtccttttcatatattcctatgcttgaataagcccctttgctacacatgatctttctctaaacacaggatcatatagttgatttggtttctgtttactaaataaatttcaatcacattctagtactgcctcccagaagttacacagatatgaattttcctgggggtttgcctgttctcaacttcctcagtctcttgatttactcccatattgtctgtgtattttaaaagttatactcaaataataaccttttattcaaactattagtgaatatctcactgaagaccctatgttctgaaaagctatattactttttgtattgttacctgtttttgtgttgtgctttagttaaggtggtttggttgcaagcaactgaaatcaaatctggttaacttaaataatgaggggatgtaattattttattccttttcctactttaaaaaaggtaaatcattgatgatgggtgaattattcagtttatcaaaccagtaagtaaaatagtttcatactaattgctaggtcccagtttcagccaattttgtcttggtctgtgttcctctaatacttatttcatttatagatgatattctctattttgcccaagcatattttgtaatgttctttttatgcacactcattttttcagtgtgcatgctttatctcacagatacctactgtgcacttatgttttctccttagttttttttttttctgcgttctggcttttgtgggtttaatgcctcctccttgctaatgggtgcaggtgaaagtctgtagctctcctattcagaagactggtctagtcagaagacttacgtattgccagacacactgattagctcactcagggctgtgctgtgtgctaggccccagaagacattaagattgctttgagtgaagtgtgtaacactctccaccaagtgagaaaatgtgggacttttggaggccatcacccaacatcattcttcagcctccactcatttttttctaaaatggaaatagctttatagtatttttttttctcataaaaagaatgcaggctgggggtgggggaggacggaacaaaaataacaaagtattaagaaagtaaaaaccacactctcattccagattttcttttctgatcgcttgttcctttcagatctgggactagatttcagaggaaatggtagactttcatagctcgggggaggggaggtggagggagaggctgctgtcccaggagcctagggaaggaagaggcaatttttcataaaagtacaagtggcccatagccccaggggaagatgccgtccctttctggtaatcggtggaagggaaacacaactacaaggtgatgagattatcgaagaagaaagagtaataaggcctggtgtgggggagggaaaggaggggggcgggccctcttctgccgcactgctggtgggaggggaaattggggacccgagttggtggatgacgtagccctcacgtgaccaagagctgacgtgtgcagaagtccttcttgtcctggtcgttgttcccgtctgagtaccagctccccactgccctgagggcgggccggcctgcggcggagggaaaaaggaagaggagaaggaaattgtcccgaatccctgcaggtcagtacctggaagattccataaagtcggggtgcttgagggcgtagggccgagaccgtcgcgggtactgaggcgcctccgtcgtctctcccactcgccgcccgctttccaagacatatgtcccgcttgcagcccatttcgatgctgcgaaacggtgagctgcggggtgtttggggaagagctcagagactgggaaatgggaatctgctgggagcctagggccgcaatccggaaagggagctgtggcctgggtgttggcccctagtccaccaggacagtgccggaggggaatggctggatatgggggcgggggtggtgagatgcaacgcgatatgtcagcagaaccccaagagaggtaataggggtgggaaacctctgacaaccaggcctccgaattagaaaagagttttgtgttctggggactagtccgtccaccaagcgctcagtggcggcagtttcccgtctttctgcctgtggctgtgtcttactgaccatggctctgtgtctagtgggtccaagcctctcccgggtggccagtctttctgtaggttgcggcacaacgccaggcaaaagaagaggaaggaatttaatcctaatcggtggaggtcgatttgagggtaagaccatctggggaccctaggagggacgggggtggcggcgggggtggggagaaggcagagaaggtaataatctaggtacatgtctgagtccgaatgtgtttcttgcactccccggactgtggcgaaatggcgtgctttgtgtgtctgtggttggggggaagtgggggaaatgacagcagggaaacctatcggatagtttgttcgtaatcctcctctctcaacagcacttactctccatgttttcgatctgtcatcctgcaggtctgctgtagcaggtggctccgcttgaagcgagggaggaagtttcctccgatcagtagaggtcggtgtgggc

SEQ ID NO: 12521 - DNA, 6000 bp, Homo sapiens
tggagcaagaagggtgaagaaacaactctgaattatggctctttaacttctacaacttctaccctgatgttggtcaaatcaatgttgatctagtataggggtcttctacgtgcctagttcctccccagcaaacctgaagcccattctatccttaacaaggttgcagcggcacctttatttgcacaccaaaaggaggtgaaagaccaggttggaaatgaagggccctggaaaatagactttggtgagaaagaagaaacaaatgaaagcccagccaacaaaagacactctgagaatagtttctctattctactcctcctgggttccactaccttggatctcacttttctcaaaagttttctagcatcataaagtaagtttcttaaagaacaagtatttttctttttttacactccccagctgtccaacagatcctgccatcatgctagttaattagggaacggaacgaatatttctgagaccagaatgttcaggtggatctggaaggttagtctttttgagaacccaaagtctctgccccaattctgacagtaatttctgaaccagctaccctggtcagctcagaacgctctcctcaaaactaagagacagacaagaggagtatctcagtgaacaggaaagagcagacaagcgcaataggaaaagggatgaagacaaagtgtggggcttcccaagagacttgaacacctctctgttgggccatatagtcgctagcccagtgcagcctatgactgttccaaccctctcgagaggtggggaacttgcggctttgccttcctctcacttcaaggaaacctgactaggccccacagggcagcacttgtggataggagaaactcaccatttgaatctgcagcaggagggacagaggacagagtaatggccaggctctgggtgggaggtggcagggggagaagtggtgcagattaagatgacaaatgccagaatctagcagcagtgttctgaatactctccactggagtattggaaaacagggaggctccagcaagggcagaaggtcatcctggccccaggaatgtggccaaaccttagtctcatgagaaatgggaaagtatggagaaaatatggactagggtagataagccatctttataagtacagccaccattggcaccatgcaatataggcccacatagctttgggactggtagttgaagttctgagtgggagatcaggaaggaactgtccaaacccctaatggagtctaactgagggagaaagcccacccaggaggaagcaggaggccagcagcaggactctatagctcccaccctattcacagagcctggtggatatcttctgaccatagcactttatagacaacccagtagaagatattgaagatgaggaaagtgaaagggaagacagcccgggagatggtgtcaattctcttggctcagtccacgtagagtttccgcgtggtttctccttcccttagaagaggggctggaggttggggactataaatgccagaaccttccattggacctccatctcttgcctgcaggcagtggcccaagccatagccacggaaatagaaacgactttcttggatgatatcttcctcctggaattacaaggaagaaacggcagaatttgaggtcaaagctcaaaggcagagggatagagaacagaccacccatcaatatctcatagggaatgttatgcagacaaggtgccttgggtacacaggcccattgcatgctttttatggtcacaacactactcatgagatagatgtatgctaagcagctctacgtgctatatatagtgtatgtcatgattccatggcagataggctctaagctacccatgtaaaatgcaaaacatcatttagagttatctaaaatccagtgaagtgccggccactgtgagaggacatctcaatgtcaagttatctctgactggtaataaacaaaacaacaaaactattagatagtgaagttgagatattcagtcttagtaaacttgactttaatgactttcaaaagcttcagaattcattccccttttgaatcgtatcttttaaaatttatctcaacttaaaactgaaaattccaaaagttttaaataacccaatgagttatccaaattaggataaacacatgcccagtgaggggtaaattttatataagcactaagtaatgcggcagactgccaaaagtccattttccaatagttagctgacaacctttagtagctaaacgcagctaggagccaggaagtagggacagaaagataaagttgagagagaaagagagcaagagagagcgagagagagagagagagagagagagagagaaccaaaacctctgagtgtcaatagagagagctttacttatatgaggccctcaggcccccattcacagcctatttagtcttattttatatgcaaccctaacaagcctaattttatttacttctaaaggacagggttgagaaatgcttccttcaaagatggtggtaatttcttaaagtattcatggttttagagtcaaagtttcaggtatctaagaaatcacctgaagtgcaatggcctcttggaggacgatgcaaactgtcatctcggtttgtccagaacggaaggtgttcctaagacttgggtctttcagggctgaaactggggaagtgcaaggcaaatcaggaagagctggtcatcctgtggctacctgaggtatttattataagttataagaaaaaaatatgtgtatattgtataggtatgacatagatatatacaaaatgtggataaagtagattttaaacactctgtctctctcagttagagggacaccacagggtctttatcgtgggacctctgcagctatggcaacacactgaaaagtggctttgccaggcacggtggctcacacctgtaatcccaacactttgagaggccgaagctggcggatcacgaagtcaggagttcgagaccagcctgaccaatatggtgaaacctcttctctactaaaaatacaaaaattagtcaggcgtggtggcgggcacctgtaatcccagctactcagtaggctgaggcaggagaatcgcttgaacccacgaggcggaggttgcagtgagcagagattgcgctattgcactctagcctgggtgacagagcgagactccatctcaaaaaaaaaaaaagaaaaagaaaaaaaaaaagaaaagtggctttgtgtatgagatgttggtgttgtaggtcctagtaacccttgataatgacatgactagaaactgacctgtcatcataaagacaggccttggttcacctcacatgtactctgtaattcatttttacactattctgacaaaggaggttgtgctggacccattttcgaggtgaagaaccagaggcaaacaaaatattttgcaataattttaaaatgaggggagtaagtaaaatggttttctcctttgatttccagttcagggtccctcagatgaccctgttgcccagtactcaccctgatcccctgagccctaccctggctagaggatgtaagcaaaggatgttggcaaaaaagctctgagggggaaagttggatccaactgctatttctgtttctatagatctaattattttcccttttctccaatcataataaatctaaagggagttatttggacacatttcccaggctggaaaaagccatttcacacaggagagaaaatatggccaacagagtaagctggtcttggctttttgtgactttaacatactgcacctgttgtagctggaggagcaaagatgaatggcttgaaatccaggggtggggcatcctgcatttgggtattctctatttaggccaaattctgaggggtgtttgtgtgtggggtgtgtgtgtgtgtgtgtgtgtgctggaaaggaacattggagccttaaataccactttgtggcttacatgcctattaaaatagaactttttttcccctggctatctataggggagaaggactgagaagctagagagggaagatatctcaaaaccacgctaaggagggaatgcacagtgtaggaggtaaagtgtggagatgggaaagagtgatttgtattgaagtgagaggggctagaaaaaaagggattagagaatggggaatgaagagggtgctggaggatgaagagaggtgggcagggttctgggaccaagcccttgagaggactgggcagtattttgaaatttcttccagttatcaagttattctattgatcatggcaaagcttttgctctgtccagtttgaaagacagtcctctccaatcagcctgtaaaagttggtgagctgggttacatgactgctgtgtccagagcctggtgctaaggcctgctgaggagatgaaaaagagcttccctttcctggggaagcttatggactagccgggaagacagtgtaggattgcatgggtaaaaagtaaaccactttaggcagtgacatgaaagggggccaccatgctatggagttgttggttgaggagagagttgagaagaaaagatgtgaatggctggctggttcctagaacactcctaactgactcttggctaagggttccctggagatcacatggattttctccctgccctctcagactgaagaattctttttccctagctggagcagtagggcccggacagaggttctagaaatggatgaactctccaacaattttttcagcctgcttggtgcctccaaaatacctgctacaggtcctgggataacagtgactttagaagactcaaaaaaggacatgacgaatggcacgggtttgattttcagttttattcacgttaataataataataattcacgttaaaaaaagcctcagcccacttttaggcaggccccagagtcctaagcaaggcccaggctgctgttgtaactttgtaataattgagcactggtcatgacagactccattatgagctcaggatcagcctatatatatgagcaggaggggacaggctgcaggcagttgcgggttgcaggagttcaggaaaggaggtgggactagagtcaacctggaatagctctacagtaacaatggcagcctttttgttgctgggacatccatacaggcaacttagctggtgaaaggactctggattggttggcagtctgcttttttttttccaaggtaggcattgagaaggcaccaagatcaaaactcctataaagataagatcttggtacctgcaggcagatttgttcgacacagctaaagagggggtggggacagttagcttagaaaatggagtgtcctggccgggcgcgggggctcacgcctgtaatctcagcactttgcgaggccgaggcgggcggatcacgaggtcaggatatcgagaccatcctggctaacacggtgaaaccctgtctctactaaaaatacagaaaattagccgggcgtggtggcgggcgcctgtagtcccagctactcaggaggctgacgcaggagaatggcgtgaacccgggaggcggagcttgcagtgagcccagatcacgccactgcactacagcctgggcgacagagcgagactccgtctcaaaaaaaaaaaaaaaaagaaaaaagaaaatggagtgtccttttttcttgcccttctgctaggtgtatacacatatttttctaacccttggtatgggttaggaaatgcttttaggtttcttgaagaatgagtcctactcgaggacatgtagttgtggattagtccactagagggcgtactgcccagggaccaactaaaggactaaagggtagggactgataaattcaaaccactagatgagacaggagccctgccctcagcagaaaggaaccttagcaagggacatgaaaccaaggaggtagtttgtgagatatttttagtgcggacatacggtaggggtgcccctggagcagctgaggtgggaggtggtgtgttgaggagagaacattccttgtgctagtgtggcccagacaagctagagtcagg

SEQ ID NO: 12522 - DNA, 6000 bp, Homo sapiens
aatacaaggcattcagttaaattagactttcagacaaacaatgagcaatttctcagtataagtatgacccatccagtatttcggatatacttaaatgattattcattgtttatctgaaagtcaaatttaattgagttgagcatcatgtattttatctgacaaccctacttgcctgggcgtgatatttcaaagagcagaggaatggggggctttggggacttcccatttagtgatttcagcaaggggaacctaacacctgcttttgttgttggcagcccttgaggcaactgcttcaagcacaatgcttaaggcagtgttccagtgctggtgtaggctgaccaacttgttttggttttcccaggccgtacccatttttagcactgaaagtcccacatcttgggatctcttcgttcctggcaaaccgggatgattggtgattggtcaccctagtgatagacatacccagaggtgctggtggagatgttagaagacaacaaatacacaaagaaactgctaggtgtgtctcaaagagtctcaacatttcttcaaagcacatatccttggctccattttaaagataggcaggttcaggggaagtataggaatcctggatctgaaaggtgttggttctagagatcactaaagttcagcctctattttttaaatgcttatcaaacatttgcagagatactctgtcaccccatctggtgattattattattattgttattatacttgagcataggcactatggtaagaattttatgttcagtatcttgtgtaatctttttttttttttttttttgagatctgtcggagcgcagtggcaccatctcgcctcactgtaacctctgccttccaggttcaagcacttcttgtgcctcaacctcccgagcagctggaattacaggcatgcaccaccatgcctggctaatttttatagttttagtagagacagggtttcaccatgttgactagttactgactaatttggaaccccactgatcctacaaactgccggaagtttgcctctgccctgggtttcaaatagcggcctcctacttaacctgagaagtgtagaaggttgaaaacttgggctacagcagcccgaagcctgtccatcctcccccagcccccggctgttgttgctcagggcaaaggctctctattcacacattttttcacagcagaacaacctcccaagcaacttccaagcaataagagtctggagacaggcattctctagagatggctctggtctttgcttgctaggtgccattgggaaaattgtctcagtatcccatcagtcaaattgaacaaataacattggttccccagaaataatactagttttatttctactttgctcagaaatcacatcaaacaagcatcctccctgcaggggcaaccctgcaaaagctggccaagtttttatgttggtggaggtgggttctgtggacagcttgtttcttcacattgctagtagctatgtggtgctcctcaggcattctttagctgagatttttcatgtgattattttggcttccaggctactctttactccatcccaagccacgggcatctccccctcacaaatacaccccatggcctgcccctatccatcctcccattgttccttgaaaccttcaggaaaggcagaagatcaccctccactctctacccctgtctgccagctcaaagtatgtgacatctctggccctcagccctcggttctcttggccagaaaggcatagtctagccaatcggcatgaagttgggtgtggaaagttctagccacagtacataggacataatatactgcctgcctgccagccagccagtcttctatgccagggctaggaaagctgccttccaaaatttggtctgggaagacattatcctgggaatgagaagcaaagcctcagctctagaagcccaaataatagcagatgacccaggctttcactggtacgcgcttctctcttcccctttatgttcttctctgtgctcagggagaagttggccactagattgggcacttgatcccttatctagtttttcctgggagaaattcactggacttctctgagttttagagttcagtctacacaatgaagcaaggagaacccacttgatctgtggccttcaataatctgatactatgggatcatagagcagagagtggaggtaatattcaagtgttttcgagttatttgcaagaaagctgcacagtcaaaccaagccatgatcaagggggcccagattctctgaggtaccatcagaattgcatgaagcaaactgtttacgagttttatacaatcctgcattgttcccacaggcacccagtacaggcagcaggctgcaccaagaaggctggcagtgcctcttgaggaatcccttggcagtgcaggagcctagctggactcaagaatattttgccaagggcacccagcagaaccaatggaagcagaatcacagaaataggtgggggtatgtagataaaaatgggctctggaggacctggaagataccctatgaggtctgtagggagccctcaggaaaggtctgctgacgaggtactgaggcagagtgtcgggatgtacagagcaatgagaacacactagattctagggagttgggaaccttaaggcactgggatgagtgagacacggtcacctggctgggtcccttttctggccctgggcataagaacaagcataagaacaaggcgaagacagggaatgtggagagagaaaaaggaaacagagacagacacatagagagaaacagagacagagacaggtaacagagacaaagagattgagacttggggagaggatagaatgaatattaaggcaatggagatggaagaaaggagaagagaaatgtgtgttaagggaatgtggttgataaattggtatctgtgggtttattgggaacacatattttctttccagtagagttgctgtccccagagctgctgctgagaactcaggggaagctttgtgagagggctcagtctgagtgatgtcccctgtgtggagagctgtctcatctattcgagctgtgaaggatcatttgcctcatcctctaaatctgaactcccaaagtttgggctcactcctgccatctgatgagctgaggagacacatttggcgatttcttgctcttggtcctcccccttctccagggccattccgacagtgaccatccagaagtttattgctggctcaatcctacagttgagcttccaaagcaggcatagtctgtggctggcgagcagggctggggagggcgaggggctctaggacccttttccatcagtcacatggccttagtctcgtctgctctggaaagctactattataccgttttgcaaggggcagcatttccagagatccttttttcttggggctgatacaagagcaaaggatctagagttctagtactctaagcaagcctcaaacggtgcaggatttggccccagtgggcccacaggggcatctgccaaagactcgtccatttcctaacagcagagcccaagccagtaacatgtccaaagtcacagcccaaagagaaaactgtaagacacaatcttgcctttctcccaccccaggaaggtactagtctctgctcagtatctccctcctcttctctcctctcccaaggcaaaatcacaggaaaagttccaggagaccataccttccttctccggagtcttccaacaggtgcccctcttattatatgccagccagttgttttaaaggccatccatgggaggacaccggcctctaggtcaagggagctgtgaagggagacaggactgacaaggagcccagacagacactgtttaagattcacctgttctagaaaaccttcccaggctgatcccatctagcagtgggcatttaaataccttcacagtctttagaaatagcttattgctaaggcaggttttatatagtatttccctgtttttgctgcttagccatttttgtcttaccgcttctttctctgtggcaaggactatatttcgtttcttctctccaccctcactgccacctgctgcttcactctaacccactccctgcctcttgtctgcctggcttaagctctctgatgaagatattacactctcaggatagaatactgactacctgattcccagatcgtgttcttgacttgtctcgaagtcgattatccttcttggaaatcacccacatcttcaacgctggccttttctttaacctagtctgtgaacttgcataggtcttgcccacttctgggtctttattattgtagctataaaattattacaattctagcctcccccagcctaatcacaatctgttcatcgaattgacagcctgcattttgtcttcatgcagttgaaactgagaaggatttggaggaaattatcttaaaagacaattttttcttctctattgtgttcgtagagctgggggtgggggtgggggaggaacgcttattttccaaggaatcgggaggggaaaggtggagagggccaagggcagctaggagtgatgtggggagctggagcagattcggaaggactttgggagctaatatctaggtttttgactctgagcccctgttggggctctcacttcatggcttctcacgcttgtgctgcatatcccacaccaattagacccaaggatcagttggaagtttccaggacatcttcattttatttccaccctcaatccacatttccagatgtctctgcagcaaagcgaaattccaggcaagccttagggaaaaaaggaaaaacaaagaaaatgaaacaattggcagtgaaaggcagaaagagaagatggagcccttagagaagggagtatccctgagtaggtggggaaaaggggaggagaagggaggaggagaggaggaggaaagcaggcctgtccctttaagggggttggctgtcaatcagaaagcccttttcattgcaggagaagaggacaaagatactcagagagaaaaagtaaaagaccgaagaaggaggctggagagaccaggatccttccagctgaacaaagtcagccacaaagcagactagccagccggctacaattggagtcagagtcccaaagacatgggtaagtttcaaaaactttagcattgaagattcaagaggacacaggaattcacaagagaatttccaactttggggttcgggggttccatggtttaaatgagtcgtgttttggcacttgttttctttttaaattccttaacattcagttagattaactccttctccgctgtactaagcatgatgctttattaccaaagaattccagcagcacgtggagagtcccacagatctctggagagagtgcccagctggatggatgtggtcatgtgtcctcctaccccctcacttccctctatcttctcttttcccttggttccaaggccctggcaacggttgggtcagcttgccctcctggttctgctggaggccactgagcactgtctagccctcagatgtacaaaataactgcttgcttgatgcaaactttgaaccatgtttggcattaataggaagctggggatcgggcaagctggactcaggcttggctatggctgaggaggccattctcaggttcaggaaatgaaagtaaagtcctcaatggcttgaccatgggaaacagatatgggtaggagtgtgtgtgtgtatgtgcatatgtgcatgtgtgtgcacatatagggttgatcatttctagcaaatatcacagacacagctttcctgaaggctctttgctgtgacaaggaggatgctgggacattagggctcttgctaagttggctgagtattgagggcttttctaggttccgtgaacaaagacagaagctatgaagttctggtggtagtttctactcagagtaatgtgtgcagagcacaagggtctttgtccctattggactccacagagtcctgtagacattgctaacatttggcaaaacaaagatagc

SEQ ID NO: 12523 - DNA, 6000 bp, Homo sapiens
catattattcttctcctcaacttttttttacacaaatagaagcatcctatgcatgttgttctgcaacctgtgcttctcctttaacactacaccttgcaggtacttctatatcagtacatagagtttcctcatttatttttcaagctgaatagcacttcatcatatggatgtttcatagttcatttaatcaatgtcctaatgatagataactaagttgctttttgatcaaagcaagcatttgttaaatggaaagtaacagatgcacatagtgaatatttctaagtgtaaagtgaattgtcttagttattcgtgcagtaatgctttgtaacaaccccctcctcccaacacaaggtataagtggcacataacaataaatatttatatttcttgctcacaggtctgtaagtcctttggggtttaactgagctcatttgggcttggcctaaagctatgggttgctttctgatgtgcaccaatatctcatcattctccttggacctggagctatccaggactattggtggatggcaaaagtacgagaggccaagctgctaacatcaagtctgctaatatttctttggtcaactctagtggagtgggaggtattcaaagtctcaagttaaagagtgtaaatatacaattttttcatagtgatggtgtgaagaactagaaacaataatctaatgtcccacataatacataatgaaacataaattggcctctcactcccacattgccaatcacctccccttccaacaaacaaccattattatcagtttcttgagtattcacccagaaatacctttgtatatatgagtatgtatatatctacaattttaatagatgttgtcactttgctctccagtgtggttgcactagttgacattctagataactgaatgagaatgtctatttcttcacatgctttcctacattgtatgctatcaaatatttattctttgccattatggtctaggttgcagttacttctcaatttatgtgtgcccatttgcattgtttaaacatgtagtatctattcatgtcatttgcctatttttctattgggttgattttgttttccccaattgatttgtaagaaccctttatataattttccctttgtttaaggaatttcagtttttctctcaatttataatttgccttttgaccttgtgtatggtgtttttttctttgcagaaatttgtacatagtaaaaagtatcaatctttttctttttggcttatggattttgagttttgcttagaaaattgttctccacctgtggaagtccactccttgagattctgatttaacagatctgaggcattgtcccaggagtctttaacaagatgctaaaccagtaattttggccatcagcctggtctaggaacatggatgatataaaatcaagtatgtaaggtacctggcatgcagtagacacagaataactgtttgtagtctggtctctccccttcctatcctaagaggctactttgagatttaccttgtgcagagagaataaagctcagcatactttttatttacttttttttttttgcaaagctatttatcccaattgataacatttttaaaaagtttggcctttctaaatggttaccagctcttctcaccattaatcatgagaatatatcaagtgcccaagatttggcaaactatgtaaagttctgttcttaatattattaggaagatgatatactaactctactctagtgggccatgggaattgatgtatttcttcagaagcagtaattatttcatgtaacctagggcatttttgccaaaaaggccatctgtaggtaggggcactaaccataatttgatcaaacttggtcatgaaatagattgggtctaattgccctaagcagatatgaccctggccttgttcttggtgcttatcatatgacaagatttcattattagcaattgggataattacactcactgcttcttttcctttcctgggctaggcagaattgaaagattttcttgaaaagccttctcaagtgttaatgtgcatacaaagttacctggggatcttgttaaagtgcagattctggaacagtaggtctggggtggggcctgagactgcatttctatcaaggtcacaagtgctgctggtccatggaaaacactttgagaaacaaggtgctagaccatgaggtctcacccagtcttttctaaaagttcactggttccttcctcattttcttggcatcttattcctctttggattctttatgcttactttcctgaactcctttaagatcacttttaaaaccataaaacagactggtatgattggccaaacaagcagctctctttgatgaataccaagagcccatcccccatccagaaaaaaaaatccattgatctaccatggtgcgttaagtttccaattctcgggagtcttcttaaagtttctggtgaagggtgatgtaacccaggaaagtttagtcatactagtcaggcattaatcagactggagcaccaaccatcctcagcagacagagtactgaaaaaatggtaggtacacaaaggagtaagttttgatagggtaggaggtacagaacttgatacataaaagcactgggtattagagtgaaattgggtcaaattggttgtatgtgccactgcattccagtctaggtgacagagcgagaccctagatatagaaagatgatgaaacgagaaaccaacaggacaggaagaggtttgtttttattttaaatgtattgtctacttgatgatttgcctagggatcttattggctaggatcctgaatgagctcccctcactctgactgctggctccttaacaccccaatgtaagtgaagggtcccgtggcttgatcaaatggtctcatccatggacagccctgctggtcagctaaggcccagggtccgggggctagtgccatgctaaaggccagactggaggtgccagggatccaaccagaaaggaaagacttgaccaggtggtgtccttccaccaaggggccaccccgtgttgctgcctgccgtacccagctggttggaagcacctggcagttggcattgaggaccactaacagtaaagtaggtgcggagggggttggcgggaggtggtagtgaaggttgcacagggccagccggctagcgtagggaagtttgcatgagctccgtaggcaaggagaaatggaaaattggctggctatctcccttcaaaagaattggctgttaaaaaaaaaaaaaaagaaaaaaggaaaaacagaagcagaaacggcaggacatcttctgttttaaaaatacagaccattttccccctcccatgtatataaacaacgaaaaccaggagggtagcttggtattggttcccgcccgaaggtcctttcctttcacacccgacctctctagatccccgacttaaccccgattgaagaagaaattttccaggatgggggtggggttttgctggatttgtcgaaagagatggtccacaggggaagagtgcataaacttggcgagaggcgagagagggagaataaccttaatcatgcacaggctccggccttaacagttgagtgggtggtggaccgaggccaagcggccaaataagtggagtagaaaggcgcgagtctgcgctgcgtgccacgtaccaaacgctcaattctccctcctgggccctgtatccatctctcgttcgctctctgtggctaatgcagagcgatggaacagcctcgggagaatagctggagaaagctcagagaaagacaaattaaaaggagctcagcgcagcagcaaatgctggagaacagcgctcagctgacccgttaaatgagtaattcggtaaaggtgtgttaatcagtgcggcgccccgagagcccagcgaaacactctgggaagatacctggcgtggcaacgggactcttcaacgctgcgatctagaaacgctgctagtcctgggtcgtagtccctctcccctgtctcgcttaaagagaggggttcctgggttgcaatacgttggagagcaggtgatcagatgcatggttggcgagcccctggcgcatggcagaatgattgaggccagggtcctagctgcaagcccatccctgcgtcccagtacattacctgcctgccccatgactggcggggctggagaaccctgagacttaaggatcttataggtggcaggggtggaaaagaagagttctctccggtcctggaaagctctaattgtcagaaaaactaggtggtttgcgtctttaaaagcaagttccagtctgcggggaaccaagcaggtgaactcctgactgaactagatacctgttcagcggctagaactggagactgggagagctggaaaacttttagtggctttccatacctgcactcagttgagcgctcgccccaatcctgtacgccggcctactctggtaaggacgctagacggcgctgccgggacacgctttccttctccggagaaaggtaagagagcgctttttttttttttttaaaccaggggatgggggacttggggttggcagcctttctcaatctgcctcccctccccgcgctcccaaatctaaaggggtgtggaagaggaggaggagcagaagcagctcttttcgtgacgcgccagagcgcttctctctaattcccacctcctccccggtgcaatcagtcagccaggaggctccaaactgttagcgacaaaaacgcagctctcggtcactcccactaccctcccacccgcactccaggcatattttggaggcggcagcagcggtggcaggatgtgaggcgagcctggagctcatttccaggcgcccttccctcttcggaactaagggagacttgtgggcttttgcacactggctgtagggttcccgggaaagactggagcagcgaacaggagggagagaggtggacaggcagagtctgcacctgccgcctgcacctccgttagggcgacagggcagctggtgtttcgctcctggagtgtgcctacctcgcaaggggggcgagggccacaggctgaggcgcccgcgtcccggagtgcaccgcttggccgaggcaaggtgttgctggggcaaggctgctccgaagcgaagtcgcgcaaaaggaagagtctgggaggcaggcgacttaggagagtctagtcactgagagacagaggcagcatctgccattctaactacggagctgagtaatttagaaaccctccttaactctccctttccagctctccccaaagtccacagaagctctgctgaactctagaaatcttccctggctggggggaagtttactagtatcctctttggctaagacagggagtggaaaaaacaggcggggctgtactgtccgctgtttggggagacgcggtcttcctcgcgcccccttcagccactccgactgcctgggaagtcccagcccgcgctctccggaacccggctcgccgtctcgccctggacatggaactacgcatctgagacctgctggacgttttgctggccgttttgcaagactcaggtaatgtccactcgcagagctggagagttgactggcaagggccaggggagaacgcgctgcgctctcagttggcagcggggcaggccgcagccaatggaggctttatctttcctgcagctctggtctccgcgcctggaaatttgccagttggctttctcttcctttagccttcccagaaagtttagggaatagagctccgaaggccaggggctcttcgcctgggaggagcgtgcgccgtccttcaggtgcccgcgagcccaagcgttgcgtttccgcggcgggatcttcatgctctctgcggctggcgcgcgggctctgcagcctggaaggcaatttccaactgggcgcttctgactgcccacatttctgccgcagctgggagagcaactggagctgggaagaggctcaaggcggctcctgggtggagcagcgaggggttccccagcaatacgctgccgctcctgggatt

SEQ ID NO: 12524 - DNA, 6000 bp, Homo sapiens
agacggggtttcactatgttggccaggctggtctcaaactcctgacctcgtgatctgcccgcctcggcctcccaaagtgctgggattataggcgtaagccaccgcacccggctgagctcctgaagatttttaagcatggcaaagcgtgaggtgaaagtcacaatttgatttcaactttacaaagatctttgactactgggtaggtaattcattattgcaggattggggcagaagtggaattagagagatcaatttgaggtgtctatgagattttcaaatagacaagaaacgatggttgcatagtctgaactatggtttagggcagtggcgacagaaagaagtagatggattcacagtctatttttgaaggcagacctgatggtacattataattaattatatgtcaacaagaggtgaaaaagcaaggatgactggcttgggttattaactcagtgacagccccactgaggtaaggaacactgcatgaggagcagtttgggcatggggagcaaaaagggcagatgattccagctttgcaaatgttgaatttgaggccattaaaacattcaggtagggccattccaagtaatagttaactacacaaatcttgagttcaggagagaaatctgtggcagagatatgaattcaggagtcactggcatggagacagagaggatgagataacccatgaagaatgtgaaggataagaagagccatctagaagtcgagatgaaaccctgaggaggctagaggggcagagatggatagttagacttaaagagtgagcagaagaagaggaacttataagggaaaactagaagaatcattttgagaagtagttaaaatggagtggtgttacagaaaacaagggagaagatagttttatgaaggagagagacaaggtgagatgacagagatatgatcattgaattttggatcaagaaaagagttgataactttggtgagaatattttcagtggagggctaatggtggaagccagactgcagagggctgagcagtgagtgggagggtgaagaagtggagacatcaataatgaatggcttgtttaaggatcttggctgcaaagagaatgatcaagataggagtaatagctgcacagggaggaggtagagtagggagctcaaaaagtagtagtaaatgtttgaagcagtcatcagaagggtgcttaccagggagaagtagaaggatttccaagcagcactgaaggcctcaatgagatacatagtcatgatcaggacaggtacaattgtgccaaggttagcaataagaaaccaatgtcaagaaagacttgctaatgagtgacagaggtgagattcaaactatgtttctctcccttcatcaaatgtttatcggctcctgctctgcactgctttgcatcaacactggcattggtgtttccaatgctgatgaatcgtattgactatcaatcatgtgcccaatgctgtggaagcatgatagacatttaatatatattttttcacccttaaattgtttagaatttggttgaggagacaaaatattccacaaatgcatatatattataaatatatataatatacattatatatatacatagtgaagctctgctgtctctctctccccccttacctctttcttcctctgatcccccatctctctctttcttctttcccaacgttgggcagcacttcaatgacccttacactgaagcgttattgactcatttggaaagtccctatattttagtcatatggagcccctcaaacctctttgccaacttcattcatttattaagaagacagtttttgaattgctgctctggataaagcagtatgtaaggcacatgagatacagagatacataagatatagtcttgccctcaagtagctcacaggctaatagggaagaatgagggtttaaacaggaaattgcaacataatgcaaaatgtactatctctgcctcagtttcttcatctatacaatagggattattagtgcctaccacaaaaaaacctgtgacgactaaataagttagcatgtaaaaagtgcttataatggtcccataagaaacactacataagtgttgctattattattattactatgatggaagtaaacacaagatactgtaagaatagacaggaggggtacttgacccaggctagagtaagagacatctgtgctgaatcctaaaagatgagaaggcactaaacagaggaagaagaatacataacactctgcatagaatattctgttctatttctatttgggagcaaaagaccacatggcatgattgaagaactggaagtaatttaattccacaatagtacagactatgaggagggaaatggcaagagatgaagcttgagaggtcatggggtaaaccaagcaagtttggactttactttttagcaaatggggagccactggaatgctttatgtagagtagtgactcgatcagattaatgtgttgaaagatcaccttggcaatgatgtggagaatgaattgggagaaagacaagttagaaagctgttgctataatccaggtgaaagagaatgatgaggtcgtgcatggtggctcacacctgtaatcccagcattttgggaggctgaggtgggcggatcacttgcagtcaggagttggagatcagcctggccagcatggcaaaaccctgtctctactaaaaatacaaaattagctgggcgtggtggcgtgcacctgtagtcccagctactcaggaagctgaggcacaagaatcacttgaacctgggaggtggagattgcagtgagctaagatcacgccaccccactccaggctgggcaacaaaagcaaaattcggtctcaaaaaaagaatggtgaaactgaactagggaagtagcagtggaaatggagagaaaggaaccatggatttgaggtatattcataaggtagaactggtgggacatagggactataggatgcaggaggtaagtagaagaaaggtgctaaagatcactttccggattttggtctggcacaagtggatggatagaggtatcattcagtgaacacagggaacacagggaagaactgtttggggaaagctgcatgggggatgtgatgagttcacttttggacatgtcaaattcgagatgtctatgagatttccctgtggagattctgactaggtgattgctctgccagtcttgaagctcagaagggtctatcctggaaattcagatttgggagggtcagtggatgggtagtagattaagttatgggggcaagatgagtttgctcagggacagagtgttaattgagaaaaggatggacttctgaggaatactcacatttaagagatgagtagggaaagagaaatcttgaagaaggctaaaatggaatagccagattgtggtgggttgaaaaattagtgggttagttcgggcacggtggctcatgcctgtaatcctagcactttgggaggctgaggcaggtggatcacttgagcttaggagttcaagaccagtgtgggcaacatggcaaaacctggtctctacaaaaaatacacacacacacacacaactagccaggtgtggtgatgcgctcctgtagtcccagctacttgtggggctgaggcaggaggatcacacacacacacacacacacacacacacacacacacacaactagccaggtgtggtgatgcgctcctgtagtcccagctacttgtggggctgaggcaggaggatcacacacacacacacacacacacacacacacacacacacaaactagccaggtgtggtgatgcgctcctgtagtcccagctacttgtggggctgaggcaggaggatcacttgagcccaggaggtcgaggctgcaatgagccgagatcatgccactgcactccagcctgggtgccaaagtgagaacctgtctcaaaaagaaagaaagaaaaattagtggatcagagggtcttgtagagaatggggaggtgtgcccttgacccttagtgtcctgaatcttggcaacaccgagggctccttgaacacggcaaaatcttatatggctctgagattccaaagcattgactcagatacctgcctcatgcaaagccctatattctagagcagtttccctttcctctgtggcagactcttgtcccccctaacagatggcccagggaatttcagggccccctctcagtcctggaacccttgttccagagtgctccctcatcatccaagaggctgatgatgggagcatctattaggagactggacaggaaatgtctgggcatgttatacatgcaggaggccttagactaggctgcagagggggatttgggcatggctgggaggatctgaactctcagagtatggacagaaggctttgctgcccacccccatctaccctggagtagattttcaccatgggcagaatgatccagggctaggccactactctctaggcccctggagattcaagaggcctctaacaaactggagtccaagactacattctaggatctgttcctcctgatgtagtctgcagtttggcctcagtctgcaattgaggggccctatggcactgttgcttggcaatgtattaaacagcaggccttggagactagcacttgagttaacacagccaccacaaccaccactgccatcatcaccttcccggaaagcagccacctgtctggctcctggctttgtccagctgccaacctaaggcatgtgcctacgcaggaggcgatgacattttggctccacgttcaaagttgttttttttttcctttctcatgtgttatttctaaagataacaaaggtcaaaaggcatccagcgttttctggtttctcataagcttctggtcaatatttaatctggtttatggattttttttaggtcttctagatgccttcttgaggctgcttgtggccacccacagacacttgtaaggaggagagaagtcagcctggcagagagactctgaaatgagggattagaggtgttcaaggagcaagagcttcagcctgaagacaagggagcagtccctgaagacgcttctactgagaggtctgccatggcctctcttggcctccaacttgtgggctacatcctaggccttctggggcttttgggcacactggttgccatgctgctccccagctggaaaacaagttcttatgtcggtgccagcattgtgacagcagttggcttctccaagggcctctggatggaatgtgccacacacagcacaggcatcacccagtgtgacatctatagcacccttctgggcctgcccgctgacatccaggctgcccaggccatgatggtgacatccagtgcaatctcctccctggcctgcattatctctgtggtgggcatgagatgcacagtcttctgccaggaatcccgagccaaagacagagtggcggtagcaggtggagtctttttcatccttggaggcctcctgggattcattcctgttgcctggaatcttcatgggatcctacgggacttctactcaccactggtgcctgacagcatgaaatttgagattggagaggctctttacttgggcattatttcttccctgttctccctgatagctggaatcatcctctgcttttcctgctcatcccagagaaatcgctccaactactacgatgcctaccaagcccaacctcttgccacaaggagctctccaaggcctggtcaacctcccaaagtcaagagtgagttcaattcctacagcctgacagggtatgtgtgaagaaccaggggccagagctggggggtggctgggtctgtgaaaaacagtggacagcaccccgagggccacaggtgagggacactaccactggatcgtgtcagaaggtgctgctgaggatagactgactttggccattggattgagcaaaggcagaaatgggggctagtgtaacagcatgcaggttgaattgccaaggatgctcgccatgccagcctttctgttttcctcaccttgctgc

SEQ ID NO: 12525 - DNA, 6000 bp, Homo sapiens
ttgactctttttatgaaagttgcaaaagctcaatataaaattatgtttcccagcaaccagatcacactgaaggcttgttgatcttgatgtcaactaaaatcaataagtattttttcaccaaatgttcccagcttcggtgacctaaatttgtgcagagaagtttgatactcaaattgagcatctcacatttattactatttattactattaagtttcatcttggtcggttcaaactgtcatgatctttttgcatgaagggccaatttggtaaaacatcttttacatttgtattcaggtcattgaaaaattcgagttttagaagtccagcccttcttgaccattcatcttaacctcttgcataacaacaatggtagttatcattgttgcttatattctttgtgcgaagtattaggatagttgtggaaaaaaggagaagagaagcttatggttaaatgcttcctcctgagatccttataatttggttgagggaatagttcttacaaaaagaaaagaagggattcggtagcaatgagtgatgttgtgactcatttgaaataatgtaatgatattgatttacagaccagagaaaccaagcccattactttactttagacataactccgaaacaaggaaatgtttggttgcatggttatagctctaattattacagaaatgggaagtagaaatcataatggtctgaaagagtcagagtaagatatatgggtagcaagactactgggcttcagcgaccagtagtcttgagctaagaatgaacaagaaatcactgtagtcctggactttcaatctcagtttaatttaaataaaaggtcctaattgccatctttgttatcctaaactggaagagtgaaatgcatgcctataatacaaaatgcattcgtcataacacgaatgcgctccaagacaacacatatttccctacagaactgatgtcaaagtagctcctagctctttctcctttttgaggctacaagattccattcccaatccctattcaaacttgcatgcatgttgctattttttcaaacatatacttggttactggaaactacacaaaatacatattgtattactagaaggatgttagataaaattaattaaatacggttttttgcataaaagaaataagcacagatttttaattgtgatatacctttttttttccttagacgtggcagaaatatgtgatgggaacttccaactccccctcccaaaaagcttccagtctttttctcttcccttcaatgggaacttccaactccccctcccaaaaggcttccagtatttttctcttctcttcaatgagagcgtcagagaaccagtgttgattgttgtttttctctaaaacagaagatctttccaaacagaagtttcacttacagagactgacacgatcagagactgccccctgccttcctacacagcacacagagttctactgcgttatttttttattaaaaataatcctaccaactttaaaaagactgtgtataataagctatctatgtctaagatttttttctaagtctatgaccatgtttgaggcacagtaagggaaaagtcaattgtgttcgatgtcataaaagtttatttctaggtgtggcatgcctcaacgatggacattatggatctgatgctgggtttttacgattaagtagtaatagcgaatgctgaaaatataatttgatacaattgtattactaccaaaaacatatctggctatgataatttgctttaaaactgaaaaaatatgggtagaagtattatcaaaattccttgcatttatgtcctgtggtaaataagaaaaaaaaaaaaaactcccggtagaattcttgtgtagcttcttttgatctgtgaaaatacctgccttcgagaattttgctagaatcctgtcactcattttttaaacctgtctgtcatcctttaggtgtgttaaaatagggctctctggtcaagagggggaaataataatgagtagagaagtaaactttctagtcagtttatttttttaaaaagttcccaaagtttcaaatgatgaggaactttttcctacgtagtaacaatcttctttaattctttcccgaatttctaaatcagtagttttggaaacatatgtatttgtagtaggaggaaatcgccccggttcgaaagttgtaaaaacaagtccacagccttagaaaccgggaaatatttggaaaccgtgttccggggggcactggggattttaatcaaacctgaggaattcactgtaaataactcctctttccagggacaatttccatacacctgaggaacggaaaggaaagcagtgaaaaccctgggctgactccccaggcctcgttaggcaggggttccagaaaacctctctggcaatgacagagcgacagaaagcgccagcatgtgcttgttttgagtttgcttccccagtcctaaagtgcgccctaaatttctccttacactaaattctctggtctggtgttgccaaaatctccaaagtccgtcggaccttgcagcgctctgccgagccgcagcctagagaacctgaagaggcagtacgcgccgcaaatgccaagaaagcagagccttcggtcccggcggaacccggtaccccgagcctcgccgcggaccgctccggctcagtcttacaggctctgggccgctcggcgagcgccgctcaaaggctaacgtgcctgcttgtttctacccgacctccgaagcccagacgtgcttcagcaagccgcgtggctagcaaactttctctctgctgctgcgggaaccttcccaacgaccacgtgggtttcacccctggtcgctctcggcacttttgcctttcacaaggagaaggagagaacagcctttagagcgaaatatataataataaaaactattattaccatcatcctcatcctcataattgctattatcatggtcaatttctccaagccggttcccccgggagccggggagcgagaacaggttttggcggatgctaacttccactcgctgctcggcagatccattttggcttagcaaaaatatcacagggatttatatttacattttttgaagtaatataaatgtctcagcctctgacaaaataaatacgagtcccgccagaaaaggcaagactaagcattccacattcatagagtaaggggacacttggggagtttttaaagatgagtgcttaattatttaaagagaagacatacgttttctcttccatatttataaattactgttcgctaccaaagcatttctaaagatgcgagcgttgtgcagtcggtggacttggcagcgctgtcgcagccacctgtgcggcatcatacagcagcattcaacagatgcttcaagaaaactgcgatgggtttttgcttttcgaaacagaacttgggtgccgacagtatgttcactgccaaattaaatttcaaagcctgaattcagtggcgatggagggaatcagaggattcccaaaatgccccttttggaatagactggacagctcctttcacaaatatggaaacagaggcacagagagaaatgactgttcctagggcatccagaataaggaaggggcctgacccttatcattgcttccacttccttctccatctctaacttttggggctactgaggcaaacttcggccttcagaatagccggcagctcccaccccttttgcgttctgccgggttaggtcctccaagcctctctctgtacggcctctctgtagcctcttctatacactcgctgcgctgccgtccggtcctaagtagccaaaccggaggctcgatcttttgcttcggtccagctacctccgacaggcggggagccaatctccacttttcccaccccggtcctcggtacagggccgagaaacctcggccgcgacccgagaccaccacccccgctcgccccttcgttccctcttaggagagatctgcttctgtccccattctccgtgggatcatctccattactcagcttggttttggtgcctctgagccaagggggccccgttcacccttctctgcgctgccgccaggacaccgcaggcacctgcccggttgcgcctgggagcctgtgaaaaagagctctgcctgaccggttagagctctgcctgaccggttgcagctcggcatcccagcagttgccaaaagagagcctttgtggttcacctcttgctgccttgaccttgcattgacagcacccctccctcccccacaacgactgggcaaccgactggctgtgggcccaaggccctgtgccagagagatatgttcacccccttggaaacccgtaagagctgccctcaagttgtctttctaatgaggcctgtggggtcaagaaaggaactaaactgtgccttcccggggctcgaaggccaagagcttttctttctcctttggggttagggaaaggatggggagacaaggatggggaagtgggccttataacaggattgtggcctttgcgcactcaccaaatgtttgaccctgtgagtgcctcagttgctactgttggaagaatgggcaagagtcggaacagagacccttgaagggagtttcaaagcttgatgaaatttgcaagacttgagaatgctgtttgttgaaatgaaatgtacaggggtgtgtgtgtgtgtgtgtgtgtgtgtgtgtgtttggggaggggtatgctatgaatctttgagggtacattcttgagaaagccttccctctctctctatccggtgccatggctgatcctggttccccctactctctaggccttgtgaatcagattaatcatcacccccacccccatctccaccatggggtctcgcgccccctgccagcaggctccagatgcactaagagaccggtccaaacaggcccgggggccacgtaatgctgagtgctgattggctgctcttggctcctcccctcatcccgcttttggcccaagagcgtggtgcagattcacccgcgcgaggtaggcgctctggtgcttgcggaggacgcttccttcctcagatgcaccgatcttcccgatactgcctttggagcggctagattgctagccttggctgctccattggcctgccttgccccttacctgccgattgcatatgaactcttcttctgtctgtacatcgttgtcgtcggagtcgtcgcgatcgtcgtggcgctcgtgtgatggccttcgtccgtttagagtagtgtagttagttaggggccaacgaagaagaaagaagacgcgattagtgcagagatgctggaggtggtcagttactaagctagagtaagatagcggagcgaaaagagccaaacctagccggggggcgcacggtcacccaaaggaggtcgactcgccggcgcttcctatcgcgccgagctccctccattcctctccctccgccgaggcgcgaggttgcggcgcgcagcgcagcgcagctcagcgcaccgactgccgcgggctccgctgggcgattgcagccgagtccgtttctcgtctagctgccgccgcggcgaccgctgcctggtcttcctcccggacgctagtggtaagttggagccccgggcggcattgctagccgagaccccaacgatttaggcgggggatggggtggggagcggggacaggtcccggatggctgcagcctgcaggaccgcactggccctagcggaggttggggggagggactctgaacgcgcaaatcgcgaggagactgagtctctggaagaagagaggagcttaggttccacggaaggagcatagaagtctctaaggggattgggagcgggggctcgagatgaagacgctgggcggaggcgggggtctagagaacctggcgcgggggaagccgagacagaaacggaaggcgggggtggggtctcaagaagtgaggagtgggaggagagaaaggagggaaactgaacgcaatgtcgctgagtagagggtcgggctgcggaagatgcaactgagttgcaggaccgactacaat

SEQ ID NO: 12526 - DNA, 6000 bp, Homo sapiens
tcatcaggcaccctctttcttctaccttctgtcttttcctgccacagcccattccatgccatgaggcctttaaaggtctatgttgtagtgctgatgctgatggaaacatacgttggaaaactgttgggtaacgtatattaaagctgaattgattataccctgtgatcagaaattctactctagttctatacctaacagaaatacatacagaagaaatgttaaaagaaatttcatagcaggaatattcaaaataggtctaatctggaaacagctcaaatgttcatcagtgaaatggttaagtgaatttggtatgtattgtatagtagcatattcatacattgtaatatgatatagaatgataataggtgaactacagatccatgtaacagtatgaaagaccctcttaaacataaggttgagtcaaagatgtcagacacaaaagtgtatatattacaatattccatttgttaaaagttcaaacaccggcaaaactaacttacggtgataaaactcaagatagtgaccaatcttggggagggtaataagaggccttctgaggttctgctaatgttgtttcttgaacttactgctagttgcatgggagtgttaagtttgtgaaaactcatcaagctgtatatctataatttgtgcatttttggtatacatgttacacttcaatataaagtttatactaaaagctctatgttatgttacaggcaatgtaacaaaaacatgaaatttaacaaattcagcttccctatttggaaagaaccaatatgaaattatgcatcaggagctattattttctttcaagattctatagcatgttatcctttatattctgtagaaagcaagatttgtgttctctgtcaattcactagttgatactgctagagcatcatcacttctttggctgacaacaaaattttctttcttaaataagtcttgcttcttagaattataggaaccttttctagaaaaacttactaatgttttgactatgggtagagtctgatttttagtaaagtggttaatgtctgaaatcataaacttcaaatgcttaattcatgtttacaaatttactaaaataggaatttatatcatttatttttactgtagaccaactagtctttcttcttcattctttcacactttcagatggtgaagtttaaagagttctttcaggagagggctaaaaaacaatgtggttgctcaataaggcattgggtttcatgaaagtgttcaaaggccttctcttttatttttattttttaattacatatttgatgtatatattttggaggtacatgtgatggataatttgatatattcatgtaatcaagtcagggtaattgggatatccatcaccttaaatatgagactaaagataacttccatggttaatgacataatcttagtgagaaagaagaatatgggatgtaactattggatccatttttattttaacttgtttcctggaaaaaatcacaattatgagctgatttttagttgctagtgacttattactaactaaatctttcgattgctgtattagtctgttttcacactgctataaagatactacctgagactgggtaatttataactaaaagaagtttaattgactcacagttccacatggctggggaggcctcaggaaacttatggaggaaggggaaggagaaacaagcaccttcttcacaaggtggcaagagagagagagagggtgcagggcaaactgccactttttaaaccatcagatctcatgagaactccttatcaccagaacggcataggggaaactgcctccatgatccaatcacctcccatcaggtccctcccttgacatgcagggatcacaattcgagatgagatttgggtgggaacacagaggcaaaccatctcatttgctgacaatgctttgtgtgtgtgtgtgtgtgtgtgtgtgtgtgtgtgtgtgtgaaaaaacagcaaatcaggttgatggctattgttgtgtgtgtcctagctgggatggcccatatttaaaagtcccccactgaacaacgtagtgcttgtgggtcgttaattataatgttgaagtgtttttgcacaactaaaacagagcttgccatgtgtcatgcccaagttaacaatcactttactattgcctttcagactgtggcttaggcctagattgcaaggcagatgagtggtcacactctctctctctctccttattttttattactccaataatgaacagtcttctcctgttttcccacaccatgctcattcatatccctgtgatcaagtttacttagttccctctctctttcacccattcaacttctatacttctttcaagttccaaatcaataattcataaacataatttgttcatcagttaataaatcagggcccaaagaaaagaaaatatgctcttggatctcttgagcctttgagagtgaattgtagaccaggtgtccttcccttttttggcaacaaagtcattaaattacttgtctgagtcaaattttctaataaatatttactgagtgcctactctgcatcaggttttgtgttagatgcaagaagaattaacacagtctccctgccttcaaagaactggtagtctagtggatgataaacaagtaatttcacacaatgtaaaaagaatatatggtgcatagggacacagaggagagacatctaaatctagtccgctgtaatagaggaggaactattgtgaaaagacctggaggaggacacccaagcagagttttaaaggatgagtagtagccaaatgaagaggagggtgggaatttccagaagaagcaatagcatgagcaaaggcactgaggtgagaaacatgtctgtgacatacacactaaacgtttgagacaatgaatgggaagagatgatactaaaaaggcaggcaggagccaggtcatgaaaagcaaagcatggtaatgggaataatcctacccccccccaccccgaaacagaagtatattatctaaaatcgatctcacattttatgtgttaaatgctccaactctcaaaggtgatagaaactttactgcataacaggcagggaaaattggcccccctgtataacagatacccttgccttgtgatatgtttgggctttgtgcccccacccaaattttatcttaaattgtagttcccatgatccccacgtgtgatggaagggacccagtggtatgtcattgaaacatggggtggttacccccatgctgttctcgtgatagtgagtaaattctcacaagatctgatggttatataagggacttttctccctttgcttggcacttctttctcctgctgccatgtgaataaggacgtgtttgctttcccttccaccatgattgtaagtttcccaaggcctccccagccacgtggaactgttaatcaattaaacctctttcctttataaattacctagtctcgagcaattcttcatagcagcatgagaacgaactaatacaccttgtgattcccataatctctctatccttaggattcctgtcttctttctatttccttggttaccaattgtttgacgtgccccaaggttggcttctttcatttatatgggactttgatcgtttagtaaatgctattggatttgctttttagctcatccttttataaggaggtttataagcccttcttgctcctctcccttctatgtttaatcttagcctttaggtcataccagtagtgtacagtactaataggcacacactcatgcattagcactctccatcccccaattccccattgatacatgcacatgtgcacacacacacacatgcacatcagcctttgttatgttcaagacaaagttaaataaaacttattgatactttccttactaccatcctacatctttcatggacttttctctaccttacctgccaagattccccagggcatatttctattgcaaatggaaaattcttgcagtcagtggagaacaaaggagctatacatagggtacagaatttgcctatttgctcattcctctgtgtgcatgaatttgtgctttgcttcatagaaccaccatcactatctgttacctgggcagactgagtttaaatcctttgagtttcctgatgaaaaggcattccattggtaaacagcattataataattatttcctccctggtcaagctgggatgtttcctcatagtttactttctaggcctcatctttcttacagactgtgctcctttgttaaggttagaatttcccataaacctgctcaataatttgtttgtgtttggcttctttgaaatactacacaaagcaatccctgtaaaaggcaaagctgtcctgaaggctgagaaaggagcctgagacataggctccaagttgctcttttcaggcagagccagctgggtaatcttatctcagatggctgcttttcaaggtgcccaattcaggggcttttcctctgggagcagcatttgccccagggaatcaagtgctttctagtcaggggcaaaactttgggaaatctgaggacccagggtggtatggtctgttcaggagaattttggggaacagaatggcccccttctccctccagcacttgtacagatcagcacttggccccagaacagagaccagactgagagacgaggttaggaggaaacaggggacccaggaaaggcggctagattgcaaacgtacctacacagctctgagtcaaaggctgtcagtcatctcggctcagactgctctgctctccagcagcccagccctttcccagggctggggcaggagattgctacatgtaggcttatctggggaaaaaccagagcctcactttagtcccttccggtaattgacactactggacacccaggagggggaggagagagcttctcttcataaatgttcccacccctgggcaaggtggctcactctggcaggtaggaacaggggagagtgcacctgctaccagtcaagctcagccagactgcaagaggaggcgaggcggagccagccgagggagtgaaccatggacaagttgaaatgcccgagtttcttcaagtgcagggagaaggaggtaggggtctgggagctgcgggaggtgtggaggacctgagagtggaaaacttaaggggggttgctagtctcagtttttgctttctgtggctgttccttgtgctccacatttctgttcaactattaggtgtgactgagatatacctatagagtagagaagaaagaaaagctcttactctcatagctagaagacttagggccacctcatcctctgccttgggagtacccacaaaatcctgttctctatccctctcctaactgtgtccacatgctagaggaaagtacaaaagtacactgttcttaattgacccaaagaaccctccataccccagagaagtgagcaggttgggagagaacccctgtcccttctctccctcccaagtggagagagagctacttcatctggtgagacaggagaatttgtctctgcatattattctacggcttttagaaaggcattgattttaatctgtaagacaaagaaaagttaaactacccttaacttgatacatccaatactatcaagccataagaaaagtttatagattctcgtttttttttccagcagacactacatttgatcctgctcaaagatctgctacaatatcaatattgatgactttatctaattcatctttaagacttttgtatttgaaacctgatttgtctactttcatttttccctcacaccagtgtgacaaagacctttgtatttcaaacctaatttgtctgctttcatttgtgtctcacactgctgtcacatttaacgtttttaccaaaatttgaataatcttagctgatggagtagtaaacatatctacctacagaactttgctcattttaagaggtaaatgttgtaaagtaaaagcagctatcagcagaaatctccccaactttctaaagcattcccctcagctatgg

SEQ ID NO: 12527 - DNA, 6000 bp, Homo sapiens
ctaaaaatacacagattagctgggcatggtggcatgtgcctgtaatcccagctacttgggaggctgaggcaggagaatctcttgaacccaggaggtggaggttgcagcgagctgagattgcactgcagtccagtctgggcaacagagcgagactccatcttaaaaaaaaaaaaaaaaaaaaaaaaaaacctgctgtaaagtttggaggcccacaggtctacgggtttcaggacactgacccagtcacctagaagcgtgcctactctcaggcaaaacccaaagggtcctgtcagtggcctcttgtgcaagcaacactcccttgagtgaactccactaaaactgtagaagaaaaccacctgctgaagagcaaggacctttaattcaattaaacccaaacattgagaatgagttatgagccactaaccatgttccattcatctttatattctctgtggtgccagaggatgcctttctccaagctcccccgactcaatccactcagaatctaagtaagagtagagctcttgctgtacatacatggctccaagacaaggcccctggggattgttccttccaatcagattaccaccactaagctcctcctaggtagaaaacctggagtcaccctggacagtctgacctccaggagcttgaatccagtggcagaaatagacatgcacacaaacctctgtgtgatttgatatgatagaggaacgtgtctggtgctatgagcacacacacaggagggagcaaagaattttgcatttgggagttagagaagcccctaaaaaatgtgacacttgagaaatggaaaagcattttagataaagggaacagcaagataaaaggtttgcagtgagaaaatatcacaggtgacaaacaagaaccgggcaagtcataagtgaggaaacgctgactaggccagggagcaatagggagccctagggcatgtgcagacaggaagtacatgccctgttaacaaggtggcagcccatctgacatctgctgacggtttctacactgaaacaggtccaatattaccaggacttttgatttattaagagaagctggaaatctggggccttaggcaaaatctcctgacttaaaaaaaacactttggcatctagatccccatgaattccaacatgatatggaccaaacacaattgctcacaagggagattcagcctgaaggtggccagtcagccacctggaacctggaagcttggctggaagtgaagctaggaagagtgtggggaatctaacctgaagaggcaagcctgcaggcagaggagttgagactgccttttgtggcatttgatgaagggaggggtgtcacttaagcttaagctgaggagtgacatggacagattgctcattgggaagatctgtcttgtaaagggtagaccctcatggccagtttgaagactgtttctggaatggtaataaagtcctgaaatagaaccatagaggcgaaactgggtggtcgggggaggaatagatctgagagatgttttaccatctaatcagtgactgcaggactagacagtggatggggaactgggggtacgagatacaggaaagggagttgtcaagagtacatacttttagcattcatctctaattttggccaggcatgggggacagtgggtgggtggggaccaaatacaaaagacaacaaagagtattctagcttaggatctctctcacctttggcgctgttgtcatcttgagtagagtaagtctttgttgtgggggcggtcgtgtgcattgtattaacagcagcatccccagcctctactcactgcattccagaagcatgcccccgcttcagtcatgacaaccaaaaatatctctccatattgccgaatgtcccctgggatgtaaaattgcccctggttgggggccactgatccagaatcgggagggaaattccctgttttcaacttctcctttttctttgttttgcagtggtgtgaggttttgcttagaggactctttgtgagatttttgtctaagggaccagcacttttagctaagcccttggaatatgctggtgtctgtgtcccttttggactcaggaaggtgtctctaaatggatggaaggacacctgactttggaaagagggacatcattctttcctgccagacattttcttgcatatgcccttttcagcctccagttacagaaatggacgaagacttagtgagaagggcaaaggtcaaaacagttgagtggagtggcctaggtacacagggcagcgcagaactccagccaccccgggccaaagtgaaagaaaggccactggtagtctcgcacccaagtcatcaggactctaagggttaaacttgatgttgactcatcatgattttgatttacacaaagccaaactgaaagctccttgtctactgcagttcctggaaagccttctatctgtcttcattcttcctgcagaccagggcagtggcctgattcaatccaagacgctcttcgaatcacactacacggagattacaaatacaagttttatgttgaagaaacagcattcctgactctttccacccccttccaaaaatttgaaaaatcgttgcatgatgttcagggtcgggaagaaaggaaagtaacaatatagtcttaaggccagcaggccggaactatcttggtgaaaagaaatcaggtctctcccctctccacactgccgtttgttttttttcctcacgatgttcagattctcagggcttttctggaagctcatgacaagctgcaatccctatttttctaatcatttgctaccattactgttttattaagcgcttggtcaatctatgccaagcagtgcccatgatggcactcagccagtccccaggggctcctgttccaactaaagactccttaaaaggcagatgacataaccattttggaaacgttattataaacttattgtataatgtttatagcaaatgtcaacaagtgtatatgtccgtggtggtggaggaaaggccttgggatacacagtggctgacctatttgtgggagggatttagaaataatgatactatctctcagttctacaggccttgatactttacaaactgttttcataaacattattttgttcgataacacatgcaagccaggatttattttttttttttttgagaacggggtctcactctgttacagacccaggctggttttgaactcctgggctcaggtgatccttccacctcagcctccagaatagctgggattacaggtgcatgccaccatgcctggattctggaatttattctgaaccgttagccaaaagaatcaacatcctgagattcagcacaggcaggccctcctcctggaagcttcccttgctccttccctcccaaaaggtaccctttttgtatcccataattccttgttcttgcccttatcattgcccctcagactgactgcagctttctgttagcagagcttgcttttggtgagtgtcttcaacagttcctggaacaatttcataaatatttattgagtttgagagccttaattccaagagtggaacctttgttgtgaataggttaaacaaccctgtgccctttgggtggggtctagactaggtatattatcagcatttttattgctatactttttgtaactgttttcaggtatatgcattggcttaattcggccaaaatacacctcattatgggtctcatcatccacctagacatgattcttttttgggagaaggtgatagaataatgtccccctcccatgattccatatcgtgatccccaacacctgtgaatatgttaacttacatagcaaaaatgacttttcagttatgattaaatcaaggattttgagatggggagattattatgaattatctggtggacctaatctaatcacaagggtatttataagggaaaaggggaagtaagagggtcagagtcagatacgacaagggaagcagaggtctgagtagttccgcaacaagccaaggaatgtgggtagcctctagaagctggaaaagtcaaagacacagattctcccctagaatatccagaaggaatacatctctgcccacaccttgatttaagctcagtgtcacttctgacctccagaactgtaataaaataaaactgttaaatcactaaatttgtggtcatttttgacagcagcaacaggaaacgcctaaggactcttgttttccttcctcccagcctcactgaccctcataggcgcccaagtatcaatgtgtattcttccgattcacctcccatccctttgaaaaatatgtagaaagtttgtcgtgtgctttaaaaaatgcacgtatggtatcctccctcatgtttggaatgttccttttaaaatcaacattatgtattgccagctttcaaatatgccctttgtccttttcacaaagcacagtactgccagtgtccccaactccacccagtgaagtagggctggtattactaaccctggagtcagcgctagcaaacaagggctcagaggtcaagggctggaagccaggtctccagactcccaggccaaggctcttttccgcagatgactctgtcctggtgtccagcagggcacagcccctagcacctccgaggccccgcaagtgtgctggcagcggcgacgccggctccgccacgcggagggaggaggcccaggcagcgcccggagtgggcggcgacgtggtggaagaagttttgttcggtcagagaccggacgcgggagctgcgggtgggccaggtgtccagccttgggagccgtaggagccgccagagccgccagagccgccggcgccccgccccgcctcctccggccgctctcgccggctcaggttacctgaggccggtgggcggggcggcccttcccgtctgcgccggcccccagcctccagggcggcggagccgggaagtggaagagggagcgaaggaggcggggactgccaaggctccagcccggccgggctccgaggcgagaggctgcatggagtggccggcgcggctctgcgggctgtgggcgctgctgctctgcgccggcggcgggggcgggggcgggggcgccgcgcctacgggtgagtgcgaccctcggggcccgaggggcggccggagggctgagggcggtgagggtcacggctgaaaggccccggaggtcaacgccgggcggagggccgaagctggggtgggtgctgggggctgccctcgcgaggccccgcgctcggcggctgcggcttcccgcgcgggatctctggggcccggtactggggccggttcgaggtgggacccgggagctgcggggttttcccgaactccgggtgcggcggaggtggcggcagcgaagtaagagggctgcgacttgtagtgggaagagcccaggaggctggcgtccaggcgtgcgggggcggggggcccgaaacatgcccacggcgtcagagggccgtgggtcagcgcccggaatgtcgcctgtgagcccgggaggaaatgaggcgccagagccggcggggaccacgaccgaagtccaggcgagctgagaacgcgccggggctctttgcccgaggccgcgccaatcctcactgtctaagggtggctcttgcgagtggaagttgaagggaacctctaaacatctcagtccttgttgaaaaaggacgtgacgctcatgacctcctctggcgtcgaagaaatcctttgggaaatccagaatagcatcccggcagatgctccccccaccccactctctttaataaaccttatattttagggtaattgtagatttatggaaaagttgcaaagatacttcagagagttgtgtatatccctcaccctgtttggtaacttctagttaatcaacctggcagttgtgaaaaattgggagttaatgacttccttaggagcagctcctggaaggaatggccttctggacgtttttggtgacaatgaaagccccaaactgtataggttttattatcacattgacacaaacacttatata

SEQ ID NO: 12528 - DNA, 6000 bp, Homo sapiens
ttcactggataaagaagatagcaaaaattacctataatctcacaacccagagataactcttaggtgcatttccttcagatttttttttctgtgcatgggtatttaacataatgggcttccatattcaaactcaattccacaaatatttattgagcacctactacatgccaggcactattctaagcacaaggaatacaacagtgaagaatatagacaaaagcctctgttcttgtgcgccttatgttcaagttggaagagataaaaaaaatgagaagtgatactgtatataaggaagcagtaaatgcaatgggggaaaatgaagcagggaaggaggatgaggagtaggaagaaggtggtgtgagatttgaaagtagcgagggaatgacccatgagaatgtctggggaagggcattccagacaaatggaatgacaagtacagaggccctgaattggaaatatggctgcttgttcaaagggcagcaaggaggccactgtagctgtagtagagtgaccagggaagaaagtggtgagatcctaatgtcttaaaggtaagggtgggtagagtaccgcagatcctgtagggccttgtaggtgctataaggacttgagcttttactctgagtgagatggggagcatctttggatacttaggctgtttccagttttttgctatcatgtatcatgctttgtgattcttctactcaaatctctgttcacatctctgaacacttccctaggggaaattcctggaagttaaatttcttggccacaggctaggaatagtttgaggcttttattgcatattgccaaaggactttctagaaagcctagacccttttacaatataattaagttcaacaaatatttattgcatgcctactatgtgccagacatggtctaggggcttgaaatacattggtgaacaaaatgaatcttgcattctagcaatttcactcttgccaattgtgtcagagtgcttgttttactctgtgcttgccaacaccaagtattaccattcttaaaaagctccaagaaacaagagaaaaaagaacactccagtcatttgaatgatgagaaatggtgcattgtttttatgttcctttggatttatttgcttccttactaggctgaattatttcccaaacattttctagctaatcagccaattgttctatttttctctgaaagctctttaaaacctttgaaaataattaaaaggagacagaaagtttgaaaacactaaaagacttaacatgtatcttgggaaataagtagtccttgggtcaagtacatcggctttaggaattgacttggagccaaagagcatattaaggcaactctcatgttctgaagggggctttttattcaggagcactcttgcttatttccagataacttgagaactgccaccctggaggagaccattccactcagcattgattctgacatgagcctgaatgatgggatgcttttcttcaacaatctctacatcccagtgttagctaatagcccactttattgaacatcaaatctggtttgcaagcatttatatttttaaactgtatcacttcttgaggtcttaagttgcacaagttttctaccctccttgtgaagcaggacttcctttaatccattatcctccaaggggacacagaggtgtagcagaagagacactggactacgataaatgagaattattaatcctccccatccctccatgaaaacactttccccagatttaatagcggttacctttgaggaaagagaatcaagagtgaggagagggacttcagttgtcttctatatcttcccatagtttgaattttctaactttagacaaatattactttgaaaaaacattccagcaggggttatctgggtggggagctaatggcttggtttttgttttgtttttttactctgtgtctctctttattggaaaaaaatgataaaacttttattatataaaatttcccccagttttataaaacaaaatgtgtgtgtgtgtgtgtgtgtgtgtgtgtgtgtgtgtgtatgttgcatgtctgcaagaatataagccaaactgctaatgtatgggcctgatttaagtactgtttggggaacttggagagggagaaaggagtttcattttttactttatacactcacgtattgtttaagtttgttatagtgaacatgtattatcattctacattttttttcagaaaataaataataaaccattttcccccctgaggttaaaagtgacacatgcccattgtggaaaatgtagaaaggtataaggaagaaactaacaatcacaacagttaacattttagcatatttctttccacgctttgttttatgaattttttgacatagttgagttcatactgtatatagttttgtatcctgtttttccctcaagattaaaacacaagcgttttgccatgtcatgatttttggtaaaagaatttaccaaaacagttttagttaaaagaaggtagatttattagataaagtaggaaaatatgttgtcagagagacaaagggcagcctgcaagagagaagccaactgccaggagacaaaggcttgctggaaattttataggatggcgtttatgctgtctgttgaagaggtctttgtgtaatattgataatgccaaggtcgcaatgagctaacttacaggtgtctggtgatagctgggcatgggaagattgtgaattatttgcgcaggaaggctgcatcttggtcatgaagaaagggagatttgtagcttatttgctttttctttttgctatttcatgctcccaccagcctgattccctttccctaattaggactccagaatgatgatatttgaatggccttttaatggttttgtcacaattcaagtgaattaattcgccattttatttgaagtcggacatttaggttgtttccagtttttctgtattaaaaatgaatctctgctgagcatcttagtaatgaaatatttgtctgcgtttctgtctccttgggatggattcctgaaaatggaattactaggtcaaagagcagatttctagaagtgggattaatggatagaaaatatttttatggataataaaaggttatacccaacagcgtatgtgagtctcaccactctctcgccaatagtgtgttatccttttttttttcccttttatctttcctgtagaaaagtagtaggtgacagcggcatctccatgcttttctttttgttactaatgagactgaacatttttcatatgcttattcaccactggcatgctctcttttgtgaactacctgttcctattttttcccatttattgactagaatcttatacattttcttatcaatccaaatgatctctcaaataaatattaaccctttgtcatattagttgcaaatgaaaatattttataagtttattagctttctaaattttcttggccatacatgttaaaagagatagattctaactatagacaagtgccctcagtttgagcctgtttctccatgattaaattgaagagttttgacaaaagatttggaggggctgtttcagctaatcccaaatttagctctgagaaaaatgcctgggcccgatacaaagattgtttggctcattgcactttataatgatttaagaagatgtggggggcagggatggaagcagtttttgccagaaatttttagaattctgaggtaggaagccaatctttactcaagtctcttgcgtgttgggaggaggagtaagttatgtgcaagccaacagaacacttggtggaaaagtactgctctgggctgcagatgtgtgcacggcttggttttaattatttgtttccctctctatcctttcttctcctcccctccccccgccaccagaaaaagggccagattaggacgaggcaaccccttcctccgtggaggtctgcttctgtgcagcctgttagcacatcaaaggccggatgaaatacctaggaaaggaagggaccaggcctaggatccttccaaactcccgcctttgtctgggctccagctcagggttattgtgactgccaagggtagcctgacagactccaaatagaagaacgctgccaaacaaagaaactttcacattattctgaggggggaaaaaagagcaacaagagaacgttgcttgttaatgcctggtgactgagcaaatcagtaattgcaaaagggtttttcggagaacaaacccaaagttaactgggcgatcagattcgtttccccagataatagggagagttgtgcactgactttagcaatcccgggggtgtcggtcccacagcatctgggggagaattggggaagggccatcaaggagagcgaatgggggttcccaaggtgaaaatgagtcgtgtagggctctaacatagaaaatggagttcgaagaatgagtttcctgtctcctaagacagcttggagggcccgggaacggcagggggaagatgaggggcttcagaatgggaggcagggaaaagcctgcagcaacagaaagggagtcggtgtctggcgcgcatcaggtggcggaggggcgctcgcacagagcccggcaatgccgaggccctcccaacgggtcggtctgcgaggagcaaaaaaggggttcagaggagggcagcgcgtgcgtcgcgctcagctataggatggcgcgaggatggcgtgaggctgggctggggcctcccaggtagaactgaggggggcaccgcgcggccgcgggggagcggcgccggactctagaggctttggagggggcctgagggctgcggggcgggaccgagcagggcggggcgcttaggtggcctcgggggaggcggggcttggaggctccgcccctcaggccccgcctcctccccggctagtctttggccgccgccgaaccccgcgcgccactcgctcgctcagagggaggagaaagtggcgagttccggatccctgcctagcgcggcccaacctttactccagagatcatggctgccgaggatgtggtggcgactggcgccgacccaagcgatctggagagcggcgggctgctgcatgagattttcacgtcgccgctcaacctgctgctgcttggcctctgcatcttcctgctctacaagatcgtgcgcggggaccagccggcggccagcggcgacagcgacgacgacgagccgccccctctgccccgcctcaagcggcgcgacttcacccccgccgagctgcggcgcttcgacggcgtccaggacccgcgcatactcatggccatcaacggcaaggtgttcgatgtgaccaaaggccgcaaattctacgggcccggtacgcggccggcgaggggggcttggagacaaaagaagggggccccggcacggggctgggcgggagagaggcgaggcgggagcggggcgcccctgagtggagggaggaatggcggcgagctagggtaggcgggtaggcgggcaggcggagagccgggaggctcccggggcgggcagggaacaagaggcgctctagaggggctgcgggccagtcagggacgcggatccccggcccgcgctgacagcgctgggagggggttagagaaagaaggctgaggcgcttaagccgggggtgggtgggaccacgaagctcgaaggcgttgaggggggacacatcaaagcccaggctgttggggtagttttcgaaggtcctgggcttggggattcctggaaggaggagggggtagtgtcgggttctaggaaggaaatgagggtgttccgagggaggcatgggggagggcgagagtgagaaaaggtccagacctagagaagacgggaaggccaatgacaccgggagtaggtttgaaatatgagggtgtgggagaaaacgccgagacgggattagcagcaggtaaaagctttgtgcccggtggatagtgatgtgtgtgtgcactcgtggtgtgtgcatgcgcggtgtgtgcgtgtttagtgtatgtgatttatcaggggtgtgtgtgtgtggtgtgtgcatg

SEQ ID NO: 12529 - DNA, 6000 bp, Homo sapiens
catttctcataatacatgatttatagacacttcactttcctgattgccttgtttgaatatgttccagtttgttaatgtcctcttaaatgtagcatccagaattaaatgtaaaactctatgggctggccaacagaaacccaagtggaactgaaagtccctctgatctggtcactaccattctcttagtgcaactcaagactcgttagtattttttggcattgtcaacccacagtgaactaggacctagttctctttttcacacatgctaccattaagctctatctcctcatccttaaatgtcttgcactaaatagggcattaaaaccctttattgcaatgcttcccattttataagcctgggtttattctggactttagcccttatgactcaattcctagaggtttgtgatattctttgggctttgtccttggaagcatagtcctccttctgtcatctatacatgcacttttaagatctgagctcatcagagaataatctataaggacactgtagtttattagaaatctctccctttttaatttatcattggaacttttccaaattctacagttctgaattttcaactggatccctctcccttttaagctatctttctcttttggtgttaggccagatcatacttatcttttctctgatccttttgaagtctaccttacacatacacatacatacaccgcacacacacacacacacacacacacacacacacacacacacacacgttaattaacctatgtgaccatgcccagcaattttttttttttttttttagtttttttgcttaacagatatccagatgacaggatcactttccccaagattcttgtcactttcactttgctaaccaaatcttccttatttattatcaggattaagcccagcttagcaatttacctcattgcttctttattcttttgagaactgtaattacactgtatcagcaagagagccaagaatctatcagatgttttcttaaatttaagatggtcttaaaaataagaaaaaagaatgtatcagatatgttgctatcagaataacttccagcagatattcagatgttctatgtctctgatcaccctttcctgttcgtctatgtgacagttttatgaaatgccattcatacttttatttattttatttattttttatttttatttttattttgagatggagtctcgctctgtcacccaggctggagtgcagcggcacgatgtgggttcactgcaacctctgcctcccgggttcaagcgattctcctgcctcagcctcctgagtagctaggattacaggcctgagtcaccgcacctggctgatttttgtatttttagtagagacggggttttaccatgttggccaggctgatctcaaactcctgaccgcaggtgatccacctgcctcggcctcccaaagtgctgggattataggcgtgagccaccgcgcccggccccattcatacttttaatctgagaagtctcttgtatacttctacaactataatcactttcatttctccgtttcattctcactgaatgcttttcaccctccagccaatgaattactagttataccttcttgacatattactgctctcttcttctgtatggtatctctgaatcaagttttccagatgccagccagaagttccaccctcccaagtctaaacaatacctataaaattgcattttcctgagtgtattaaaattttacattcccggccagtcgctgcggctcatgcctgtaatcccagcactttgggaggccaaagcaggcagatcacctgaggtcaggagtttgagagcagcctggccaacatggtaataacctgtctctactaaaaatacaaaaattagccaggcgtggtggtggcgtgcctgtaatcccagctactcaggaggctgaggctgaagaaccgcttgaacctaggaggtggaggttgcagtgagcggagatcgcgccattgcactccagcctgggcgacaagagcaaaactctgtctcaaaaaaaaaaaaattacattccctttattacccatattctgggtgttggtacatagatatctgaggccttaaaagtgtcatttctgactctcttccttgtttttccttgagaattactaggcattgccttagctttagttcctcttaattagacttatattttacatagcttccagaaacacaataattactaacacagcactatgtctcaatggaggaattagttttgattaactgaccagccatatatcattatcaacatcatcatcatcatcatcatcatcatcattaatattcttctcggctgggtgcagtggctcatacctgtaatcccagcaatttggaaggctaaggtgggaggatcacttgagcctaggagtttgaggctgcagtgagctatgatcgtgccgctgcactccagcctgggtgacagaatgagactctattttctattttcctggatgcttgctccttgtttctttttccttcttttttaaaaagtttttaaactttcagacttttttaaatgttgcaaaaatagtacaaaaatgtccttatatcctttattcaacttctctaaatcttacataaccaccataaccaagaatagtattggtaatctacagatattcaaacctcaccaatataaccaatgtcctttttctggtacaggagccggttgagtgtcatatattacattcagttgtcaagtatctttagtctcctttaatctgtgacagttccttagtctctttgtctttcatgatcttaacagtttcgagaatatctgactccttaaaatacacgcggtgataggtgactacgggagctccagctcaccgtggatttagcaaaataccaagtgatgacaagaagttgcttttaaatgacccatcttgtatttcatcgtcaataaaaccacacttagttacccaaagactgagaagggaaaaattctatgtaattatttgatcatctttttttgtggagagaaaaaaaactgacaaaacaatgagctctggaatagaatacagtagaggcatcatgctcaaagagagtagcagatgtggccagggaaaggtcacatgtagaaaagggatacacaagtgatggcgaggtgtatcgaggaataattaacagttgaataaaaatgcattaatcagaatgtcaagagttcaaactagaaagattttgaattttaaatgcattataaataaaatccacctctctccaaataaagccctctgtagaattttgctttagctcttgtttctctcaccagaatagagaagcgagtatcacctttggaggatatactctaccattctctgaaactgtttttttgcattcagctacctcgctattataatcagctgagaaacaccatagcctttcactaacacaggtcaaagatttctcccaggatcaacaaagctagattcaaaattgctcctttgaacacatgcaatttgtgtgcatcagtttcgatcgctggggttcttgaggagactaacaaattgcaaagtgtactttcagaggaagggcctaaccatcctggggggtcctagaattgggtcctttcacaggcagatctggagaagataggagagggcaggaaaggaaagtgaaggatatgaacactatgtgttcagtgtgcaaaggcctgctggcattttgcctatgggaattctgaagtctgggcacataaggttcagctgcagttgcagttttcaacagtcgtccttatttttataaacattgttatgattattcagacacggaacttgtgattacactatttgctcctgttctgaacttgagggagtccacttaagctaacaagtaggtttttgaggacatgtgtggcaaatgcttacccagtgaagggattaaggggctcagtaagcacttgtccattggcacaatggctgccaatctaattctattgattcctctaaatgtttctggagttcagaaatctattcaatccaagggcactttacctggggtcctgggagccaaatgttaacgtagttcttaaccttcctaagcctcttaaccttctgggtacaacctctatatttgtcttctggctaaaatcatttccccacccccagcccagtcctttggactctcccaggccaattcctggcaagatctttgtcgaactgtatttgcaaaccagggtctggggcacggtggcagttccttcgtctgctgttcccttaatttcgtctggtttcactggctccaggacagcacacggtctagagtgggaagagtgaggcattcaccttggtgaaaaacaactcagtaattaagacaaatgatttttcatgtactattttaaaaaaatcagaagcaatgcaaaaatccatgatgaacaaatgatcaacatttgaaatacagacaggatcccaacctgcacttgcatgaccttgtctcgcttgcctcaccctaaacccagccttgacactccaattaaactttatttacaaaacaagggggccggccagtaggatgtagtttgcccatacgacttttttaaagtatcgcattgactactgtttatctcgatgactgaagggttcttttggcatccctgtagcaaatgcgtctcaccctagtcctggtcctgctccaagggtttttgtccaggcacatcgtgacctcacccttcctcccctctccgaggcctctctcagggtccagcgttcaagtcccgggtgttctctggacccgccccttcctctcgccgggtcaggtgccgagggcgagcacgggcggcgcggagagcagtcccggcccgccctccacgactcctcctcctgcgagctgggccactcagcggctctgccgcccagcgcgccggggcccagaccccgccccggccccgcctccgacgcctgccgctccagctccggctccccctatataaatcggccatttgcttcgctccgccccgcagcgccggagtcaaagccggttcccggcccagtcccgtcctgcagcagtctgcctcctctttcaacatgacagatgccgctgtgtccttcgccaaggacttcctggcaggtggagtggccgcagccatctccaagacggcggtagcgcccatcgagcgggtcaagctgctgctgcaggtacgtcctgggatccaggagcccaaccaggaagtggggggaagggtcgcacagaaggcgggcgcccgaggggtggcggggagcgaactctaaagacatggccagggaagcggcttaggagaggccagagcggggcgcagaggcagaacagaagtcaaactggtgggaggcgcctttagtgacctgaagtagtgagtctaggaaggggccgggggcagagggcaggaccaggctctcggcatctccgaggcggcggactcggatggagcagtttctgagtgacggcctccccgggcctgggcgtcaagggcgaaggccgaaagccggcgttagaaagaggaacgccagttcttaccgaagacctcaaggtcgcggcaaggagataactgcccgggggaggccatgcgcccgggtccagcggcctcccagcccgcggacgcgctcaaacctcgccgggccggaagccggcgccgggaagcgcgtgtgccttttacgtccgcccccgcgcagccgcggccgctgccgccgcgtctccgcctgcctccctgcgccgcgcgctctccagtgccggctctagagggcgctcctgggctagcgtgtagggctggcggcggcggcgctcgggtcacctctgggagcggagtgggggcggagcgagacggaagcagctcaggagacttgaggcgtaggctgcggtccccaaggtgaccgcgccctatgtgggactcgccctaatgcctctgaacctgggtttgaggtaatgacctttctcctaggtctgaaggtcacgggtccgctggaggatgccccctctccactcagaggggtggaggcttaa

SEQ ID NO: 12530 - DNA, 6000 bp, Homo sapiens
ccatgcttttagacactatgctatactctctaataagcaataattctacctaacttcagagcctctcaccattttcttttgaagagttccaagcccatggcattcctgagagtgaggaagcagggacatggaactttattttctttcgaggagggaacatggtgcaacagagaaatcaattgtcattcctgtagtcttacagcaagtgagtaacagaacaaggctgttgatggagagaccttaagctcttgcttgtgaatctgactttgatttaagaggcagctgagagccactgtgatttctgactggtgcttgctgaatccagagtgggttcggattggattaatatcactgtcctctgtgtggggaaatgctgctgcttcataataagcaggttcacagagtttggtggaaaaaccaatgttgcctaacagccccttctgtgcttagcacacttgattgattgtccttaggtttacagctctctgtctagcttgtcacagcaaaaaatctctacttctttgaatctagttagttcaagaagacctgtgaccccaaccctacaccctccactcccaaaaaaacagaaaaaaagccttgtaaatgtgcttcaagtctgtgtagctcagttttctctgtagtctgccaattgtcccctgagaatgcccagtgaaatgctgcaaatgctgcagtgaactgaaaaaaaatcaaaacaaaccacaaagtccaacaaccctaagactcctacttttaggagccatttgtaactttgggatttattgtacaatttatctttagtttcaggttatccatttgttagggacagaggtgttgggaaaacatctctgcacctgttgcaaaatttcatttatggctggagacagacacagacacacactaatagaatatcattccaattttagcatatgtgctgttgaatcaagcacatatacttataaagcatcattcaagtttagcatatgtcctgataaattaaacaacgtcatatatagacacacaagactgcaaggttgaaagagtcctaagaggtcatctagcagggttctacttctcacaccctggcagtggatgcttagagcatctctataatgagatgccaaagtgggggcagctccagtggtaagttgtttactaactttcagaggcaaccagtctcagtgaccagcttttgtaacaaaggtcttataaaataaagtgaaattcatctcccctgtaccttctaaccttgggggctacttccttttttggagtcactcagaacacaggatgtctttttccacacaggcccgacccccttcccctgcagggactaaaacttctagcaacacagttcccagccaggaccctctgcaatgactcttctctccctccaactgctccattttgatggcatgtgtttccaagcttctttctcccaattggtgctgccccacctatactgtgctgctcctccctgaccaccaagcaagcaaaggtttctgggaggctggggctctgccggcccactgcagtgccatcactctgcttgccaaaaccattttaggcagcaggtaagtaagtggttggagaggtacattgggtttctgagaggcaccagtctagctaaggcagaaataggctctaacttaataatctgctcatcacacacagtaagagacaccctgacttattcaaagacaccgtgggcggtgcagaggatgaataagcatgattcactgccactctggcacccggggcacgaagaataataaaacccaaagaattgtagccgcctgagtagtaaattaagagatccagggctcagctagactctagacatcaatgttaccatggcaataaagggccccagccttcagcagctattacagagcaggcatctaataggctagtctatgtcacagccaaagcccaaggggctagcaaagaagaccaattagcatatccattcattaggggcctctgcacacttctcttaattccaattagttgtttgtttgaaccaatgtctctggtctgcattatactcattactgccttttagccactagaaataggcttgaatctccacaatgacctcacaatttcccaagctttcatttttcccctaggggtctaggcttatacagtcacaaacccatggccctctgtcctttgaaatgaaagcgtctgtcactgtacaactgtacttgacagatggaaactctgctcaggaatgtgatgcgctaagggttcttcctggaacctagtgaagtagggatctggggccattatctggacctttcaggtcaaggaaaccctctggccttagccagtgagcctactggctatgcctgctggccactactcagaggctagctgttcgggagggggaattttgggcactggggaccagactggcatcatcaaagtcaggcagtaactgttccgacttgaagtcctgcccttcaagatccagcccaaaccccaccttttccgggaagccttccctgattattgtagccctaagtgaattctccctcctccatgcacttcaaaaatgacattctgtgctgagcagcatacatgggcaacctcaggccctagcttggcctggagcttccttacccagtgacctcagagtccacaggtcactaatcttggaagggactggggttctagagagtattcaacattacttgggtgactccaatggcaaacaactcttaagctccactgcacattacctcccagagtccctgaagacctaaccagtcccttggtatggaaagtacacaactgctctttgacggctctgggacacattgtggccaccccacaacttacacaactgtggaaatggcccacaagaacagatgtcataaactagcccatctcgtggtaaaggcaaagattatctgaagggtgctaccatatcttccttcctttgggaacagggggacccagcccataagattgtttctgttcccagttagttgccattgtcagccaactctgtggtttcaccacagcaggcactcaggacaaggggcttatagaagcatttgctaatacctgtgcccaagaaatgagcatgtagttttctagactttaataatgtgcccccgaatctgctgttatattcaaagtctctcctttctccctccccttgtccctttgtagccactgcttcatttgcatccgcattagccacttgtggctccattctgctgcactgttaggcatattgcttttttttttttttttcaaatttggcaggaatcatttcccttctaactagtgttttgagtgtaaattcatacagatttctgtcttcaacatcctatgggatttggttattttaccccacccaacagctgacattccagaacacagcctgggctatagctgaaatacatggcaaatgtcttaagtatacatcaaacctccaattacccagaatgcttaggaatggaagattctagagaatggagtattttgttacctaaggtcatgtcactcctaactcccttttgtccccctactctcagtttttgaaatgttttaaagtgagtgtactctcttttcagccttagaccagttagcctagccattgtttggttttaaggcttccaagggcctggggattctcatacttaatgtaaggaatcacacaaaagactggcttggagaaggtgtagaagatagagatcaacatctactgagaccagagaccagattatcccctagaatatattttgcttttaataaaattcaaagagaagaataagtttctcttttttgtaagtggcctttttcccttcaaagaagcatatgggaagagacactgttaaagaagaggtctgattagtaacattacagtgaaaggaattcttatttaaaattaactgcaattgaagccattttcatcagaatagccttgaattggagttatgattaaatctttctaagctattgtgctgtttttctcagtaatgaatgtgcccagaatgtcagtatctgcaacattctcagccacttgagtataatggggtttgatttgtgaaggaaggatcacaaactccatccaggccttttagccacccaggctccagtagggtggaccccaaacagaccaaaaatgctatacaatattcttaactgtttcttctaatttttcctttcattggatcccatgttggtttcaggagttacatatgtctgggaaactgacactgcaaagttctggcttgttccctgccctgatgctaagggataaatatagatctcaaccactacagaaatttggccaggatttggaggggtgtgtgtatgaggggcagtgactgatggggccactctgacatgtgggctagaaaaaggcttccttatgtccaagaccctctttggggcagggaggaatgaagtaggagcctggcttctaaaatcagaaagaataatccacattttaagaagctcatggattgacacaaataagaaatattgtaggtggcttacagtgtgtgtgggggtggggggagagagcaaagggaatctttcctgacatcctagatccttttgcatgagatcagccttatgaaaaaagcaagttattcttggccatctcccctcacccccaactcccacccacacccaccccctgcatgcactgatatccaactctcaattgagaagaacatgacttaagatttccattggggccatcatatctcaagcgctggagaaagacaaggggtggaaagacatataaagggggcgggagggtgagttgctcatcctcgtgacccagaatatctccccctccttgtaatgatgagcttgcttttccataagggctttcccttgattcagggaaggagccaaccaatgacagagggacatgttagattattctggggaagggctcatgccaggagggttcacttttaccaggcgccaagtgtccccagcaaccagtgtctcctgtaccagcagaagctccagaactctcacccgattgcctgcctctgctgcgtctttgcccactgaacagccatgagaaggcaactccggtccagaagggctccatcctttccttacagttatcgctacagactcgtgagtgccagagagcagaatattttgctgccccctccccttttattttaatggggtgggttgggggctgtgtagaccttggtttacggctgcctctctttgagacgggcagaaacagcgaagtttaggggagcccagggtttcaaaaaggagcagtgactcccagcacccccgggcaccctaaactgctggataaaaggaggaagcccctcttcctgtgaaacaaagataagggaaggagaagataacagagaataagtggcttctaaaatcttttcctgggagtatagaattttcacagaccttttggagtataaaagtttaattctaatagcaagaaatttagccaagagggaaggaaggaggaagaggaaatgaaaggcactgcctacccagctgtctcttgggtggtagcttcttagagtccagctgctctctttctaaagtagaaattccaaactatagctaaaatcatagaatccccaataggagcagggaggaatcctagacattatctctccagaacccctcattacctaaaggaggctgctgtggctcagagtacaggagtgacttgcaagttagtggaggagccaaagtgaaaatgcaatatcctcactgctaatcttgtactctttccattgtatttgcagaatgcatcttccaaacccccgatctgccactacccattgccatcctgactgccaccccacactgcccaacatgtagacacacatacattcttttgtctcatcatttatttccagggtgtattacaaattatttgatccaaaagtttatttgcatttattttgctataagtcattaatgtatgccacacgcagtgctttttggggagaggattttgaaatgttccccagagag

SEQ ID NO: 12531 - DNA, 6000 bp, Homo sapiens
atctatgttaggcaggcctgtttttgccttcgcaggccctaaacactgtcacttgtggagacttcagccaacatcataataaacatattaaaatgcatccacatcctgcattaaacatttatatttttgctataaatttttgaaaatgctttggtaattttgcttttgaaattatttgtctgtgcataactaatttaatttacatggctgtgatttctccataagaattacatgtacgtgggaattcttgggaagtgagaagatccaacctaaaaatcgtcttcaaatataatgggtttttaaatgcataataaatttaactgttaatgaacttgatatactgttctattttgtatgccatttaattattatttttgaatttgtcattttagtattttgtagcctttacttaaaaacaaatttttttagagacagagtctccttctgtcgcccaggctggagtgctgtggcacaatcatagctcactgcagccttgaactcctgggctcaagtgatcctcctgcctcagcctcccgagtaactgggactgtaggcacataccaccatgcccagctaattttattttattttatttttgtagagatgggggtctcgttagattgcccaggctgatctcaaacttcaaatggtccttctgctttggcctcccaaagtgctgggattgtagttgtgaaccactgtgctcggctctagtcttttttaaagatcctgttttttttaattttgtttctgaaaagcctgtaagttctagacacttagtgatagttgcctaatagataaaagacaggcactgagcacccactgaatttgtgtgtgtttgtgtatgtgtgtacacgcacgcatgtgcagatggtggtggtaaaggtggtgagattcatgttttcttgaagccagagtttcatttatttgaattttattcaattgtcttttaactctttgcattggaagccacttatatgcaaccatcatttcccctgtgagagacctcagtttttagtgtccttacctcaatatattttaatttccacacaacctcttattcttcacttaacaaatatttattgagtgcccactatgtgcaatgcactgtttaggtgctgaggatactgtaaagttggaggaagaagtatctcgccttttccctaaggccgattccgccatctacatcttggatctttgtccctctcaattactgagggattttgcttgcaaccttactgcctctctcttctagcatcttaaaaggccccctctggccgggcgcggtggctcacgcctgtaatcccagcactttgggaggccgaggcgggtggatcatgaggtcaggagatcgagaccatcctggctaacaaggtgaaaccccgtctctactaaaaatacaaaaaattagccgggcgcggtggcgggcgcctgtagtcccagctactcgggaggctgaggcaggagaatggcgtgaacccaggaagtggagcttgcagtgagccgagattgcgctactgcagtccgcagtccgacctgggcgacagagcgagactccgtctcaaaaaaaaaaaaaaaaaaaaggccccctctttgttggttccttcctctttgctttaaagtggcttcaggctttgtcaacaacctctgtttgacccttctaactaatttaattaaaattgtacttcgttcctttttatttccaaacctcttcaatctgtggtctcttgtctccgttttctcacaatacagttcctcctcaattccccataatcttgtttctatcctcaccacttattgaaaccaaacaattattggtctccagtgaactccttgacacgtccaaagaaagtctctttggccctcattttcttgtcctattttcagcatttgatactgctaacctcccctgcatattccttctttatctttcgttttcattgactgcaaatgattttcagtgcaggaaagtacatggaataacagaaccaatatatgtacccaccacccagttctatcaaatcttgcaacatcacttttcagattctgttttgagaaataaatattagatatatttgatattctctgtatgcctcccccgagtgtcaatcctctccctctcttaaatttggtgatcatgccctttcatgttttatatactattacagtactactcatctatgtagccataagcaatagatgatattttcagactttatatacacagtatactgtacatgttttgcaatttgcttttcactcaacattatatttttgaaatttagctgttactacccatagctcaaattcattcatcgagaacaccattatttattcattcacctgctgacatttacttggcttccatttttgagattacaaataatactgcaatgaacattcttttatatgtctctttgtgcatataaaaggtagagttttgccagtgtctatatctagaaatagaatttctagattgaggggtattgcctttattagacatcgtcaaattgttcttcatagcagttctaccaacttaaactccttctagccgtaaatcagagttccactgctagaacttcaacaacacttggggttgtctgactttttaaattttcacaaaaccgatggttgtgaaatggtatctcgtggttttacttttcaatttccctgaatagtaataaagttaggcatcttttcatgtctttattggccatctgggtttccttgactatgaattacttactcagatattttgtcaatttttctattaggtttctttcttatttataggagttcttatatatcctggataccaagtcattcattcatttaatcaatatttttctagcacctacttggctccaagaatggttctaggcactgagaatgcagctatgatcaaaacagacaaaatccttgcactcatggaactcaacattctagcgggtgaaggtaaatgaccaataatattgataaataaaacagaagtggtagatagtgatacataagcagggaagagggatagggaacatgtatgtgtggtgatggagaaggggattgttgaattacaattttcaataaagtggtctaggaaggcttcagtgagaaagtgacatttgagcaaagacctgaaggaggtgagagtgcatgcagagtgaacagcaagtgtaaaggccctgaggtaagagtgtgcctggcaagtcctagcaacaacaaggagtcagtgtgactaagcaaagctagttagggagagtggtgggaaatggtgggagatgtccgaaaggtgatgacagcttgtcttttttttttttttttttttttgagacaaggtcttgctctgtcacccaggctggagtgcagtggcgccatcacagctcactgtagatgtgacctcgctggctcaaggggatgctcccacctcagcctcctgagtagctgggactgcaagcacttgccaccacatccagctaatttttatagtttttgtagagacagggttttgccacgtttcccaggctggtcttgaactcctgggctcaagtgatcctaccacctcggcctcccaaagtgctgggattacaggcatgagccactgtgcaggccagtttgtcttttaacttgtttatattgtcttaaagtacatacattttgaaatttcatgtagctaaatgtcttattctcattccatattccaagctcatactcaatttttttttctgaaagttataaagttttgcttttcacatttagatctttaatccacctggaactgatttttcttccatggtttgaggtaggggtctaatttttataattttccatatggataagcagtagtcctagtaccacttagtggataatccattctttccccactgatttgaaatgtcccacacgctgcatatcaaccttccgtatatgtgtggtctgtttgaggggtttatattgtgtttcattgattgtctatctccacagcatacttttaattactacagatttacagtcactcttgatatctagtgtattatagattctggagcaaatgaataacacgatcgaaaaattactttgggaaaaatatttttatggctgtcaacagagtaaacatgtcaaaggaaagagtaaacccaacaggatttatttaaagaaaagtgcaataacccagataggctatcacaagggcttacaataaagttatggcagtgtgaatggagagaaaataaggaatctaaaagtaattccacgtaaaatattaacagggtgtgttgactgattggatatagagatgaggagggggaagacgatatatggctttccagtgaaatgataatgagttagttttgtgacgcagtgatgtgttaacaatggactctattaggtaagaggtctgggccagggatatatatttggacattgtctagttagaggtgaactggaggggacgcagaggaggagcaaaggtctgggctttggggaattctccgatttagggcgtggaagaaagaagaggaaaggaaatggtaggataaccaacacgggacattataaccttaagaaatatatatatatatatatatgtatttttttactgaatgatgtgggtcgtattgacacaacaggtttgagatctcccataggtatgactgtgttttgtttctgtggccttcaaagtcctcagaacaattttgatgtcacaggtggcatttaaaacccattccttgctggacctggtagagacgcccccagtccgtcaggtctctcgctgcagttccgcagtttgaccgcaggggacggaatctgcggcggcctggaaaactggcgggggcgcgaggcgccgctctctcttgggtcagattctcagctcccagctccccgctcccggctcccggcgcccggcgcccggcgcggagctgttcctcaaacgacacgcagccgaggtgggtgggtgtggggacgcgggagccagtgtcgtcggatcggcccgcagtccgctgtcctgctgagcccggaggccgcctggatggagccgccgctcccggtcggagcccagccgcttgccgtatccgccggagagaagggagaggggaggccgcgcagggccgggggtgggggtcgggggccctgcggaacacggtggggcggggcaaccgggtggcccagaggccgagcagagagggggagggggccggcgcgggagacgaagcagggcggggcggggcgggggagggcggcggtggggggggggtggaagacccccttcgccccgcagtgcaccactcctccccaccgcgcttccgaaggagacccttgactagcgcccgcatactgtcgagggtatggagatgaagggtcctctccgggagccctgcgccctgaccctagcccagaggaacgggcaatatgagtaagtaaccacctgattcccacagaggaggggagcctgccattacctcccaaccccaaaccgcgacgggtcacccactgtcctcctactgaagccacgcgggcaacaggttcaggtccaggtgtgaagtgccagtgctctctaacctcggggctttgtccccaacttccaagcctctggattgtgcttggcagtgtggctcagtggaaggactgaatgggcggggaagcaggaagcctgggttcttagttcctgcccctgcaactgacatgtgttgtgtaacgttgggcaagtcaataaagctttctgggccaaagttaactcttcagtttaataaaaccattaactgccttaccttacagcctttggaattataactgggggaaaaataaatgcgagagtggcttccaaaaagtaaaagtgctatggaaatgcttcattgttaacgttacagacttgtcttaaccctattcagctggtttctccagtctccccgtccccttatcccactgggttgaaggcatattcattaattcagtaatggtttagtgtaggccagaaactgcctcacttactgactttactgttagaaa

SEQ ID NO: 12532 - DNA, 6000 bp, Homo sapiens
ttaatttttagtagagatggattttcacaatgttggccaggctagtcttgaacaactaactcaagtgatctgcccgccttggccttccaaagttctgggattacaggcatgagccaaagaatattaatattgggatcgcttgagcccagaagtttgagaccagcctgggcaacatagggagacaccgtttctacaaaataaaaaataaaagcctagtcgagtatggtggtgcatggctatggtctcagccactcaggaggctgaggtagagacttactcggacccaggaggttgatgctgcagtgagccatgatagtgccattgctctccagcctgggtgacagagatagaccctgtctcaaaaaaaaaaaaaaaaacaacaatgtttaaagggctattaatggaaggagatcaagcagaatctagagggtgacacagggttagaagattttctttttgtggtaacctgggaagaatatgaagctgataggaaagataaatggagagggaaggtggctctccaggagcagcaaggaggagtgagtgaggtctgcaaggaggcataggtaagactaggttcatgcaatatttacataaacatataaaagatggaaaaatgttaatgctggtatctgggtagtggggatgacgcttacattttacttacttttgtgtgtgtgtgtgtgtgtgtgtgtgtactgtttgtttttttgagacggagtctcactctgttgcccagactggagtgcagtggttcgatcttggctcactgcaactgctgcctcccgagttcaagcggttttcctgcctcagcctcctgagtagctgggatcacaggcgtgtgccaccatgctcggctattttttgtatttttagtagagacggggtttcgccatgttggccaggctggtctcaaactcctgacctcaggcctgcctcagcttcccaaagtgctaggattaaaggtgtgagccactgcgcccaacctcttttgtgtttttatctttatttgtgtgtgtttaaaatttttcttttgtgttttcctttcccctccatgaagatgcatcactttaaaattgaggccaggcgggggagtattacttattatgaaaacaaaagcagaaaatctgcttcccgatgtaggaggaccataagttagggatagccagcccactgactccagcacacaaggacataaggccaccctccagaagcacatgacatgaacacacctatctcaagaattataggataagcatgtgtgtatgcatggtgaggactagaaggaggcttttgactatcaagagtagcagtggatgtttggatttcaggtaattgctaccttccttccacttttgtgtatagtttagtgatttataataactatgtattttttataatcagaaaaaatagtaaagctattgtaatgttgaaaactatatatagtcttcaccaaagaaattaatagtcccaatgtacactgcactgataaaatcacatcttaggctctcattctcctactggcccggaagaaccagtggccatattgtgagctgtctgtggaaagggtcacgttgcaggaaaacaggggcagcctcagcagctgagagtggcctctggacaacagccagaaagaaactgaagccctcagtgctacaggtgcaaggaaataaattctgcaacaatctgggtgagcgtggaagtggattttcactcagtcaagtcttaagataaaaatacaagtctggccgacaccttgattgcagccttgtgagatcccagagcacaggacccagtgaagtcatgcctggactcttgatctacagaaactgtgagacagtacatgtgtgttgttctaagctgctgaatttgtggcaaatttttaatgcagcatagaaaattaacacacactcctactagcagtatgtgagaatttgagatactttacatccttgccaatcctcagtccttttaactttggccacgctggtgggtgtgtattgtgattttaattttaattttcctgatgaataataatgttgaacactttttaatatgcttattggttattggatatactctcttatgaagtgccccgcaagcatttttcccattaaaaatttgagtagcctatcattttattactgttttaggagttctttacatatactggatatgaaattttgtaggatacatggattaaaaatctaccattgtggggcttgcgttttcactcttcttaatggtgacttcttttttctggggggtgggggggatggagtctcactcttgtcgcccaggctggagtgcagtggcgcaatctcggctcaatgcaacctccgcctcccaggttcaagcgattctcctgcctcagctttccgagtagctgggatcacaggcgtacgccaccacacctggttaatttttgtatatttagtagagacggggtttcaccatgttggccaggctgatctcgaactcatgacctcaggtgatccacccgtctcggcctcccaaagtgctgggattacaggcgtgagctcctgtgcccagccaaaaaaaatttgaggctggagcacagtggcgcgatcacagctcactgcagccttgacctcccggtctcaagtgattctcccacttcagcctccggagtaactgcgactacagtcgtggctaatttttaaatttttggtagaggcgggtgtttccttatattgcccaggctggtctcgacctcctgggctcaaatgatgttcctgcctcggcttcccaactatagtatagatgagagcaacatagcatagtggttaagagcaatcccagctctgccattttctaaattactctcctaaccttttatggcctgtgttctcaaccgtcaaaggggaaaaataatagtacctgtcttatagggtagttaggaacacaaaaagctcttggcatcacccttggtacatggtaggtactgcacaatgtcagctaatattatcgtcatgtgtgctgcctggagaaatttttaagtggaaaacaaaacaaacaaacaaaaacacaggccagacgaggtggctcacgcctttaatcccagcactttgaggggccaaggcgggtggatcacctgaggccaggagttggcgatcagcatggccaacatggcgaaaccccgtctctactaaaaatacaaaaattagctgggtgtggtagcaggcacctgtaatcccagctactcaggaggctgaggcaggagaatcgcttgaacctgggaggtggaggttgcagtgagccgagatcgcaccactgcactccagcctggaccacaaagtgagactctgtccaaaaaaaaacaaacaaaacccaacaaaataaaacaaggtgaactaaaatgagaaatatccttttggaagaacatagttccaaatatttattcattcaacaaataaccatttagggccaacttgcactgacttttccttataacacataagcaataaaccctattattgcgtactctcgcgtgattagggaacgttgttaagaggctcaaaaatcggacgtcatagctcaaaaatcggacgtcatagcacattggctaatggaatcacccaggggctttgcggtttccccttccagcagccagaggggccagagtcggaagctgggggtcggactcttggcatcttctggtggattatgaggtttggattaactgggatttcccgttggtgtttttctgcctcatctgtttagctttttgtggtcccctttttggtatccaacttgctctttcttaagtgaagtttctgattaaagcaagagcttcgagtaaggggtctgaccgtaatttttcactggttaatgtctgacgtccagtaggtgctgtctggatcattctccgtccctccctcccttctttccctcccccccttcctttctctccctttctcttttctttctctctctccctccctccttcctttctctttctctctctctctctttctctcctttcttggatggagtcttgctttgtcacccaggctagagggcagtggcgtgatctcagctcactgcaacctccacctccggggttcaagtgactctcctgcctcagcctcccgagtagctgggaccacaggtgcgtgccaccacacccagctaatttttttgcatttttactagagacgggatttcaccatgttggccaggctggtctcaaaactcctggcatcaagtgatgcgcccggaccctcaaagtgttgagattacaggcgtgagccaccgcgcctggccttgaactttattttctcattgagcccaggcacctcactaaattcggctcacccctatgtctcactttcctacttttgttttgaagcctttgccccaccccctccacgttgccgcctttttcgtactgagcgcgcagggcactacgcccaccactccccttgacccactcctcaagccctgataccggggcgaggccccttccttttctagtccttctacgcgccaggtgggtgggtttcgcggtgacgaggcgacacctctttcccctctggcgagcacgttaactggggaagctaccaaattctcacgccttagctgccctgcctccacctcccgcaagtccggttgcccctctaggcttctgcgcctgcagtggttccgaccctcgcctttagaactctgccgcttccgcctcttatttcgcgcctttgtttttagttttggaaggggcggagttgaaatggctgcgccgcggttgccgaagcaacgctttggttacttccgttggtttcaatgcttccgggttggcgctgcagtggcgtttccgactgtgggagcctcagcttcccagtcgtccgatgagcccgagcaggtgagggggagctcctggacttccaggctggggagcggggctgggccgcgccaggccgcgcggggccgggctggcctggttcccggcctgggaggggcttaacggtcctctggtctctctctcccctcagctgagtcccttccctgtctttcactcttctggcatcggtggttttacttcttcgattgaaccctgcttcctcgacccccctgggaggccgccttcttcaggcgcctcccttctctccacgagctcgctctgacagctgaggaactggcaagatcctgctacccagagggtgaatgggtatctttcccggaataatcctaatttttctaagggtgaagtttgcaacggcggccgtgattgtaagcggagtaagcaaacacctccattgtattagtgtaagggatactgttgaaagatgctccccttcggtttctaccccctgtcactcctgaggtcaaggcattgaaggcatctattaaaatgcagttcagttacttgattggcatgacagctgttatcaacatgaattagtttctcagacaggataacagcagggacatttatggtttcctgtcagtgattccttgttgttgttgtttttccccccagcctagagatgcctagcgttatcatgaactcttccctcgtcttcattccctacatcatcgagttctttgtgtcttcattggggaagtctatctctaacctcagtgccaacaagcatctttgtctgctgtactttgcaccatcctaagctagtctccctgcctctcccgtttgtaatgtaatccactgtgtttgctgcagccctaataggctaaaatgtggtggatttcctcaagtcacttcgttgttaaacacacacacacaaaacatgcagccccctcctacaccccctacccccaccccttggtttcaagcctttcaacataacatgctccttatcacacttcttgtctgatactgtttcagtcaacaagggaattctctgttccagttaggttcctttcttcttggcacaaaccatactgatgcctgcttctacatgctgtgcttgttcccacatttgtgtttctgttcattctctcttccctgcccctctcccttacctg

SEQ ID NO: 12533 - DNA, 6000 bp, Homo sapiens
aaaaagtgggcaaatgacatgaatagacatttctcaaaagaagacacacaaacagccagtaaacatgaaaatatgctcaacatcactaatcatcagggaactgcaaattaaaaccacagtgagtagtgccgcaataaacatacgtgtgcatgtgtctttatagcagcatgatttatagtcctttgggtatataccggcactattcacaatagcaaagacttggaaccaacccaaatgtccaacaatgatagactggattaagcaaatgtggcacatatacaccatggaatactatgcagccataaaaaatgatgagttcatgtcctttgtagggacatggatgaaattggaaaccatcattctcagtaaactatcgcaagaacaaaaaaccaaacaccgcatattctcactcataggtgggaattgaacaatgagatcacatggacacaggaaggggaatatcacactctggggactgtggtggggtcgggggaggggggagggatagcattgggagatatacctaatgctagatgacacgttagtgggtgcagcccaccagcatggcacatgtatacatatgtaactaacctgcacaatgtgcacatgtaccctaaaacttagagtataataaaaaaaaaaaaaataaaaaaaaaaaataaaaccacagtgagataccaccttactcctgcaagaatggccataatttaaaagtccaaaaacaatggatgttggcatggatgtatggaaaagggaacatttttacactgcttgtgggaatgtaaattagtacaaccagtgtggaaaacagtatggagattccttaaagaactaaaagtagaactgccattcaatccagcaatcccactactgggaaataaggaaaagaaaataagtcactctgtgaaaaagacacatgcacatgcatgtttatagcagcacaattcgcaactgcaaagatatggaaccaacctaagtgcccatcaaccaacgagtggataaagaacatgtggtatatatacaacatgtactactactcagccataaaaaggaatgaaataatgtctttttcagcgacttggatagagctggaggccattattctaggtgaagttaactcaggaatggaaaaccgaatgttgtatgttatcacttacaagtcgagttaaactatgaggatgcaaaggcataagattgatataatggactttggtgacccggggggaaggatgggaggggagtgagtgataaaagactacgtattgggtacagtgtacactgtttgggtgacaggtgccctaaaatctcagaaatcaccactaaagaacttatccatgtaacaaaaaaccacctgtaccccagaaactattgaaataaaagtaaaaattagaaaaagagtacaactaaaaatatgaggtaacaactatttacatagcatttatattgtattaggtattataagtaatctagatatgatttaaagtatatgggaggatatacataggttatatgcaaatattataccattttatataagggagttgagtgtcctcagattttggtatttgcaggggtcctggaaccaatcccttgtaaattctaagggatgactgtatttgtctattttgataacaatatcacattgtcttaattgcagtagctttattataaatcttgaaatcaaatattattagtcctccaacttattttttcaatttcaaagctgtttttgctaatgcattttttttttgcatttccctacgaattttagaagcaattagttgttttttatatgttaaaacacttgctgggactttgaatctatacatcaattttgggagaattgatatactaacaatatcaaatcttccagttcatgactatatctctccaatattcagatattttgtaatatatgtcaggaatgttctgtagtcttcagggtacaagtctcatctcctttgtcatatttaaccctaacattttttacgtttttatggtgtttaaaattctagctcaaatttctctcgttcgttactaggattacaattgatttttgtatattcgcctatgtcctgcaaccttgggaaactcgcttcttagttctagtattttttgttgatcttagaaaatctgttttctatatacatgatcctgttgtgtatgaataacagaagtttgcctttgccctgtccaatctagatgccttttattactttttcctttccttattttctttgccctcattgcactgtctagaatctccagtacaatattgcactaaagtgatgagagtgggcatatgtacttgttttgttggtcttttttaactttcaagttcaggggtacaagtgcaggttgttacataggtaaatttgtgtcatgggagtttgttgtacagattatttcatcacccaggtattaagcttattagccattagttatttttcctgatcctatgcctcctcccaccctccaccctctgataggcctcagtgtgtgttgttcccctctacatgtcttgttcttgatctaagagtgaaaagcattcaggctttcacctttgagtacgatagctgtaggttttttgtagatgctcttcctcagatttaggagctcccttcaaagtttaatgagagtttttattgggaaccatatgacacaaatctttgctctaggaatttactctagaaaaatgaaaacctatgctcacacaaaaatctgtacataaatgcttatagctgattcctttgtaatttccaaaacctgtaaatgtgccaaatatcttccaacaaatgaatggatcaccaaatttgtatatccatgctgtggcagacagattctaaggtggctcccaacatcccaatgtcctggtcatatctttcagtgcaggtggggactatggcttgcttctaaccaatagaatgtggcaaaggtgatgagatgtaactcccatgattacgttagtttatacatgacttgtggggaaaagaaagagagatcagactgttactgtgtctatgtagaaagaagtagacataagagactccattttgttctgtactaagagaaattcttctgccttgagatgctgttaatctgtaaccctagccccaaccctgtgcttgcagagacatgtgctgtgttgactcaaggtttaatggatttagggctatgcaggatgcactttgttaaaaaagtgcttgaaggcagtatgcttgttaaaagtcatcaccattctctaatctcaagtacccagggacacaataggctgccgaaggctgcagggacctctgcctaggaaagccaggtattgtccaaggtttctccccatatgatagcctgagatatggcctcctgggaacggaaagacttgaccgtcccctagcccgacacctgtaaagggcctgtgctgaggaggattagtaaaagaggaaggcctctttgcagttgagataagaggaaggcatctgtctcctgatcgtccctgggcaatggaatgtctcggtgtaaaacccgatcatatgttccatttactgagataggagaaaaccaccttagggctggaagtgagacatgctggcggcaatactgctctttaatgcaccaagatgtttgcatacgtgcacatcaaggcacagcacctttccttaaacttaattatggcacagagacctttgttcgcatgttttcctgctgaccctctccccactattaccctattgtcctgccacgtgcccctctccgagatggtagagataatgatcaataaatactgagggaactcagagaccagtgccagcgcgggtcctccgtatgctgagcgctggtcccctgggcccacttttctttctctatactttgtctcttcttttctcagtctctcgtcccacctgacaagaaaccctcccacaggtgtggaggggctggccaccccttcatgactccatctttcaaggagacacattctccctttgttccatgaagaaacaagcggcactgttgtgaactgcctgtggacagggcaacatggcagagaactgagggcagcttttataacaaattaagagatttcttaatatttaaccctccttacattaactgctcgtggtatattattctttttaaaaaattatttatactttttgtgggtacataataggtatacgtatttattggatacatgaaatgctttaacataggcacacaatgcataatgatcacataatggtaaatggggcatccattcccctcaagcgtttatcctttgtgctacaaacaatccaattatacttttagttatttttaaatgtacaattaaattattttgactgtagtcatcttgtgctatcaaatactaggtgttaataatcacatcatggagaatggagtatccatccctcaagcgtggtgcattactctttgaatatgctgctctggattgtatttgctaatatgtggggcttctctattaatgttgcaaaatagggagccaataatctggttgagagatgaaagcagcagcaggaaaatgtgttcacagaacctcatacgagtggcgtctagggccaaggctccttgaatgcatacccaagggctgatgagaggtggggacgagtgctgccgaaggactcctcaactaccagaactacgtagggcccctaacatcccctcggagcgagctccccgcgccccgtacaccaccaggtctccctggttcctctcctgctccccgtcccgctacctcaggaaactttagcccagcctctccgatacaagccggcctccttgagggctttaggcccctcttcgccagtgtataccccacgacacgcctgcgtactagggaccacccggctttgtgggcggagtccatgagagggttggagccccgctcgtggccccgcccacccaagcctaggccggccttcgtggacacgcatttccggcgacgcctcggtactgacctctgcagagccgggtggagcccattgacgtccagcgaagcgaggagcagcgatggacggtcgggtgcagctgataaaggccctcctggccttgccgatccggcctgcgacgcgtcgctggaggaacccgattccctttcccgagacgtttgacggcgataccgaccgactcccggagttcatcgtgcagacgggctcctacatgttcgtggacgagaacacgttctccagcgacgccctgaaggtgacgttcctcatcacccgcctcacagggcccgccctgcagtgggtgatcccctacatcaagaaggagagccccctcctcaatgattaccggggctttctggccgagatgaagcgagtctttggatgggaggaggacgaggacttctaggccgggagaccctcgggcctgggggcgggtgctctggggagggtccgctgtgttactggccgccgccagggtcgccaccggcgccctccctccgcgcctccctccccctcgagccgccgcgatgtcccctgcgctcctgttccctcccgcgtagtgcttgcctttgttccaggaatagcgctccaggctcctgctgccgcccctgggcctcactctggagcgagccgccgccctctccttccagccagccagcccctcccatgtacatttggacgctgtcctgcgctccagctgcaagctgggctcctgttacacactggacagaccacccactgccgccgctgccaagccctctcctccccaccagactgccagacgactacatcattctgcccacagacctgcgctgccacagccatcgccatccatcgcatcccaccgacagactgctgctcctagtgatctggactcacctcggaggtatctgggctggccacagtccctggacagtgatccagacagctggccgccccccaagggatctgtcaccttcagcgagacctatttcctccccacccccagaaacctcttgtgttcttgcctaggcccaggtgttcctggcagccaaatcgagtctct

SEQ ID NO: 12534 - DNA, 6000 bp, Homo sapiens
tcattaaatttaagagatatttatttattatttttagagtcgtggtctcactctgttgtctaggctggagtgcagtggcatgatcataggtcactgtaacctcgaacttctgggctcaagcaatcctcccacctcagcctcccaagtaggtgggaccacaggtgcacacctccatacctggctaattttttaaatttttgtagagatgagttctcactatgttgcccaggctggtcacaaactcctggccttaagcaatgctcctgcctcagccttctaaagtgctaggattatacgtgtgagccaccatgcttggcctaagagacatttattgatgcacagatatgttttattaagttcctgttttggttaggccttatgctagatgctgtcagtaaggaaataaatgcctagttcctgccttcaagatgctcatgacctgttgaatgacaaacttgtcaatcaaacatgacagtacatcatgggagctactaggatagagatcttcccagggggccatagagccctttctgaagaggggccctgtattagtctgttctcacactgctataacgaactacctgaagactgggtaatttatgaagaaaagaggtttaattgactcacagttctgcaggctgtacaggaagcatgacttggggaggaggatctcaggaaacttgcgatcatggtggaaggcaaagaggaagcaaggagtgtcttcttatggcagcaggaaacaaaaagcgagggggaaacgccacacacttttaaaccctcagatatcctgagaacgcactcactatcacaagaacagcatgggggaaactgtccccatgatccaatcacctcccaccaggtccctcccccaacaggtggggatgacaatttgacatgagatttggatggggagacagagccaaaccatatcaggctcctaactcagcctgagggcatcctggaaaatttggtgatctttaatctgagtttcgtcagacaagtagaagttagttaggtgaggaaaaagttgaggactatccaagtagaaggaacacatggaaaggcacatagacggcaggaaaccacatgaagcattcaaggaactagaagttcagaatggctgaagcaaaatatatttgggaaataagcacaggatataagggtgaagagacagtctggaggcagggtgtgtggagcattgggtgccaggctaaggagccagagccaaaagcaaggcagggggcattagaggatttgtgttccagaaacacccccttatgaaagtgtagaggaatgattggcagagactaaagaagaggtcagcatatctttctggcaaagggccagatagtatatatgtaaactttgcaatccacagtctcttttgcaactgctcaactctgcccttgtagtgctaaagcagccatagacaataagtaaaggaatggacatggccatgtccaataaaccattattgatggacacagaaatttgaatttcatatcactttcacatgtcacaaaatattctttaattctttttttctcagcccttaaaacgtgaaaaacattcttagtttcaagacatacaaaaacagatagcaggctggatttggccctcagactgtagtctgatttttgataatccctggactatccctgcactccctggatgggagtgcagagaatgcagacaattcctttgagaagcttatctatgaagaggaaaggagagatagtacagtagctggaggggtgtggatgaaaaggtgtttctcagaggagacctgaaaatgttcatggagagcagaaagagatgatagagaaggagccactgaagatggtggaggtggagggcgggggttggggggggcggtgattgttggagtagatcctggaagaagaggaaaggaagtgatgacatgcagagtacagtttggtcaattcgctttttttttttttttgagacaaagtctcactctgtcacccagtctggcccaatatcagctcactgcaacctccatctcctggactcaagcccttttccttcctcagcctcctcagtagctggtgctacaggcacgcgccaccatgcccggctaatttctgttaattttgtagagacagggtttcactatgttgcccaggctggtcttgaactcctgggctcaagtgattctcccgccttggcctcccaaattgctgagatcaaaggcgtaagccaccatgcctggccaattagcttcttaagggagaaggaaacacttcttccactgtggctggggggagaaagaaaggatgggcactgatgggatatttaagtagatagcagggtaggattttcccagaatgccttgactttctcagtgacaaaagaagcaaggctggattcctggtgagttgtctatatgagcagtgaagtcactcaggatgatgtcaggcctggggagtggggtgagaggagagaggaagcctgtgaaacagattccctagtactcagcaaatgtgtaggagtgaccaggaagtcaataagtgaggaccatggggaaggagaaggtgttagagcttcaatggagggtggaggggtaatgagtttgaaacaatgtgaaacaatgggagtgagcacagtgccaactccttcaggccacctgatgcagggtgtgagttgtgtatacgtgtgtatatgtgtgcaggacagtggggctgtgaccaaatgaacatgaacaacctccacttgcaatagcgtcagagcgtgtgatatcctgggagagacatgggttctggtaatgagaggagatggaggggccatccatgcagtgactgagagggttgagtagtatgtttacaaggaagaacgttccaaggagcacaccgactaacatggaaagggagggaagtagcaagaggagaaacccgggtgtaggcgtcagaagtatagagcagtgctggatggagagagaagtacattctcgggggagcagaagcctcagggggattggctgcctggtagaagttactaccatttcaagattcctcctagaactcgagtacaaagagattgctgaggggcatactaagttgctggggccacataaacagaggtggagtctggtgcttgaagacatttcctgactctggtcagggaagcaatctgtggcttcgggtttttttttttttttttcaagttcccaacactcagtgaaaagtgggtttatgctgggacaaaacagccttggaatgagcagttagcaggtaagctcatttactaggtcttctggggagaggatgatggggagaatgggaaggatcctcacctaggtttcttgcttccacaaagcccagctctgtgtgaacaggacagtgtggttcaagtggagtcagggtataggggaacaggcagccatgaggtttcttgggaagacacagacccaagtactaatagcagagaatgggcacacagtcactggctctgatttgggacagttcctgacctgacagggacagaaagtggaattggacatcgtttgagtgctttttttgtttagctcatcatcctgagagcttagagagctggttagtgagggtgaatacacacaggggcagcttggagttgcctgagtattacttgttttagcaaggaggttatatggccatgagatggaaagaaccatttgagaatcatgagttccaggcagaatgataggaattgaactgacagtggtaccactgatggtatgaagaatttgagaaggaatttgtacttgcagggggaactcatttcaaatgagctcatttcaaaatatttttagttttgagggtggtaggagcctcaacagggtatgctcagaatccaacaggtagaggcctgaagttggggcagcaggccagggcttgagacttgtagatcattcatgttgaaatcaaagtcttgagaaaacaaagagcccacacaaactaaggagcgatcggagaaatacagaaaaaataggaagtcactgttctcaaaagacaaagctccagtatggaggtgagaactgtgaaaattctggtgagagaggttggacaggctgagaacagaaaaaaaatactgtcctgaggaatactaaagaggagagatgagagataggggtcaagggtgacttcggagctggggacatttgctttaaaacagcagtaaaaaggagcaagaggagaaggagaaatccaccacaccacccaagattttttcttcgggagggaagtgtttacgagcattgggaaatctaagcacaaaccgatccaatctttgctgtaaggttgatgagtttctgtgtacagattcctagcgtgagagatgacttatatcagatgtttacatgtaaagaaaaccgactacacagacacacacataatccatacctttgagtcgattgttttatgaactgctacagtgctctgtgtgtgtgtggtgtttttttgtgtttttttttttttctttcccgatgaggacaatacaaggagaatccgatttaaatttaaattacagagatggagattgaggctcctcccaaggggacaacttatcctgttaagagacactgggggacgatattgagatgggttatgaaagatcaattcctatgaaagatcaattcccctgagagctctgagaataggatcaaagtagaaagcgcagtctgcctctgcttggttacactgagccgatgtttctttagccaaaggcagtgggctagtttagacggcctttcattcccggcagcgcctgtgggtgcgtgtgacctgggacagaggggcaaaggaacctggcagagcgagcttgggatgccgcggcccctttaagagcggcggcggcggcgcgcgctccgacggctacccccgggccccgcccctttcccgtgagccctcggggagtggtccgaccgcgggcggccgccggtgaggtaggggcgggaggcggggggagacatggctcggcgcggctggcggcgggcacccctccgccgtggcgtcggcagcagtccccgagcccgcaggctcatgcggcccctttggttgctcctcgcagtgggcgtctttgactgggcaggggcttcggacggcggcggcggagaggctagagccatggacgaggagatcgtgtccgagaagcaagccgaggagagccaccggcaggacagcgccaacctgctcatcttcatcctgctgctcaccctcaccattctcacaatctggctcttcaagcaccgccgggcccgcttcctgcacgaaaccggcctggctatgatttatggcaagttcctcaacccttgtcagccccttggcgctgcccctttctctgcccgccggctgcttcgcctcctctgctggccctgctcggcctacgttcggctccccttctaattccttccattttctgcctcgccttccccctaccccgcgtttctctgcctcaccccctttcctcttcagcctcgcgccccattttatctgcctctccacacctttttcgcttccgaccccaccccctttttcctccgcacccccagccccccaccctttccctgcctaccaagctcgggacccggggctgaggatggaaaacgagtgggcgcggtgtctggaattgggctgggggctgggggaggggagacaccattgcgatccatttctctggggtgtcagtttgtttaaggttcattgaaactgcagtagtatctctactgcccagaatctggcgttcttttggagccagagtcgacctttactcaacacctagctcctgctacgccctgtcctttcgaggttgcaaaggaaaatcttattcttgtggagtccgaaaaaaaaaacccgaacgtgaaataggctacagaaggcttagggcatttttaatgacatcccatttattgtactatgcctctaatatctgatatggatacctgtggttgacccttccaattcaggcatacaaaagtgaggacgaggaagagttaaggtccttcca

SEQ ID NO: 12535 - DNA, 6000 bp, Homo sapiens
cttcacaaatgatgacatttttaaaaatcagaactacttagtgcaaatcctgagtagctgctcctctgaccgtaactctttagaactgggcatcttctatgcagacatttttgaattttccagcagagtcagcattaaactctctaccacagcacatactttaccatatatttatactagccaaacataaatacataaataaaatcaacagaacttattacagaggctcaactgcattataccattccaataaagtgcaatgtcaaacctaataaatttggcttcctcctgaacacattaggttgtaactccaaaccaaaatatgacttccagctgcagcaaaattcataagatagaatgtgtcaggatagatgaaatacctactaatgctgtcctgagccttatctgttaaatttgtggcttttgccatgtatatgtgctcccaagtctagtaagcttaaatgtggttcttactgataaatcactggactcagtcaaaaaagagggagagccagagcccttagagaacaggtatcattaataagtggcacttggtgtaattgatgggggcaccataagtctttctataactttgtaagacatgcagttgtcttttccttctatttctgtacttcccctcttgatctactgcctcttttctcctttctatcccattttccttcctttcctgcccattccagcgtggcagtgttattcaaactgtaagaggcaatctacagtcactcctgagttcagtttagtgggccacagccaagcatttaaaaaatcgactacaatagaataatatttcattatatattgttatattacttattacatttatataattacacgtatgtatatatagtatacacatgcacattacacacacacacaaaagccagtgacgctgctaatccttctacattgcatagggcagcccccacaacaaataatcatttgaccaaatatatcaacagtgttgagtttgagccctgatgtatacatatatgtaactatttgaaaacatctgtaaaatgaaagatggaatttttttgaagttattttaaatgtttgacattacatggctccaactagaatcataaatattttttctaatgctaattctgttatccaacttaaattaagatgttggtttctgactaaaatcaaccatttcaccaagaatgggagtaagggtaagttacttaaattttctgagtctcactttcctcttttgtaaagtctggctaatcatactggcctgttgaggattgtcatgagaaacatagaaaacagatataaaatattttgtataacttatttattttaagaagtgagttaaaaatttttttagtttaagatttatttgcacatacatgtaccaccgttcaattttcaagagttctgtatacatcccatccttactgactccacatagcaggtgccagttttacacatggggaactgaaattggtgtaatgctgtttttgtcccattgtgagaaagtagcacgggtggaatttgaacccaggtcattgggctccaagggcttggatatgtatttgattaaaagaaaaactgccctgggtcttggcccagcactatttcaatcaggccaaaatgcctgccaaataatccaaataattgaattgaattgaaaaatatccaccttttcaataacatcaggaacaaaagtctacaatatcctgtaaactataattactaatattaagggcatgtccgctttgttgcgtttctttatttaggaatttgttctgtggcactcttctttgaaacctttggttggaaagaaactatgttcactgaaaatgcagcacattttgtcttcttttatatgttttaaagctttctagttctggataggtgtgaagaagttgaaaaagcaacattctcaggtaaattacgtactacacagtaataggacatcctttacatcatcctggaaacatatgcgctttttatctcactcatcgcaggtgaaatttctggttttcttctaaccttagaatgaaattataaaaacccaggcaagatttagttttatttctctgtttttccactagttttccaatcgggatctctatgttgtttagtaacacgaacttcacaatagaaagtagcttacagtaaaccaaacccccaccacatgcaatttacctatataacaaacttgcacacgtacacctgaacctaaaataaaagtttttcaaaaagaaaacagcacatggatataaagatacatttacagtgctagtataaagaagaataatgtgatttttattaatgaacagaagtacattaatatggtgtctctagtattcaattctatttggaaattttcctctaacacagaagcttttagaaaattcagcataaagcagctttcaaataaattggcatatttaaatttttcacagacttcaaactctcctccattataactgtctatgcaaaaccctctcagaaagttttatattgctcatcaattttcgtgtctgtgcattcaaagcacagctatccacctacttgaaaattttatgctgacaaaaagaaaagtctgctctttttaattttgtcttactatcagtgtggtcccatgtggaaaggcaggctgctaaatgcttttcgaaggctggtgaacaggttagacttgcttacaaggctaattaaaattgatgcatgccatctattacatgttactactggatctaaataaagtatcacttttcatcattaatgccatgttccttctctactctgtatagaagtttttgcttattttgtatgttccctttggctacagacacatcacccttcttagtaaactgtctgagtttttcagcatgactgtctcattatttctgtattggaatggcctcttagctctgtgttttgcagttgtttataacatctactaaaagcgacatgaaaagatgacacagtcagaaatacggtaaagacagaagtaacagtattaactgacctcatttagttaataatatgatgtgctcagtgcactgcttttagtctgtagcaaacagcacattggatgtttacactaatacagatattgtaaaaagaagagcaatgcttctggatatataaccgtacatacactgcccacgtgcttatgtgagaactatgttattccgaagttgcttatctgaatggtaggaagatttcaaaaaggctttctcaagaatgaaataaaaggaacagtaatgacccttacaactccgaagatacgattataattcttccgactattattaaagcaaactctgtacatcttcataatataagattgccagtagttttctttttaaaaagcccagcataatctccttagaaaaccattatgaaagaaagccaagaagagaggacaggagaagcacaaaagattcccacgggaaggacaagaaaaaggtggttgtcagtgctgtgagaacgagttgaaaggcatgggaaatatggaaacagacaaattccaatgcagatccactagctggagaggtaattttgcgtctaattttgcacctctctcctcgcctccccgtctgctctccaccatcacgcttttcgacagtaagaaggatttggggttttgcagactctagcgggcatgaaaaggatagggggtggcaacgacttgaattaatgacgttctcctacaggatggaggggaaaatgacttagtgtcatcaaatgaactccctactcctggcataaatttatcaaactgcaactttatctcgaatactctggaagagtagaggagaggccctagagaaagcaagtcttgaggggaaacgcaatgctcttggcaaaaaccgcacctccctcttgaactacactgactcttttcacagagcgccttcctttaatagaatcacaaccacctggactactaataagaggaagaagaaaggagaaaagggaagggaggatggcaaaaatcacgctctagaagatccaggcaacgtcgtcgtgaagaataaagggaatcaaaatgggcactggaacgctgctaagggcttgctttgttaacacacttgcacaactcaagttcagctctatcttatgttgaaagtccttgtttacgatcctcgtaggaggttcttaaatatctgcctgcgaactcccaaagactgggcgcttactagttaggggaggcagctgtcccggagggtgtccagctcggatggctgactgctctttcacttgtcgttaacttccacccagtagtcttagtctccccttggacatggtaccgaccgtgtgccattcttatttcacttgaccgagcccgagctgcagcccagggtggaagccgcaagggctgggcagagttccaggcaagagggaccgagaggcgtgagcagtgctccgcagcgcttgtcagagaaatggagcagcggctcctttgtgggctcttacatccccgtcctgggtgcacagcccggatatttgatctgtggggtgattgataagtgagggagaggggggacgcgatccctccctccctcctccctccctcctccctcctcactccctcctccctcctccctccctcctccctcctccctcccttcttcccctctcctccctcccgctttacttccctcctccctctcgcctccctccctccttcctgcaagaagcgttgcccgttggctagctgctcggtggggatctgcctgccctgggggcgccgcccgcgctccccgcggtgctctcgctcctgggctgcgccagtccgaggcggtgccggctcctttgcctccccgagtcgcagatgctgcgggcgcctccgggaaaagatctgggcggcgcgctcgctcggtaagttctgagcactcagggacgcggtggcgacgcggccagtgagccggctttcctcagtccgttgcctttcccggccacctctccttgcgaggggcaccagcgtggggaggctgggcgccatccgcggagggcagctcgctggcggccgccctctaccctcaatccccactggagattcctcaccccgggaccgtccgcgcgggcgtggtcgggctccgcgcctcgcgcagcggggtggcacaggcggccagggagggcccacgcacccggcgcgagctagaagcctccggtcggcctgcagtgcccaagtcccatggcgagggcagcccgagtggccgtcgcggctgtaggtccgcatgccgggcaccgcaccaggcgtctagcaggtaggggcagggaaggtagggctgcgctggcggccggtgcccagttaccggcgatcggggacgctcggagacacctggtctcccggaagcgcccttcggaaatgggattcgacccggcttgcgggcggcgggtgtttagaagaagaggctgcgggcaagcagtgccccctctctggttccccggactcctcttagccccctcgtggcctgatgggcggccgggacggaggtgggctgtaagcccgccggcacccaccgtgtcctgtggaaggcttggagacctgagccaggctctactcggttagatgcgagtgagacaggcgacggagttcgtctttaagcctcccttgcctcagcaaggagagggagcgttttccttattttaatgaccgcctttccctcccttggggtcccagttcaccctgaacctttccacagccttaaaagcccgctctccctagcggagtgctgcggcagttcttcagaagacacggggccaaatgaaacttacttaaagtggttatcgcgtttcaggctgatttgttcctagtaactacgttttggaaagcagctgtggactctcaaggacaggcaggaacgaagacctccttagggtccgagtgtcgcttcccacagttagattacccatgaatttccttgattctgtaggtctcaagaatctcatgagcccccaaccacctccacctttctctctgaatctctctcctgtctctgaaattcttcg

SEQ ID NO: 12536 - DNA, 6000 bp, Homo sapiens
aaggtgctgttctgaaggaactcagaggcacagcaggatggtctctggacccctaagcctggaggactgggttgtttgggaaccacttagcatctcagcaaccgcagtcctacctgctggtttgaaagccaaggctgactctgtgtctgcatctttaacttccttctgctgaagctgctcctcccccaccccccagactgtgccagagtttccacccatgcagggaagacgtttctactgatctcagcccccttgggaggtagcgagctgccccaggaggtgtgcagtcagaggctacagaggccagggacattgcttgggacagatctcccttgcgcccctccttcttaggtttgccaagctatagtgagcacccaccacactccaagacaggcagagtgcagcagggttaagggcatggccgccacacaaacaactgcctgctactgtccccacagagagatggacttctttcctgtccatttgattctctgttcactacagcatgaacttcgtgaggacagggacctcatctccatccccagtgtctagcacacaggcaatcttgattcaaggcagaaagctagaaatcaaggtggctctgtccccatgggagtgggtcctaagggctgccctaagtggccctgttactttttatttccctctctctgctcacaaggtggccttccttccctgggccagctatggtccctgcagtttgaccctgaatccttctgtctgtccttcctgcctctttaaggagaggcgggagagatgcaagactctgctagtctcctttccccttcctctctggcgcagggagggctttgtggctccagggatgacctcagtaccagctgcttccaggagcaggaaggagaattgtttacaggtccataaggttcattaacaagccaagaggaagctctcagctgcctgaaagatccaggtgcacccatttgcttgggtttggggctgtagctgcctgagactgggctctcagcagggctgggagataggaagtcatcacacccagtggctttttttactttccttcaagacatttggcttcaacgacctcttacataaagccccaatataagaaagtggtaagagctgagctgctctggatgaagaacagtagagtctgccttgaagcccaggcagcccccacacacctccctgaaacttccacgtgaacatgggaaactgaggctccaagcaggtgaagcaacctgcctaagatgtcccagtggcagggttctgagtcactcacagatgtgctgattttgggctaggttcctgccatctcctgctgcagcttgcaagggaggtgggagctgggggcagacagagctgcgaccctgagccgctgggaaatggagcagagtgctcagctgactgaacagctggaagaagctagtggttggaaggcactgttggaggcagatgatcaggctggctgggggcaggcagagaagacagacagacacaagggcagatggacaggtaggcaggcagcagcctgagttggacacctgctccgtgggtggctggatgccctctaggtttcagcaaaagcttggatgcaattaactttatttgtttggtccccagtggaggctctgtgctcacgatcccccttagggaaaaagatgatacatttcctttggagatacttagcttgaaaggagggagagtttttgtcttattcttttctgttaataaaatagctcttattttaataaagatccaaaccctccagcagacagttcatgggaaagaaatacagaagatcaataaacatatgaaaaattgctcaggattattcataattaaagtaatataaattaaagcaacaatgagatggatatcatttttcacccattaagccttttaaatagttgcataatattcctgttgatcagactgggaagaaacacggactttcttctaggtgaggcttcactttgtgcaggctctttggaggctcctttgacaatattggtccatataggtcaaaatcatcaacacacataccctagaaccccacaattccacttataggcacctgctgtgcaaacccatttacctatgtgtgcagagagacatgttcaggaatgctcagtgctacattgtttctaaaaatataaaagctctagacacccaaaatatccatgagcaagtcaataaaggagcaaggggaggcagctgtgtagggaaatgctatgctgggctgagaagaaatgaggtagatttgttttcacacggagagattccccaaagcacatggttcacttgaaaaaataagttgcagaatatggcacacacctcagatgtaggtgatctcaattgtgcaaaacactgaacactgaaaacatatagacacacatacaagccaggtatgttctggacccttctttcccctatgaagaagcatctgttgaacctttgggtgagcagaaccttccactggagtgttagggctctgcagcctgttatgtacacttggccatgtgccatcttcctggacccaggcaccgtgtgagacttgaaaggtctctctctgtatcccaggtgctctagtccttcgaggccctgaggttagcacacagactttggggtagggggcttttcagaatggttggagtacgaatttagggccatttcaaaaggagattaccatgcagatgataattatgaaattataattagctagcatgctaagagacaagttcaaaggcacatagcaaactctcgtcacctccaagttgtccttggcactcaatccaagaaaggaaggcatgctaagggggtgagatgctggggtttttgagtggcattgggggttcagggattgggaaggaattctcccaccctctttgcttggctttaggtggtggattcctatgccaccagggggcagtgcctccacatgcacctggaccctgtgctcctgtgcccaagaagccccaccagggccagttgatagcgagacagaaatctggcctccatagcccgaggccctgtggcaagccagtgcccacactgctctagctttgctgacttctgagtgctcctcacaatccagccaccctgtagggaggcttgtccatgggggagactgacaccaaaagaagcgagaaacttgcccaaggtaaaatcttgaagtcatagtgagataagattgtcagatggaatacaggatatgcagctaaatttcaatgtcaaatcaatccatgaatcattctttagtgtaaatatgtcccaaaagttagtgtacgagagaatacttatactgttgtttatctgaaatttaaatgtacttcgtacctatattttcatttgctcaatctggctgggcttcccaggctcctgaatcccactgagctgagcacactcagcagtttctctgctcccaaggtggccctccagaaagctcgaatttcatcacagctgctccactggatctgggaagggcttctttggggcccccaggaatgcaggcagggcctatatcagctctggttcccaagctggacaggtgaggtgggggcagggggcaggcagcctcagaccatgccgccctatctcagctactcctggccccttcgtttccactttctctcccttccttccttccttccttccttccttccttccttccttccttccttcctcccttccttcttcttttcctccttccttcctcctcttcctcccacctggcccaggggctctgggggaagaagaggctatttgtaaaaggaaccttatataaacctgtcctgattccttttacaaatagcctcctattcccccaggggctctggggttgtttcctagaatgaagggttcaccacaggtagttgtagcaatcagggttttccagagaaacagaactgataggatgtatatatgtatgtatgtatgtatgtatgtatgtatgtatgtatgcatgtatgtatgtatatatctgcatatgcacaagtatatagaaatttattttaagaaattggcttatgcgattgtggggctgacaagtctgaaatgtgcaaggcagccctgcaggctggcaactcaaggaagagttgacattgcagtcctggggtagaattacctctactttgggaaacctcagtctttgctcttcaggcctctcagctgattgtgtgaggcccactcacatcatcgaggatgggtctctactttatttcaagtccactggttgtagatgccaaccacagctacaaaatgcctccacagcaacacctagactagggtttgatggagtcactggggactagaacctggccaggtgacacataaacctgaccatcacagtggtctaatcagtagggaagctgagggagaactgggacttagaaggtgcagggcctgaggcccctgggggttctagtggctgcagtcaggtcccacctctcttgcccttctctccctttgttatggctcctgcctaggctgacctacttcaggaaaaggctacctcccgtgtctggggactctggatgggggaggtaggatacgctctccagagaatcccttctgaaggtgtggtatggcctggattgctagcacctaactctgttgtggccactgttggctctcggaccctgtgccaatccctgtttcttcatagaaatgatggagggtggaccccacccttctccccatgggctaaatatggagattcatgagccagagcagttctcacaggcaaaggcacggaattgtatctcttctcctaagttgcttacagagtagcagaggagaaggccactgacctagccagcaagatacaatagaaacagaaagtactgtgtccaaggcctcagcctagagagggagtctcactccacccccagatctgactatatcttccttgagctcctgtttccggaagaggtgattttctgagtgtgactcctctgttcctggcaccctgtgcatccttagccatagcttacaagagaacagctggttgtgatggcaggaggccctcccaacaccaaggcggagatggaaatgtccctggcagaagaactgaatcatggacgccaaggggaaaaccaagagcacctggtgatagcaggtgaggatcccctaaaatacccctaggctacagccaactgtgtagatacgtgtctatacctgtgcatgtgtgtgttggaaaaggtgcatgtgtgcacggaagtgtttgcacatctgtgtgttggccgggcttcgaggatttgtgggttgatgtaagggagctaggggaaaagggatagatgatgtgagcatttttccctgggagggaggaggatgggaacaacatgtgtagtacctctgtctcccccttatccaagccaccacagtctctgttgcaaaatactcagagggctcaaattatgagaccagagatcaattctctctcccaatcctccaattcattttcctgccatttggaggaaaatccaaattccatgatctataagattgtatcagcctcctcaaaacgtttcatgctatgatatagacagaaaataccatttctatagcacacaaagggatccagatcacattgcatttatgtttgttcttacgatgctccaagcctgcttcttcccccaaagaccttgcatttgctgtttcctctgcctggaatgctctttccctcaatttcccagggctgggtcctttttttccttcaggtccccacctcaattgctgtctcctacttttctaggaggagccctttccttccactatgttaccctgttttgatcatttatggagcctgcatctctctgtctgcatttgcaaggatagattgctttctgttttacacctgtcattcccccttatacacaaacagatggtcagttccttgatagctggaatcttgttcttggtcattggtctctaggttactggagagtaacctagtctcgagctcagccctcaggaaattccggtttaacttttgaacagatgaac

SEQ ID NO: 12537 - DNA, 6000 bp, Homo sapiens; identical to SEQ ID NO: 2643

SEQ ID NO: 12538 - DNA, 6000 bp, Homo sapiens
aggaagatgtggggaatcagggataaaaggggtctcccaggtgcacaccagccaccagcatctcgacctgcctaggatcatgccaggcccaggagagggcagggtggctgccagactgggcgccctccttccgtgccctctccccacctgctccccagctggtctaggggcccaccccgggcctgacctacgaggcctgggccacacctctcgctgttgccttggcttgcttttcctctctgggttctgccgggcctggcctgtgttctaggagcctggaggtggagagagatgggggactattgttttaaggaatccccgtagtgagtcacgtcgctgagtgatgggcccttctgaaaggcgggcccttgcttggtgggtctgtagggagcaggtgacggacagtctgccttcaggagggcccacggtggagggcatgtgcccaggtaggcccccaggcgtccacctcctgccctctgcccctgagttctgcttccttcttgcttcggggccacggcatcctgggcctggctctggcttccagatggtctgaatgcccaggagccgcatgttctcatcactgagggtccagtgactagggagtgactcgggagctgggacttcctggcagtacatgccccatcatccctgtggggatatatgtccacgcagaccccagaaactgaaggggtgctcgactggggtgcagtggggctgttttcaggaaagagaatggcgtgaatcccgatgcgtgcatcacctgagatctggaggacggtggtgggatctcgccctccatctgttctctcctccataaaggcggagcaggtggccgagtggaatgcagcctgggcctgctggggaggctttcaggggtgtcatcagagcgtcccagcaagggcggccatgacccacctcaagtcacatggaaggcagggctgggagaaccagggcaaaagcaggaggcttcctgagcctcagtttccccctctgtaaggcagggagagttctcctggccctcgtagggtgtttccaagggtgcagtgaaagaaacatgtctgtcaagagctggcatgcagatgtgggctcaaaactcagtgtgtgccatggggtcctgagaggggccccatgggagcgggggtgccccctacttagaaagtgccgagccttctggagcatgctgggctgcccagggcctggaggaagtccatgggggactaagctggaggtgccagcagagcccccaaagccagggagggacaacataggggaaagaggacccctgggtctctggtcaggtgggtttgagtcactgggtggggagtaggcactctgagcctagttgggaggtgagggtctctgggccctgctgaagagaagagtccagaaggcggttgagtaatgggcctggacttgggccatcccctccagcagcccctggaggcagcagccagggacccccctggctgtctcccaccacgaggccggccagtctgtgcggggatggtgcaaatgccggaaggtgcgaggccccctctgtggaggttctcatttcaatgaagccaattaaggtcagaaagatgaaagagcacagaaatggtatgttccctgcccttttggtgcctacagaccattctcggcagccagcccaggccggaaactctgtcaggcctgcagaactgataggcctagtcacttcggttcttggccatctcggcgatggctgctgtctttattgggcctcagggaggccaccgcccaggcttatatagaacccagaaaagcaaagtatatgccatttggtctgcacagcagccaacagtcgctctaaatgggccttactctaactgatggatcctgtctgccctatagcctgttgcattcatgaagacagtgagggttagcagagcaccccgaccccaccctgtcctccaggatggagactccacctcccaggactccaagttcctcccctgtgggccaggcccccattcactcattcctccaggcccccggccacatgcgggactgaccacgcggtagacttcctgccgactccataccacgtgtctcaaagagcttagggcccagctggtgggagacaagctcacagatcatcgcagcgccaagcagagtgaaataggaatgggtcgcgggattatagactcaggcgcaatcagttttggctggggaactggcagagactcctggagaatgttccacttgaattgtgactaagaggattcatcggaggtcagcaggtggagctggaacagagggcgtgcggtcggggctcagagctggcagggctgtgtggctggggtgggagtggggctgggaagtgctcagaaggaatctggccttttgcttgatggggatgggagactgaaacaggggctcgctggagtgatggtgcctgaaccaggaaagtggtgactcacagcagggtcatgaccagttgctggactagagagagacctaagaggtggtccacaggacgtggagcttgcttgctgaggggtggggatcctgcagtggggagggccagcagggccagccgaggagaaggaagttggccccgggaccatggcagaggggaggactgcctccttgcccactgccctccccatgagtcactgtgggtccagtcagacacagccatggctgcaccagtcaggagcagctgtacgacctggtatggttctgtctgggccaccgctgtggggtcaggggcagggaccgggtgggggaggacagagctggccttgggtatgccatggtcagaggagggaggatgagcacatgccaggggagggccaccaggcctcggtgaccgtgccacgaggaacccctgctctgaggaacaagcatttctgtcatggccgtgtgccacccaagagcctaccacacaagccattcactctgtcacccgctgggggcacagagcctgaacctgacagtggcacaaagttgctacatggtgggattgttgaggcatgaggtgactggagctcaggaaggcagggagaaggcgccctggcaggtgcaccgtcacaagcaaaggtcctggggtggggaggggaggctgtctcgagaagacgaggagtccaggtgagagccgaaagctgccattgctgccttgaggggtcagaagtgggacacccagctgtcctctggctctgccacttccccaagccagcctcagtttcccgcatcagaaaagcaagggcaattcgtccacacagcacccccagaaggagcccgcctcacctgggacagcttcgcttgctgtcctggccccctctcctcagctttcactccttctagtcttttccccccaatgcctgtccccagacgccttgcctcacctttgccccagctgcaaccccacagctcttggccctcgggcctgctgttctccctgtcccagctagagagggacggggttagttgaaacttgttgagcacctgtcccagcacatcaagccagtgccaggcatgtagtagctgctcggtgaatatgtgtcaggtgaccaactgcaagacagggcggggagaggtggggagagaggacggcacaggcacatggccatcattttgtccccacatctcccagaagtgaaggctgcttcatgtgcaatgtgtcgcgagagtaaacgcgcaggtgcccacgcttttcaaacatgggtcactgtggatggatgtttcgtgaagtatccaccagggcctctcctgagaataaggccatggacttggccgtgtctgctttggctgcctgagggctttctcccctttcttcagggctctgggccactcgtttccaacggatgcttctgagccaggagcttccccagagacgggggttcagggccctgctgagctgccaggagggctcttggctgatgtcaaggccaggccatgtgcactgaggccatttcagttccatgaggatgtgacaggcttagctcgggccgggaaggagcggagagagaggagctgcagtgggccccgccaaacactgtgatggctgcagaaggggcagcctgggccctagcggatccttgggtaaggtgacggggacagggagagggatgacaactttgcgatgctcggcagagtggggccagggccgtggcctggatgctttcagtgtggggagactttggctccttactttgtcatctggagggaagaagagcgtggaggggagtgggtggcaccatgctgtgggctgggacgttggcagactcaccagcgacctgtggctgctttggctttctcctgtgtaccctctcctcctctcctcctcagccactccctttatcccctccctcttctccctccctccatccccctttccctccctctctttgcctttccgtcttgtccctctctcccctcccctgtttcccacccttcctccgggcctcctcctttcctcgcccctggccccccaggtactctcagggccacagaaaccgtgagccactaaggccacaccagaagaccaccagggactcatggcatgcccgctgcacagggcgcatcttaaccaggcaagagcagggagtgaaccggagtgaacaagcgcaggactggtggtggggcgcgggcaagaccagccactgatcagtcccagcacgctgccctcacttcagcgtgggttcccgaatggatctggggggcagtgacagcctctgcctccagctagctagtgttaaccactgcagggtcctggcaggaggcatcgacacttcccctcccccacctgggcaagccctccaggttctgggcacccatggtgggcaggacccgggagtggcctggctggtggggcctggcagagcatgagggccactggcccagcctgggaggtgatttctgcacttcgagggtcatggcacagactgagtgaagatttgccgagaatattctggaagatgggacctcagttttgtctcaaccactcccctggcttcttctcgcctccatctccccaggtgtccacgcttagcagctttctcaccgccgccaaaccttgcctgggcactgggaccgtgggtggccgcctgtccctagctgtggctgagccaagattgcacttgtgagaaggcctgacaggcagcatgggcgacatggccaatagttccatcgagttccaccccaagccccagcagcagcgggatgtcccccaggctggaggctttgggtgcacgctggcggagctgcgcaccctcatggagctgcgaggggccgaggcgctgcagaagatcgaggaggcctacggggatgtcagcgggctctgccggaggctgaagacctcacccacagagggtaagtccctctcaggctgcatgccacccagccctgctcccagccttcagaggagcgacctgaaggcatccttagccccaaggctggccagggtcaagggccacctgtgcccctcctctcagccatttcccttgagggggagatgccctgggtaacctgacctgaccccctcatctccacacctccacaatcaggagttctccgctctatagagcgagactggggagggggagatgggaacttcatgggacacacacacaggcggaatgggccccaaacagaaacccttccgaggaacagggcagggcagggcagggaggaggaagacagccccatctgtatatttggggatttccggtgtgctcaaccctgtgttcacttaagggggatcagaacaggaggaagggatgcagggtgcaagccttcggagtttcgggtgaccggggcctctcctgggaagagagaggatggcctggggatggcacaagccatttgggtctggcaggaaggggtgaccgaagctgggtcacgggaggcccagagtgctgatcagaggtggcactgactggccacaggctgtcccaaagaggcacaagcccagggtagtgtcggtctcactgctgagggaggctctagaaagcccggtgagcactgtctagaaagatc

SEQ ID NO: 12539 - DNA, 6000 bp, Homo sapiens
tagcctggatggtcttgatctcctgacctcgtgatccacccatgttggcctcccaaagtgttgagattacaggcatgagccaccgtgcccagccctgaaggctaggttttttttttgagacagagtctcactctgttgcccaggctggagtgcagtggcacaatcttggctcactgcaacctccacctcccgggttcaagcgatttccggctaacttttgtatttttagtagagacaggggtttcaccatgttggccaggctgctcttgaactcctgacctcaagtgacccacccgcctgggcctcccaaagtgctaggattacaggtgtgagccaccgcacccagcccgaaagctaggattttttaaagatagtttggcggacagggggctagggaatgggtgctgctgactggttgggtgggggatgattcttgtgtgctgagctgagtctgcttttaggtagggccacaggaccttgagtcataggtctatgtggtccgggtggagccatctggtagtgagaaatgcaaaaacctgcaaagacgtctcaaaaagccaaccttaggttctacaatagtgacattatctacaggagtaattggagaagttacaaatctcttgagctctgaacaatggctggtcatcatgaatgcttccatgttagcagaattcaggcccctctcatcctcctcacctgatggcctttcattacttttacaaaggcggtttcatcttgggaaggtctgttatcatttaaactataaacgaaatttctcccaaagttagcttggcccatgcccaggaaagaccaaaaacagtttggagggtaaatgcagacagggttggttagatcagctctctcactggcagaattttgttactgttacagtttttgcaaggcagctttagggtgatgggtctgcacggaatatatgcatgtaacagaaccgcgcttgtaccctctcaatctataaaacaaataaaaccagcctaataaaagtttacataaaatgtaaaaaacaaagcaaagcctcctttctgcgggtctgtgtaaacgagcacagctggtgggaagggcgcgggtggggggttctgctgccccccatccctgccctgctgcaggccctcgcccccagccccattctttctgttctccgcttggctgcagccgcacgtcggccccctccccaggagctggaagtacaaagcccttccaggtggactctggctccccctttgttcccagcttattctaattccaaagctcattgtgcccggctcgccttcagaagaggaggcgcccccatcctgtctccagctgcccatcctcccaggataaccagtcaccccagggcccggtggcccctcacccagcccctccccggtccgcagctgccctaggcttgagtgggcgctggctccaattctcaggcctcccccaacaaacaggagcattccggctagcccccctcccctgccctccccccagctccccttctcctcccctctccctcctcctcagctcctactccaaccccccagccccagctggggcctgaaaggctgcccactccctgggacacggtaaggggagggtgcagctctccccccgcccctccccggtcgcctctgccccagagaacagtttgcttctcacccagaagccaccataggagctctgggctgggcacaggtcgcagggcacccccaccccctcctgcacatgctcggaaccccccttcagtgagtagaacacaagggcctggcaagacaggcggaggcttggaaagggctggcgggggacagctacccggccctcagctgggggcctggagagcccaccctgcccctccccagcagctgctgcccccgggccgagcctgacgcgccttgacaaagcccgagaacgctttgaagccttcggacgtgggagaggacccagccagggatggaaatcgctttgcctttgttcccccaactgctcagcagctcgtgggagcagcctcagaagaccctgtcactggccgcccgggtcagagcctgtgacagagaccagagctccggccggagctccccgccggaaactccagccttaccagcctgaacttcatgcactgctcaaagaggcccagctcgccctggctgggcaggggcggctcccagggtggccgacgtggggagggttcctgaacctccctcaggagcctcctgggacagagtcctggaggtcagcagagaaagggaagcccaggctgtgggccccgcgtggagggaaaactcagggggaacgccccgaggctgggagggcacagccccatcacactccatctcgtagtcttggagaaaaatttagttctacctccagggcacagaaaagcccaaagaagggatgagataaaggaggggctggtcagatttgtgcttcaggagggtccctctggctgctcagagaatgcagtttggggtctggcccaggccgtgaggaggagttcacagtcactatggggtccagaccagctgggggcgggaggcagggcctggcccaggggctggtagtgggtgcaccccaggctgggctggcaaagggcggggaagaaggtgggtgtgggaaggggtggctgcctggagaagagcccagttccaggaggtcgtgggagtcaggtatgggggcccactggacctcccctcagatgtgggggctcccactccgagggtccatggagcagtggcagccattctggacagccccccacccttcacttctgtctccagtaccctccagcctggccacctcgccctctgcctcggcctcctctgatctcacaaaggcagcagcagtcaggggtggcgactccctcatgatcctgtccctggcctcggaacccaccggaggagtaaccgcagcagtggtcacttccccaaagtgccatcagctctcctacatccttctcgagcctctgctttctctcccttccacccccacccctttgacaagcaacatctgaaagtctcccctgcccgcggctcccagagctgtctggccgtggcctgcactctccctcaaagcggccctcccccaggtcaccgtcctcccttcgatgacatcacgcgcccaccccgcactcctgctgggctgaggccctccgagcctacttcaccgggtcctcttctttctctcaaaggcaatggggtttgcctgtggtccagctgggttggccctcttccctctgtcctgggtccttgagtggccccgcttctttaggccatctatgagtcacttctctaatgcccctgtctccagaccagcttcagtcaaaggctgggccagagaagaccctagtgagaaacttctgatgagcagtgtgaccttgccacctcaggggtacccacccaccacccctggtctaagcacaggtgacaccgcctgtctcccccaaccacacacaccccttgaggctcctcctccaagcctgggtggggacactgtccctccctcacccagcaagctcaatctggcttgggccggaactgcttttcttcctaaagctggacggatggccgcgggcttagcttaacgggatgagccatctggggactgcagtgtccacgatcagatcagggagcttgaagctgaggggggcacactttacctcccaggccaggacaatgaccacttccttccccaccccacccccaggctactcttagccctagaaaattctaaacaagctgctcagctggcggcggagaggcagcccaacaagctggctcttgctagggaggcctggggggtcctggggagaggaacacggggtgggtggggggcgggcagccaggacctcaggcctgaggcctttggggaagggtctgtgcacctgccaggcaccagggggcagccttgccttgttcccgctccagtcccctcaagtccgaagcccctacccactctcacgccaggcaggggtgggggccgccggggtcatttacccgggccccttctctgccttgatgacaaagtcgaggcttgctcatcagccaggcaggctcccctctgcccactgtggagacacagaggcctgtcacctgaagagctggtcccggcctccagcttccagggtagccgggaagctgtagcccccagtgggcagcggtggagagagctcaaggaaggagggagcaccgggaggagacggctgcagcctgccaggagcggggagaaagggagagaaggggaggcggagggctgagggggcccgggggacgtcttcccagggctgggaggggccggccgggaagcctgggctgcactaggagccggcgaccctggggcgaggggcggcccggagccctgcgggaggagctggcggccgccccaggtagcaaccatcctgcctcccgctggagcggcgtctcctccccgggaggagggcagggaggaggtgggcggagtgtgacgaggagggcgggagggagggatgcgggagggggagggggaggggggccggccggccgtgggggtggggcgatagtgacatcaccccggagtcggtttttaagcggcggccggccggggacggggaagagagggatagtcggagcgaggtggcgagtcgctgagcccgccgcggccccgagagcggctgcagccgccgccgccgggaaggagagggcgaggcgcgcccgagccgccgccgccgccgccaccgccgccgccgccaccaccgccaccggagtcgcgggccagccgggcagcctccgcgggccccggccggggcggggggcgcgggccacaggcccctgctccggccgccgcttgcagaccgcgggcgccgatgtcgcccgcgccccgctaggctgagcctcgggtcgggcgaggagccgccgcagccgccgccgcccgagccgcgggcaggagcctcgggagccgccgccgccgccgccgccgcccggccgggccccgccgccgcccgcgcgcccccgggcccccgacacacatgagattcttcaggctcactttcaagtgcttcgtggactgcttctgactgcgccgcccgcgccccgcaccccgccgcccgcccgccgccccgtcccccggcccggccgccccccggcccccggccggcccgcgccctcggggccctccccggtgccgccggtgccccccgcctgaccgccgccccccgtgaggcgccgcgaccccggcccggccgtgcggcccgccgaggccatggcgaagaagagcgccgagaacggcatctatagcgtgtccggcgacgagaagaagggccccctcatcgcgcccgggcccgacggggccccggccaagggcgacggccccgtgggcctggggacacccggcggccgcctggccgtgccgccgcgcgagacctggacgcgccagatggacttcatcatgtcgtgcgtgggcttcgccgtgggcttgggcaacgtgtggcgcttcccctacctgtgctacaagaacggcggaggtgagttcccccgcccgccgcggcctcctcccccagcaggccgccggcccccgcccgacccccggagccgccgcggaggggtgaagtccgggcaacgggtggcccccgggcacgcgggggtcggggccgcccctcgtccgccgctgccgctcggtggccgggccgggcgcctccacccccctcgcagtcatgtgcctggcatggtggggggagggggccggcgatgcccgcgaggctgccccccagactcccgggctgggaggagcgattggccgccgaggtgggaaagcaggcctgcgccttggggtctccgcgaggtaaggagccctggctgcccccacgggtcgggcacacaagcggcacattgtgtgggccccccacgtgtgcacacacacgaacacacacacacacaatgggccactctgtccctccccctgccctcccctcccctcgcggccctcccgcccctcccctctggcccgggcctggaacactgggtgcccgagcca

SEQ ID NO: 12540 - DNA, 6000 bp, Homo sapiens
tgacaaagtgagatctgtctcaaaaaaaaaaattaaattaaaaattagctgggcatggtggtgaatgcctatagtcccagctacccaggaggctgaggcaggagaattgcttgagaccaggagtttgaggttacaatgattatgccactgcaccccagcctgggcaacagagcaagacctgtctcaaaaaaaaaaaaaaaaaagatggcaaattttgtgttatgtattttttcccacaataaaaaaattactcaagaagaaacagaaaacctaaatggtcccataattattacagaagttggattcattgtttaaaatctatagggggacaggcaggaagctacaaaaacaaggaaggccaggccagatgcggtggctcatgcctgtaatcccagcactttgtgaggccgaggcaggcagatcacctgaggtcaggagttcaagaccagactggccaacatggcgaaacaccgtctctactaaaaatacaaaacttagctggacgtggtggtgcatgcctgcagtcccagctactcgggaggctgaggcaggagaatcgcttgcacccaggaggcagaggttgcagtaagccaagactgtaccactgcactccagcctgggcaacagagtgagactctgtctcaaaacaacaacaaaacaaaacaaaacaaaacaaaaaaaacaaagaagagaaaagaaaagaaacaaaacaaaaaacagaaaataaaaaacaaggaaggcctagatggttttacagatgatctccagcaaacatggaagtaactgatcatctccatcttagactaactgttccagtgaacagctgaaaaaggaaatactgcctcaactcactttacgatgtcttgataccaaaaccagacgaggataataatacgaggctaaaaaaaaaaaaaaaaaccacccaatccagaattgtatatgaaaaaaatacatcacgcaaagttgagtttagtccagaaaatacaagagtggtttaacatttaaaaatgaattaatgtaatttgccacattaacagattagaggaggaaaaccctgtgatcatattaatgcattcagaaaaagcattttataaaaattcaacatatagcacactaggaatgggagggagctttctaaatctgataaacatatctaccgaatgctccctgcaaacatcatacttaataatggaacactgagaatgcctcctatgctttttttttttttttttttttttttttgagacagagtttcgcttttgttgcccaggctggagtgcaatggctcgatcttggctcaccgcaacctcggcctcctgggttcaagcgagtctcctgcctcagcctcccaagtagctgggattacaagcatgggccaccatgctcggctaatttttttgtatttttagtagagacagagtttctccatgttggtcaggctggtctcgaactcctgacctcaggtgatccacccacctcggcctcccaaagtgctgggattacaggcgtgagccaccatgcccagcgcctcctatgctttcattcaaaggaagtaaaagcaagagaaagcaagtccaggggaagtaaagcaaggaaacgaaatcagccgggcacagtggctcacgcctgtaatcctagcactttgggaggccaaggcaggtggatcaggagttccagatcagcctggccaacatggtgaaaccctgtgtctggtaaagatacaaaaattagtcaggcgtggtggtgggtgcctgtagtcccagcttcttgggaggctgaggcaggagaactgcttgaaccagggaggcggaggttgcagtgagccaagattgtgccactatactccagcctgggtgacagagccagactctgcctcaaaaaaagaaatcaaagctaaaaagactggaatagaagaaacaaaatggtcattacttgcagatgataggattgtgtacgcagaaaatcaaaaagaatccacaaagagaacccaaacataattattagacttaatatgagagtttacaaggttacttgatacatagaaatccattgtttttctatgtaccagcaacacacagtctgaatgggaattcaaaagaaggtagccaggcgcagtggctcacaggctcacgggccagcactttgggaagccaaggcgggagggccgcttgagtccaggagtttgagaccagcctgggcaacatagcgagaccctgtctctacaaaaaaattacaaaattagccaggcactgtggcgcctgcctgtagtcccaggtgtttgggaggctaaggtgggaggatcacttgagcccaggaggcttcagtgagccatgattgcgccaatgcaccccagcctgcacgacagagcgagaccccgtctcaaaaaaagaaatcagattgataaatgctatgatattaaaattaagactttctgtttatcacatgatacatcagcaaactgagaagacaagtaacaggtaggccgaagacatacaccccagggattggtgtggaaaatacagaacacctgcaaagtgtaagccaagacatgcacgggcatttgacagaagaaatgaaaagtgctgcaatatggccggtggtcaaggaatgccgattcaaaacccagcagggcaccatttcacacccactgtatgcgcagaaactctcaagtctgctctctggtgtacgtgaagacgtggtgcagcagtggcagtgggggtgtccgctgggatgccagcatggagagctacgtcttcagcccagcaaacgtgaagcccacgtcccactgacccaacgagtccccttccagcattgagaagcctggcacacagcaaggagacgacaccagatcagttgacgctgccttcccatcccttggtgaggggacccggccattgcaggataaatccagcacgactcccctgacataagatgttccggttccccaaaccagcctagatcctttctggttacaccagcttcagaccaggggctgccatagccacgcctcttatctgctcagaaagcgtagaaggtgcatatgcaggccatatacacacatatttatgaaaatggtgctgcctgtggatggatttattttcttttttctttctttcttttcttttttttttaaagacagagtcttgcactgtcacccaggctagagtgcaatggcaccatcacggctcactgcaggcaccaactcccaggctcaggcgatcctcccacttcagcctcccaagtagctgggactacaggctcgcaccaccatgcctggctaatttttaaatttttttatagagatgggggtctcactatgttgcccatgctggtctagaactcctgggcccaagtgatcctgctgccttaggctcccaaagtgctgggattacaggcgggagccacgacgcccagcctgatttattttcttctgtggaaaggaaggagaaacccattccccatgccagattgcaggcgtctgtctcatccggggccagcaaggacatgtgtgtgtgtgttggggtaggcatggggggaaggacagggagagggagagaggccagctggctcccccaagcctcccctcctggagcttctaaatccctccctggctccttcaaggctgcctggccttcctgttggggagagacccctcgccggctgctcactcgctttttggtggtccttcccacgggcctgcctggtctgcctccacatcctcagcggctgcaggtgagaagctgtggatctggggcccagtggtccagagcgtggcccgtgccagaatgcccaggttcaaatcccatctctgtggaatgcactctgaagaaacgacgtcaggtcatggccctgggcaagttacccacctctgtgccccatttctctccatgcaggttggaaagaatgacacagctgctcagggaagcacccataccccgagtctgctgggcctttgagctccagggccaacacctggccctataccctggccgcccccagggctccagccacctgagccaagcttctcacccccaggcctccccagccccatcaccatttcctcctccctcatgggcccctcagtcttaccgtcctcccacttccgccagcccctctgtggatggccctgccacagggggaacagtgccccagcagaaaagccccagggtcgcctggattctcctgccttcgcctcctgccctgggtccaacgcacagtcttcagaatgctgcctccccagagcgcctctagaacgcgcccgcctctctccatgcccatgaccaccactggaccaggcctccccacattctctgccccagtgccaccagcttgcagttgcccatggcgagacaagttcaagttctcaagcctggccacaaagaccccacctgatttgctgacctccgccacaccctgggagacggcccttgaccaaccttgtgttccagtcggtgggaaacactggtttttcctcaacgccacgtgggcatgtcacgtccaggcctggcctggggtaggcctcagctccatctcctgcccaacgcctgccaaggttcatggttcaaggtcatgtagcctgacggttaagtgaaggggccctgtgattgactcagccttgccacatactagctgtgtgactttattcaagtttcctaacctcctgtgcctcagtttcccaacctgtgtttgtttctggatggtgccagtgccaagcccaagcctggcatccagtaggtgcttcgtgccaggttatggaatgcccacccaataggagggcgctgccgtctctcacctgccaggtgcccacggtcagtactccatcatgcccgctgcggccagcagagggcagcaacatcctgccctgtgccattgggcaaaggggcgggcggagagaggctgggctgcctggccgggcttgttgggatgagtcggactgggcacgattgcattgtggggagggaggctggggctctgtgagacgtgctcctggcaccgccagctgctacttggccctcgccggtggcccaccaggtaggcaagagctggggcaggcttgggcttgggcttggggtgcaggggctaccagcctcagggcaaggcatcagggtctcagggccaactggctggggtcaggcaagagcgctcgggtgtcggcccagcctgacgacggcactaggtgtctgggagcacggtgtcccccaagtggtagccctggggttaggaggtggggaaccatgtttcttccccgaaatgggaaagccaacgccagcctcgggcagggtacagggtagagaggctgcccgcctggctccccacccccacagccacccaactggcccagccaggtgacagcagcccactgccaccttgccctggagcctactgctgccgtgctgtgggggaggcagagaccccatccccagtgcacctgctcctgtgccactggccagggtggcctgtgagggtgacagggggtctagctgctaggtgcccctcccttccccatcccctgcatggatggcatctaggccagcaggacggtgcttcagagggtggggtggacagccccggcctgtggaccctctgcctcagcccatctcaagcagcctcctcccgtggtcctgctcgctgccaccatgctgtacctggcaccacttcaccagtccccaggggcagggctgggctgggggtgtggaggaagatcttttggacaaaggcaggcattgagggccaggactggcacttcacccaggccccaaggctaccagccggcatttgcaggggctccaaggtccaccccgtgcccttcacagggacccggggagccagggaggggcatgcttagtgacacaggggttgcagggccagagggggagggctggctggaggaaaccccggccctttgtccccggatcccgggggtggctccctgagggtgggaagtggcaaggagccccctgtccagaacagcccagtgggggtgacagcactagcgagtgg

SEQ ID NO: 12541 - DNA, 6000 bp, Homo sapiens
ctggcccctggccctggagctcacccttcagggccacgcggttccggcggatggccatgatggcattgcgaatgtcctcttcatcagcattggaactcacgtgcacctcttcaaagtccactggtacacatgcgtgcctgaggcacggcagggtcagggaggctggcccagacccccccgcacctcctccaggaagcctgcccaggctacctctctcctgttgctacctgccctgacctggctctgactgagaagggactgggcccaccttcactgactgatggggacacgcttgaactccacaatgcacactgtggcaggactggtgccaccttccccgagcccaggccagtctggcgggatcacaggccatgggacgcaaggcctgggcttacaggtcgtcttgccatggcctcaccgagtgcttctgggcgcaatgcccctcttggcacaaagtcctcagggccccctggctgaggacaaggcggggacccaggagctccatacctgaagacggacttgacatgcagcatgagctctggcccgatgccatcccctgggatcatggtcaccgtgtgccgcccgccatacttagcggacggaggctgtgggaggcagagggtgaaggtgggccttcggggatcccacatgcccccagctcggcccccatgggctcaagccaattcccttcttcccactggcgctgaccccacaggctgccccgtcacaaggtgccaacttggggcagccccgtcccagacagggctgctcatccagggctcctgggtcagcagcagcccacccccacctggaatttagttaaccccaaagcaactaagagccccccaaacctaacaggcagagaagaatactcacaattgtttgttcctagaaaggatgagaaaggaagaagacacaatcagccaaggttccaagagcaaggccgtgaccaggaaagtgggaccttttcccagggggatgctggctagtacaactcccagaagaggggtgggtagcccctggagaccacgtctcagaggacaggacacaggccgtgcacacacgcgcacaattgcggccacatggagaaagacacatgcgtgggcacgggcaggtacttactgaaaagatgttcctcgaggggacctcgtgggcgcctagaacctggcagagaccaaatgccagcggttggtttgatgtctaacccagaaagccaagttggaaggaaaaacggaccgtccccactgtgcccaggcaggtcccctgtctgtgcagcatggcccactgccaggggcacaatagataattagctccaaagcctcagtccccagggccggcccgctggagcacctggaaagtagaaggcgctccagcctcctgcctccttccgctcttcagaaaatttcttaaaaggcgtgtccctgccctccctcctcttttttgcttctgattatttttttggccagttattcccgctcagcgatgtttgtaacatgcaaaaactggcaaactaaccctggtacagcagggaaatcattacaacaaaccacagatccatgacaacagtcacgttatcacttcgccgatcactttttcttattacaaaagcagcatgtggtcgctacagaaaaagcagaatagggagataagaaggtagcacccagcctccggcctccctgagacaagcactgctggccccctggggaatggcccttcggcattagaaatcgaaaacaaatgtgtagggacatccagccatttctggaaggttgataacagaaacccaactctaggaaggccttcggaaaggactgctggatgccgaatgtccccaacgccctgactggaaatgccggacagcttcagagccaaagctgcctgagccaaatgtgccaggtgccaagtgacctgctgtcctggaagaagccccacctagaacacacctgagacggtggcagagccaaggtcttccctgtcacttggggatgccctgccacttgaccaccaggcagcagcaaagtgttccagccaatggcagaagcatcatagccattggccaaagagccatgccttccagctagaagtccagaaaggctcgggcggagtctgacctctccctgtctgtgtgtccctggccggcactcatcagtccaagccaggggctaggagagggtgcccacaaggaccagagccccgaggatagctcagctgatctgtgtggcacctggatctgcaagcacaggcacggtcgggacttttctgtcttctctctagcgcttatcaacgggtcgggacttttctgtcttctctctagcgcttatcaacatctgaaatcatcttatttgggggctcttgtaagcacgcagaaagcggcttcgatggaccttcctccagggagctttccctgatgccctaaggctactgagctgggaccctaaggccctacttacccccttccctaggttatcactgcattgctccctcctcaacccctgagcccgagaggaggggccaagtcagtgtggtccaatactgtcaccctaggacccagcacagtacctggcccagagctggcacataaggaacatttcctgagtgaacaagcacatcagaaaatgaaaaaagatctggagactagggaggcctcggtccaaatccaccatccactcttcttgagatggcttcatggcctcatctgaaattcacagaacggaggtacctactttccgtgactgttggaaagattaggggacaggaggtgtgtgagctgctcacagtagctagtgccacacagcacgcctgccccttcaccccactggcccctcaggtcagagttcaaggctggtgtccctgggaggtcacgggtggacccctgcagctcccagcagtagttcctcctgggcttcagctgtggcagcaagccaatctcctgagagcatggacctccctcacagatggcaacatcaccaccagggctgagctgaacctctctgccacccggtccctgtgccaggtgttcctttgggctttggcaaaagacccagagagcgctccagatggacttccctgaccttactgtacagatgcaggcaccttccttcaggaggtcgcaaaggctctgccttgtgccctgacttccctgtgaagccaccaatcaaaggagccaagtgtgaggcaggatgcaatatgtacacgcctcccgctctcccatcaccctttcatggttccatggaaagaaagaacatccacaccccacatcttatgcctgctgaggcttctgtctttggcatatttctgttggaccatgtgtcaatggtggctgcatgttttcctatggcgtccaaatcagtgggattcaagacctggggttcctctgtaagggttctcacacccaggacggtcagtctcagggcaaggcactgcccagctacccaccgttcactgtcccctactcccaccccaacgcacacacaggcacacacacaggggaggtcagggaggaggcacacatgtcttcaccaagagcctacaggagcccagttgctggagccatcagagcctctggaaagccactatatactgccgtcctttcagcagcaaggtgggagaagtcagcatcgtcaagagaatttcattaggcacaagcagtctcccccagaggtcagaaggagaaaacatggcaagtagagatgtccctggggagtggccgcaaagtcacggagttctggaaggtcagagttgacaggatcctttgagaacatgaagtctcctcccctctgggttccaaaggggaaactagaacccagagagaggaggaaatggcctaaggccacgcagtggctcagtgtgggagcatggcctagaggtcaaacctcttacccatcagggccaggtgctggctggcagctgcttcagatggtttccagcccacctaggacctaaattaacctcttcttaaataagtgtaaggaaagaagactcggacctgaatacgcaagaccgcacacggagaagagcagaagcaaaacccccgcagcctcagaaaccctagctccttcccattccaggcgcctcgaggggaaggcatctggggctctaagactgggggactatgggggatgactggcaaagtccggttctttgccaccgggataggtggcaaagcggtccacgagagaggaaaccgtggagaaatttgagtcccggaaccggattcccgaagcggtttgagaaaggcgggccgggatacgtgagtgactgcctcagaagggctccttcaaggacactaaggaggtgacagccgccgtggcccactctcccggcccgtccggagggccccccgccacccgatgcagaccccctgggggagccggtccagggccaacttcggccaatcccctcagtgacagcggaggcggccaatcaaccccggcgcgaagccctttccccgcccctggtggggcccctagccaatcggactccagactgcttcgggtgcggctaccccaccgctcccctgcgaccgctgccgcggtcccgtggctctttccctgctcacctcccagggacggcagagaagggctggcccgagcaccgccttcgcggcgctgccggcgacggtcgctaccttcagcgccatgacggaaagtgagagcctccgcacgtcccgacacgcagataccgctctcgcgagagttcgacggggtgcgaagtttcggggacaggcgcggacccggtactgcgcacgcgcgcggtcgcaccgattcacgcccccttccggcgcctagagcaccgctgccgccatgttgagggggggaccgcgaccagctgggcccctggctcagggaggggccacgtcagtgctgccagagacgtcacaatgccggcccagccgttcggtgcgcgattggctgccgctgccacttacgcgtcgctcttcctcgtttgcccctcgtgttcatgggagctcgttttcttttcctctaggcagagaagaggcgatggcggcgatggcatctctcggcgccctggcgctgctcctgctgtccagcctctcccgctgctcaggtagcggcccagccggggcttctttcttgcgagcctctgacccacggcaggtggtgttgggggcaggagggatgcgggggtccggcctttcagggtccgtcgctgcgggccgggccttcccccgagaggcaggcggccttgggacggggggaccaaagcacctcgcgcacgtttaccggcagccaggcttttccttgtctgcccatacgaagaggagtccccgagcctccatggtgcgcccggcccccaagctgcagcacggaacgtgacacatgtcccggctcccgctccctgcggggtcggaccggagcgaagctctgtagcgctgagcgatcgcggccaaaaacggggctggaggagccacataagctaggaagggacctcagtgaggagagggagcaagagcggggcgagttagatggggagccaaaggtgcgcagggccttgagtgccaggccgaagactggcttttccggagggccctgccttacccttaccagagttttcggcagagccgaccaggggtcccgtcgatttgcattcgtgaggggctgaggtctgaactccagagtgtgtttaggaggtggctgcagcagccagccccgggcccgggggccaggactggacaggggcggctttctccacattcccttttctgccgtccttcaggccagtagccttgctgcctgcaacgttttggcagcctaactggcctccctttccgcacactcctcatctgcccctcaggaattccctgaactatagtcagggacgtatccagaggacaagcctggccataaaacccttcgggggctcccctgcgccacaggaagcaggcccaacttaggcaggacacagaagggctggcgggatctagcccctgagaactgcctccacgctgttcctagggatctgcctcctgtggtccagacc

SEQ ID NO: 12542 - DNA, 6000 bp, Homo sapiens
gaggagcgcggcgaccctacggcgcgaagccgggccgcggagacctcacctgctgttcctgagagcgaccggtgaccgatgaccgcggggtggcgcccggatcgccttcgcgcccgcgcccgcgccaggcgcctcggggattctgtcggcgtccgctgcgcgcgacgcgcctccacgcgaatgggccgccgccgcccgccttcttgttggccgcacccccgccccgcgcccgccccgcgcccggcccggcccggcgagaaagccttaattggtaaaattgcccaggagcccgggacgggtgcgtggggggcgggggtgcgggggcacgccgtgagctccagcgacccgccgccgggcgacgccgccccccgagatgagctcaccgccggcgagggccgccaggccctgggggagggagggcttcgtgggggagtcgcctccagcgcccacagggactgcagggctcgtgtctaggcccaatcacaaggatcctgcgtgtctgagtctgggggagccaagcgcaccccaggtggaaaggccgaggcccaaggccaccttctccaaggagccacccacagtcacagcccctggtgtctgtcccaagccgggattgtttcctggggtgggggcaacaggtcgttgcaggtgttggctgggcgcctacgtcaggcagggccccgggacgggactgcagggctccgagccctgggatgaacctgactgccatggatcaggcgctgccaggtctggcctggggtgggcagcagaaacaggatcgctcagggggacgagaaagttaagtttgtttagtattaagaagattctgatcttaaagaaaacattggccgggcatggtggctcatgcctataatcctagcactgtgggaagctgaggcaggtggattaattgagcccgggagtttgagaccaacctgggcaacacagcaagacactatctctaccaaaaatataaaaattagctgggcgtggtgacgtgcaccggtagtctcagctgctcaggagacagatgggaggatcgtttaagcccgggagtttgaggctgcagtgagctataatttcaccactacactccagcctgggtcacacagtgaaaccctgtcactaaacataaaaaaaaaggccaggtgcggtggttcatgcctgtaatcccagcactttgggaggccgaagtgggtggatcacgaggtcaggagttcaagaacagcctggccaagatggtgaaaccccgtctctactaaaaatataaaaactagccgggcgcagtggcaggcgcctgtaatcccagctactcgggaggctgaggcgggaaaatcgcgtgaacccgggcggcagaggttgcagtgagccgagatcacgtcactgcactccaacctgggtgatagagactccgtctcaaaaaaaaaaaaaaaaaaaggccgggcgtggtggatcccagcactttgggaggctgaggcaggtggatcacgaggtcaggagtttgagaccagcctggtcaacacagtgaaacccggtctctactaaaaatacaaaaattagctgggcgtggtggcaggcgcctgtaatcccagctactcgggaggctgagacaggagaatcgcgtgaacctgggaggcggaggttgcagtgagctgagattgcgccactgcactccagcctgggtgatagagctagactgtgtcttggaaaaaaataataaatataaaaataaaaatacaaataaaaaaataacgttaacagctcagtgaacaatcatctacttgtcatagacactgaggaatgtttccatgttgatattttttcctcgtaactcaatcatgttgggattgtaagttatacagcatatactgcttgcaagccattccatccttaaggagcaactcagttttcttattcttgacttagaattggttgcatcccgatgtctcctctgcctgcacttcccaggaagaaccccctgaggccctcagattttcctgcacacgcccttcccagaccctctgatgactgcaaatcccaccctacccttgacgggaaactctctgaggctgtccaggtcatcacccccagggaccaggtactggtgggggaatgttccatgaattaattgctgtactcagggctcttggacaagtctcccctgatcgcagggtcctgactctccctgtataagatggaggctctgctgctcaggagcctgcctggcttccagtggtctagagtggagctgcactgcaatggggctggacttaggctccaggtacccacagggtgggtgcagggggaccatcacagttcagcttcctggtgccatctgtggtgggacctgattgtggggcaaaggggtgggacataaaaggcagagtgtcgaggcaggtacagaacgggtggggggtgctccttagggagaaggcaaatctagaattccttgacctcataaggaaacagcttggatccgtatggggaggggtggcatgggggaggatggagcagcacttagtacacagaggcctctgggagaggggccaggattgcagaaggcttgcagaggtgctggggaatctgattttgtcaaaactaaaaaatccacaaggcagcctctgagcagcccagagtccaaactgccatctgtcccctcagctctgaaagatgaggtgcaaacccctgccctacccaaggctctcctgctgcacactgccaggcactgtcttcatggacccacacttccttccatattgctggggacacagtggggccttgccaacagtgattcctctttgttaggatctttgcgtgtagtcaaaacagggccccatctcctcattactcccccaggtgtctacctcttcccaccccatgggcaaacctccatggatgactggtctgtgaccctcaccagccaggccagccattctggacatgaccagagccctcccctcttcttcccttgtcaccagccctcaactgtgaaactacagatggcatgtcacctcttcatgctcccagtttggggcctacccagtgaggggcacactagttgattccatacaccctcagctggctttgtttagaatgtgaatgtcacagccaggcgcggtggcttatgcctgtaatcccagcactttgggaggccgagccggactgatcacttgaggtcaggagttcgagaccagcctggccaacatggtgaaatcctgtttctactaaaaatacaaatactaaatactaaaaatacaaagccaggcatggtggcatgtgactgtactcccagctactcgggaggctgagacaggagaatcacttgaacccgggaggtggaggctacagagagccaagattgcaccactgcactccagcctgggtgacagagcgagactgtctcaaaaaaaaaaaaaaaaaaaaaagaatatgaatgatgaatgtcacctcctttctcttctccatgagacagccaatatctgatcaaggccctgggaatgggaatccatagctcgccacccacgtctgccccctgcctagccacgctgcgctcagggaccattccgacaggagaggacgccccacttcagctccccccagtgccccgggtgaatgaacggcatgaagggttaggcgggcacacgtcgtctctgcacgcatcgcacggcgccctctgcccgcgcccactggcgtgcccgtcggcatgcccgggccccttcgaagactgcttgcttctggagtgccagcggcctcctggcccagtgccccatttcctcccgggtggagcgagggaggaggaagggaagcagaggggtaggcggtggtaagcagcaggcacatgtgcgcgggcgagagccccgcagactgggaaggcgggcccatggcagggggtctgcggggatcgcgtaggcgcgggccttgccctgcagccgcttcccgggcgatgcgcacacaaagcgccctcggcagcgcctggcccggggcccgcgctctcttagggtccgggcccttcccgccgctgctggggcggccgaccgggatgcggccggggaaccctaggctctggggccctgggaagggggacgacggcggggagtagggatgtgcagggatcgggcgaagcccaagcgacttagggaccagagccaccccaagcgccgacttcgcccgctcgcacgtcccgggtccctcgcgcgcaggccccgcccctctcaccccgccgcacgccacagggtgacgtctgggctcccagccgcatcgccctgactcccgcgcgggccccgccccctgccgctagccaatctgtgcgtttgtgacttttgggcccgcagccccgcctgctcccacagcgataccggtttgcattgccctgactcccgcgcgggccccgccccctacgccgctagccaatccatgcattagtggcgtccgggctcgcagtaccgctcgctcccaccgcgagaccttctgctccgcgcccgcgcgggcccctccccctccatcgctagccaatccccgttttgtgacgtatgggctcgcggccccgctcgctcccaccgcgagaccttttgctccgcgcccgcgcgggccccgccccctccatcactagccaatccccgtgcttgtgacatatgggcttgcggccccgcccgctcccatcgcgagaccggttcccaccgccctgactcccgggcgggccccgccctctccgccgctagccaatcctcgcgttgatgacgtttgggctcgcggccccagcctcccagctctcagggcacggccggtctgtgccggctgctcccgcggttaggtcccgccccgcgcagcgcgcgcagcctgcggagccagcggccgtgacgcgacaacgattcggctgtgacgcgacaacgattcggctgtgacgcgagcgcggccgctcccgatgcgctcgtgccgcccccgccgtgctcctcggcagccgttgctcggccggttttggtaggcccgggccgccgccaggcctccgcctgagcccgcacccgccatggacaactacgcagatctttcggataccgagctgaccaccttgctgcgccggtacaacatcccgcacgggcctgtagtaggtacgcggcggcgggcgggaccccttccgggccccctcctcgtgctccgcctcgcgacctccccgctgccctccccgcgcgccttccccggcccgcggccctgaccgccccgtgtccggccaggatcaactcgtaggctttacgagaagaagatcttcgagtacgagacccagaggcggcggctctcgccccccagctcgtccgccgcctcctcttatagcttctctggtgagagcctcgcctgtggggacagcctgggacgcggggaggatggggtcgcgagggtgtggcaggggggccggtcgagagcggcactggagaaaggggagggaagtctgggggggcaaacagttctgtctcctcctttcaatccagacttgaattcgactagaggggatgcagatatgtatgatcttcccaagaaagaggacgctttactctaccagagcaagggtaaggcaggggttgggtgggcacgctggcaccttcacccgacttcgtcagggaccccgctcacagggaggacctgagacctcagtcccaaccactccagcagccttaggagggagaaactgttacaggtcccgaaatgggattcagattagggccatcaggccaggcggggcacaccgatgccccctctgctaccgctgccccccttcccaaggctacaatgacgactactatgaagagagctacttcaccaccaggacttatggggagcccgagtctgccggcccgtccagggctgtccgccagtcagtgacttcattcccagatgctgacgctttccatcaccaggtgagctggctggcaggcgtcctgtacttgggtacaacctaggggatcgcggctgtgtttggataaatccaggggggcactgggtacaaatggtggc

SEQ ID NO: 12543 - DNA, 6000 bp, Homo sapiens
ttttcaagaaacattatgttaactgcaataagccggaaacaaaaggctgcatattatatgattccacttatatgatgtacttaccggcttcagatccagagtcaaaaagtagaaggttggtttccagggcctgggaggatgggggaatgggaaattgtataatggggacagagctttagtttgggaagatgaaaagagttctgaagatggatggtggtgatgactgtacaacagtgtgaacgtacttaatgccactgaactgtacagttaaaagtggttaaggccgggcgtggtggctcacacctgtaatcccagcactttgggaggccgaggtgggcggatcacctgaggccaggagtttgagaccagcctggacaacatggtgaaacccccatctctacaaaaaaaaaaaaaaaaattagctgggcatgttggtgggtgcctgtaatcccagctactcaggaggctgaggcgggagaatcactgaaacccgggaagcagaggcttcagtgagccaagattgtgccattgcactccagcctggacaacaagagcgaaattccgtctcaaaaaaaaaaaaaaaaaaaggcatttcacagaagaggaaacacaaaaggcagagtgtgcatggtatgggtttcctgtggctgcagtaacaaagtgccagagactgggaagtttaaagcaacagaaatttattctctcccagttctgaaggccagaagtccgaaatcaaggtggcaccagggtgggttccttctggggctgtgagggaaagccagctccaggcctgtcttctggcttcttccggtggttcccagcaatgctccgtgttccttggcttgcagaggtgtcattccaatctctgccttcagctgcgtgcagtgctctcctccctgtgtctgtctctttttctcctcctttaaaaacaccatgcattgattgaactaggggtcacccttatgcagtataacctcaccttaacttgattctgtctgcaatgacttttatggggacactactcaacccagtgcatatactctatgacctagcaattccccacctagttatatacctattgaaatgaacatctatgtttaacaaaagacacatacatcggctgggcgcagtggctcacgcccataatccaagcactcaggccgaggcgggcagatcttgaggtcaggagatagagaccatcctggctaacacagtgaaaccccgtctctactaaaaatacaaaaaattagctgggcatgggggtgggcacctgtagtcccagctactcagggggctgaggcaggagactggcgtgaacccggaaggcggagcttgcagtgagctgagatcatgccactgcactccagcctaggtgacagagcgagactccgtctcaaaaaaaaaaaaaaaaagaagaaaaagaaagacgtatacataattgttcacagcagcattagccataacagcccaaatgggaaaccaaccaaatgtcaacagttgaaggacacaatcaatggtgacgtattcatccaggggaatactatgcagcaacattgttacatgcagccacttgaattaatctgccaatgttgagcaaagaatctagacacaaaataatacttcccttcagagtggaggagaaggctgagtgcggtgactcacacctgtaatctcagcactttgggaggccaaggtgggtgggtcacctgaggttaggagttcaagaccagcctgaccaacatggtgaaatcccgtctctactaaatacaaaaaattagccgggcgtggtggcacatgcctgtaatcccagctactcgggaggctgaggcaggagaattgcttgaatccaaaggttgcagtgacccgagatggcgctattgcactccagcctgggcaacaagagccaaactctgtctccaaaaaaaaaaaaaaaaaaaagagtggaggagggaaaaatattatactgaataatttcctttatttaaagcctcaaaacagccaaaacaacacatcccatcatttttaggaatgcatgcttaactggtcaaactataaagaccaaagtgattagcataagaatcaagttcatggtcacattgggaagtgatagtaagggtatgagaggggctttcagggcaatgatattcaaattcttgacctgggtgatgccatggaactgtctgctttgataagcattacactgtacatctttattttgtgggtttttttttttttttttttttttttgagacagagtttcgctctgtcacccaggctggatggagtacaatggcatgatctctggtcactgcaacctctgcctcctgggttcaagcgattctcctgcctcagcctcccgagtagctgggattacaggcgcatgccaccatgcccggctaattatcttgtatttttaatagagacggggtttcaccatgttggccaggctggtctcgaactcctgccctcaggtgatccgcccgccttggcctcccaaagtgctgggattacaggcgtgagccaatgcgcctggcctacttcttttcttttttgggttacgtttcaccatagaagtgctttttttttttttttttgagacagagtctcgctctgtcgcccaggctggagtgcagtggcacgatctcggctcactgcaagccccatctcccgggttcacgccattctcctgcctcagcctcccgagtagctgggactacaggcgcccgccaccacgcctggctaatttttcatatttttagtagagatggggtttcaccgtgttagccaggatggtcttgatctcctgacctcgtgatccgcccgcctcggcctcccaaagtgctgggattacaggcatgagccaaagtgcccggccctttttttttttcttttttttgagatggagtttcgctcttgttgctcaggctggagtgcaatggcacgatctcggctcactgcaacctccgcctcccaggttcaagcaattgtcctgtctcagcctcctgagtagctgggactacaggtgcccgccaccacgcccagctaatttttgtatttttagtagagacggggttttgccatgtttgctaggctggtctcaaactcttgacctcaggttatctgcccgcctcagcctcccagtgttgggattacaggcgtgagccaccacgcccagccaggatttcaatgaacaaaatgcttttaccctaaagatgaagtccccagacagaaggtgctcattggtgctgtcaacatttggtgattggttcagtttagatatcacctcctggtgggagcagcttcatcggtgcccctctccttacatccctcccagtcccatgtctcaacctttggaatattcatgaccctgtatcatgacctgctgtcctgcatgtcctctagaccaaactgtcaacttccggggcagagtccaggtgcctggcccatagcaggtgcttcaggaagcctccagggccatcactccagggacccctagcaatgcagggaagaataaaagcagccacaggtgggtttcttccctaagcatggaagcagctcagcaacagagtcctggcggaggcaagattgccttccgcattccagaggaagtatttgccttgaaactatgtaacaaaagtaacagaaacataatagacatgctttcctttttaagtttgctggattctcctgggatacagtgaagctccagtgaaaacctctctcctcagctagttaaggcctggaaatggccacttgggggtttccctaagcacccgaaactcagtgagcccccaagtgacctcgtctcccagtccccaactcagagagacccaaaagctacaatcttctttgactgtattgtcagacccacttcctctctccagctcaactgccactatcctagtcctagtctgaatcacatgtgacaatcatgactacaatcttttttttttttttttttttgagatggactctcactctgtcgcccaggatggagtgcagtggcgcgatctcggcccactgcaacctccgcctcgcgggttcaagtgattctcctgcctcagcctcccgtgtaactgggactacaggtgtgcaccaccatgcccagctaatttttgtattttcagtagagatggggtttcaccatgttgtgcaggatggtctcgatctcttgacctcatgattcgcccgcctcgggctcccaaagtgctgggattacaggcgtgagccacagcgcccggcccgttagggtgtctttgatgccacgcttcgctctgggttttctccttcctctttgattgctccttgtccgatctcttttctggacccttctcctcctgcccaatgtaagtgctgggtgttcccctagatgctatcctgagcccgcttcactcctcgttctaagggattacagtctcctctcacctgtatcagggagggtccatctgcaggaaaaagacaccacttttgcaattttaaggaaaaggattaaaacagggattggccgggtgcggcgatgcgcgcctgtagtcccacttttccggaggctgaggcgggaggatcgcttgagcccggggactcgagaccagcctggccaacatagctagaccccgtctctaaagaaaaaaaaaagacaaaagaagagaacaacaacaaaaaaaccaaaataaaaataaaaataaaaacggacgggcgaacgcgtcgggtgggcgtagggttccgcgaagcctccctgtccctcttgtctcgtcctagtcggtctagctgggccccatcccctttcccactcggagcgtgagcgcctggagacacgtacagccaaccagtgagaaggagtggccgcgagtggcatgcacttggtccaattacctgcggccctgccggtcggcccgcgctggggccaatggaggtgcgaggcggggctcgggcgggggcaacggtcacctgatctgcggctgtcgaggccgctgaggcagtggaggctgaggctatgatggcggccatggcgacggctcgagtgcggatggggccgcgatgcgcccaggcgctctggcgcatgccgtggctgccggtgtttttgtcgttggcggcggcggcggcggcggcagcggcggagcagcaggtcccgctggtgctgtggtcgagtgaccggtgagcgggccggggtgggatgcgctgtggcggctgaggcgccctcgcccgactccggcgctgtcctaggcgaggggtggtgaggcccggaggtggactgttccttgctcgggggctcgcagcgaatctgccggcgacagagctccagtccacatgcgcccccgtctgacagcacctcttctgtgccctgccagggacttgtgggctcctgcggccgacactcatgaaggccacatcaccagcgacttgcagctctctacctacttagatcccgccctggagctgggtcccaggaatgtgctgctgttcctgcaggacaaggtgcgcccgccccagcccactctcccccggtcatcgggaggcagccaggccccctccccccatgacactgacgcccattccccaagggaagcttcagtgaccttgtcccaactgtagggaggtgtgggtcgtctcatgggaaggcctgtagtaaacgcttcagtgggcatggcgacagcctcggaaatggcaccaacttgattggaggaagcgacggaccagaggccaggtacctactgagtaccaagcactttggatatctgacttagtccaatatggtgggtggggattatcgtccctgtttgtttatagatgagaagactgaggctggaggttaagtgacttgtccaagctcatacagctaatgggtggcagagttgtaattctagctgtgatgatcataataatgataattggaaaatgctcacctgtttagtgctttgtaggcacttgctacactgatgtcattatcttggtttcactgccaaggaaagtaaggtttgtcgagatacaatgtttcactacagt

SEQ ID NO: 12544 - DNA, 6000 bp, Homo sapiens
cagctgctaatctaccgtttcaatggattggactgttctggaagcttcacatcaatggaatcatacaatacatgaccttttgtgtctggcttgtttttcttagcatcatgtttttgaggttcatggcttactttttataactaactgagtcgtagtccattatctgtgtacaccacatcttgtttatctattcatccatggatgggcatttcaggtgttcctacctttcggctattattgtaaataatgctgctatgaacattcacgtacaagtttttgtttgaccttagtgtggtttttaatttgtatttctcttttcacatgtttaaaaactatgtgcattttatttctcctgcaaactgtctattcctggcatttgcccattaattgtattgttggtcttctttgtttttttttttttttttttttaatagagacaggatctcactatgttgcccaggctggttttgaaatcttgggctcaagcaatcctcctgccttggcctcttgttggtctttttttatctagaaatcggtcaggtgcagtggctcccgcctgtaatcccagcactttgggaggccgaggtgggcagatcacctgaggtcaggagttcgagaccagcctggccaacatggtgaagccccgtctctactaaaaatacaaaaattagccgggcgtggtggtgggcacctgtaatctcagctgctcaggaagctgaggcaggagaatagcgtgaactcaggaggcggaggttgcggtgagccgagatcgtaccactgtactccagcctgggtgacagagcgaaactctgtctcaaataaataaataaataatatgtagaatcctaggtaccttccatgtatgagagagagtacccctttgtgttatacagtgcaaatacttttcctcgtttttcattgatttgatggtgttttttagacacgagaagtttatttttagctagctggactcttttgtcttctatgccttctgggtttgaggtcatagttagaaggtcttctggaagtcagtgttataaaggaagtgattggaggcttttaccaggagcaagacataatcttgacttaagttttccagtcactcttgtagcagtgtggcaaagggactgggggagggcaagcatgggaggccagtgaggaggccaccacagctatcctgatgagaggctggtggcttggaccagggtggggacagaatatcagcttctggatagattttggggggaaagccaacaagatttgctgacgaataggacatggagtttgagagaaagagaggagtcaagaactccactttggcctgagcaagaggaataaactttactaagatgcggggcatgggaagagaagcaagtctggggtgaacaatgaaggctttgcttgtggaaatggtatgttgagatgcctgttagatccaagcagagatttggatctatgaacctggagcctggagttcacaggagagcttgagaggatggagtgagaaattgcagagctgtcaagacagacatggctgatgctctggaactagaaagatcgccaagggaatcaaagggtaacacctgctcgtctggtcaagccaatggatgagatgacaaagatgggactaaggccaggcacagtggctcacgcctgtaatcccagcactttgggaggcctaggcaggtggattgtttgagcccaggagttcgagaccagctgggcaacatagtgagactctgtgtgtatagcaaatacaaagattagctgggtgtggtggcacacgcctgtagtcccagctacttgggaggcttaggtgggcggatcacttgagcccaggaggtggagaccagcctgggcaacatggtgaaaccctgtctctacaaaaaattcaaaaattagcctggcgtggtggcatgcacctgtagtcctagctacttgggaggctgaggtgggaagattgcttgagcctgggaagacgaggctgcagtgagtggtgttcataccactgcactccagcctgggtgacaaagtgagacattgtctccaaaaagatcattatacaaaaatcaatttttaaaagttttttgagatagagtcttgctctctgttgcctaggctggagtgcaatggcatgatcttggctcactgcaacctctgcctcttgggttcaagcgattgcccccctcctcagcctcccaagtaactgggattacaggtgcccgccaccatgcctggccaattttcgtatttttagtagagacggggttttgtcatcttggccaggctggtctcgaattcctgatctcaagtgatccgcccacctctgcctcccaaagtgcttgaattgcaggcatgagccaccacacctggccaatcaattgtatttctatacacaatccaaaatgaaattaagaaaataattccatttataacagtgtcaaaaaagaataaaatacttattaatagatttttttaaaagaagcatgagatttgtacactgaaaagtacaaaacatcattgaaagaaattcaagaagacctaaataaatggaaagacatctgtattagtcatggttctccagagaaacagaaccaacaggacacacacacacacagtttattttaaggatttggttcacccaattgtcggggctgacaagttggtgtgaaatttgtaggacagactgacgggctggaaactcggagaatttctgtgttacagtcttgttgttgttgttgttgagatggagtctcactcttgtcgcccaggctggagtgcagtggcatgatatcagctcactgcaaccactgcctcctgggttcaagcgattctcctgcctcagcttcccgagtagctgggattacagatgcccgccaccatgcccaactaatttttgtatttttagtagagacggggtttcatcacgttggtcaggctggtctcgaactcctgacctcaggcgatccgcctgccttggcctcccaaagtgctgggatgacagacatgagccaccgcgcctggcctgtgttacagtcttgaggcagaatttctgcttctccaggaaacctcgggttttgctcttaaagccatccaactaaatggatgaggcccacacacattatcaagggtgatctcttttacttaaagtcagttgagggccaggcatggtggctcatgcctataatctcagtgcttttttttttttagacagagtcttgctctatctcccaggctggagtgcaatggcacgatcttggctcactgcaacctccccctcccaggttcaagagattctcggccgggcgcggtggctcacgcctgtaatcccagcactttgggaggccgagatgggcggatcacaaggtcaggagatcgagaccatcctggctaacacggtgaaacctcgtctctaccaaaaatacaaaaaaattagccgggcgtggtggcgagtgcctgtagtcccagctacttgggaggctgagacaggagaatggcgtgaacccgggaggcggagcttgcagtgagccgaggtcacaccactgcactccagccttggcgacagagcaagactttgtctaaaaaaaaaaaaaaaaaaattctcctgcttcagcctcctgagtagctgggactacaggcatatgacaccatgtccggctaatttttgtattttttgtagagatggggttttgccatgttggccaggctggtctcgaactcctgacctcaggtgatccgctcacttcagccttccaaaatgctgggattacaggcttgagtcactgcacccagcatatgccagtactttggaaggctgaggcaggaggattacttaagcccaggagttcaagactagcctgggcagtgtagcaagaccctgtctctctctacaagaataggaaaagttagccaggcgtggtggcacttgcctgtggtcccagctacctgggaggctgaggcaggaggatcccttgagcccaggaagtcgaggctgcagtgagccatgatccaatgccgctacactgcagcctgggtgatagagcgcgacctcaacttggggggaaaaatctgtctatctatctatctctccatatatgtgtttaataaaaatgggcaaatgacttgaatagacatttcttcagagatcatatacaaaaggccagcaagcacatgaaaagatgctgaacaccattagtcatcagggaaatgaaaaagaaaaccttaacggggcgcggtggctcacacctgtagtcccagcactttgggaggctgaggcgggagcatcgtttgagcctggggcggtcgaggctgcagtgagctatgatctcaccactgcactccagcccgggtgacagagcgagaccctgtgtcaaaagaaaacaaaaaaagaaaaggaaaaagaaagcaagggaaggaagaaagccctcggttcagggtcgccggggaaggggctggtttggacggctgtcccgcaggccctccgggttagagaccgtcgggggcgtgtcttgagctggggacgcgactcctcggcgggggtgcacctgagaggccgggaccagcgaggccgcgccccggtggcaggtgaccccgggcgcgtctccgagcgccagggtggggcgaggcggacgcgcgccccaggcccgagggggtgtggcgcgggcgcgcgcgggttccggggtcgcccgaggcggcgggcggggagccggggcgcgggggaggcgcgcgccgcggacgcggccatcgagcgaagggggtcggctggccgggcgggtcccccttcaggtcgcgggggtcagggctgcgcgcgaggtccctggccccggggagcagcggccccgcctgcgtcccctgccgccgcgtccccctcggccgggcgtccccggacgcccccgccccgcgcggtggtacggtccgggtttaaaaggctccggcggcccccgggccagcccagtgtgtgggcggcggcggcggcggctgcgcgcttggggcccggggcgcggggcgaggccgtggggacgtgcgagcggggccgcggtggggctcgggggcgcgtccacgtggccagagggcggccacccggagccagcggagggacaggtaggtggccgtcatcgtcgccgtccgtgcggggccaaacagctcggggcccggggctccggcagcccgggggtccggctcggcctgtgggggtcaggccctatccctgcccgtcggcgccggcctgcccgactccttgtgccccgcatggtggggacgccaacccaagaccaacaccctgcccaaagaggaccctttgtcgcaggggagcggcccctcggaggatcaacgctgtacttccctcccgctaagggctccgcgagtccgccgaggggtgccctgatggggcccgggcaaaccggaccagcagcacggtggggggtgtggggggcggccgctggacccccgtctctgcgtggggctgccccttcctcaggctctctgctggcccagctgtacctgtgatgcccgaggttgccacttacaggtgggggctgggcctgaaactgcctccccaggtctccctcccgacctgtccccagcctgttcctaggcttgtgttcccggggtgtagaggaggtgaagacaggatgtggcctctcttttctttggccttcctttcttctccggctgttgcatgaggggtccagctgacaaaagagccctggagaggtgatcaatctgagctgaaactttgcagtttcaagctgggcccgctgcttgttcctggcaaatgccttatttttcctttctctctcctgtgcctccttggtttggttccctgcaccaccccccgctccccccccgcctcccgccctcaagctgggtacctcctatctcccccgggagctctggcactgagagggtagcgctgagccctgccctgttggctgccacgacactgctctgctgtcttagcagcctggggctgactgggtgtggcctggggactaagtgcca

SEQ ID NO: 12545 - DNA, 6000 bp, Homo sapiens
gctggaggccattattctaagtgaattaacatagaaatagaaaacataggccattattctaagtgaattagcaaagaaagtgaaattaacatagaaataatttctatgttaataggaattaacatagaaatagaaaatcaaatactacatgttctcacttataagtgagagctaaacagtgggtatacatggacattaagattgaaataagagtatggattattaatatcaatcaaagaagagaaccaacagatgggaataccctcattttatgcttagaactttgaactggaattgttcttaattttccatcaaaattttaagagaagataatttaaaaaactgtgctgtccttcagtttcatcattttatgtcttaaaactaatcactcaatatctgatagcaacagtatctatctcaaagtcattagtataccttggttattaagataattcaaattagcccttccagtgaagttgacatcatctttgctatttttagaaactttgaaacttaagaaaatgagttgcttcttcactgctacacttccactttctgcaccaagccttgggcttgcccttaggctttcctttttagaatgttcgttttctgtgaagcaggccttttctgttactctccatgcaatgcgttagttgtggctttaaagagaaaaattagctcccagtttctccagagctacaagttactcggtaagaaagagaagtcaaaaagtgaaatagtctcagaatttggagtttctatatgaatattccataggtttcttaaatattaggaaaagataaaaagacaagcagccaggggaggtgaaattggtaacagaatgagaggagcaaaacatgctaacttagtaaataaaacacttgaataactttgccacatcagagcaggtatttctatatctgcatgctcacgagtttttagaaaaggctaatgaaactgctctccagatgggagttgatgtcaagtcttatggcaagtgacaatgcttttggcattatcacaatatcatgtcacttcacctaaaaggtgaagaatctacaataactctgtttgctgaagatcttgaaagtaggaagtgaaatctgaatagagatacccatggggcacatctactacacctctgtaatctgcaaccaaaccagaggcattctctgacagaaaaatatttctttggacaaaaataaatatataaagagagttgggtcatcagccttcttttgccagagtgctgagaagaacaagaaatttaaataatctatatgaagaatttaaaatttcctttatatacacaatttaactgtgtgcatataaaattaacaaaaatgcactgatatctagcaggttgtttagggaatggctcctataattagagagaaaaacggcttgccagaacgtgaacactctattaccaatagctgcacatagtcattgaaggtttaaatcaaacacatctgtggcctttaaaaaaattttttgcctgccagcaccatggctacaagcagctattaaactgagatataataaataatcaaaatgtggatgctggaagtgcttgacacattatgagaagcagtgttcctatcacagatataaagaaatggcatgttcttgatgtaatgagaaatcttactactatgtggaacacagacacctcggaagtaattagctggggatggtggcacgtgcctgtagtcccagctactaggaaggttgaggcgggaagatcgcttgagcccaggagttcaaggctgcagtgagctgtgatcgtgccactgcactccagcctaggcaacagagccagacctcatctcaaaaaaaaagaaaaaaagaaaaaaaataattattcacaactgctttgcaaaagttcatgttagaaccacagatggctcagatgaacaaaggaagatatgtgacgactctaactggaataagctgcaaccaaaaatatgtcccatactcaaatgtcaattattttatagctattgataatgtgttagttccctctacggattgtgaatttcaaaagagaacaggtatccttgatgtaggtctgttttcagcatagtataagaggaagaaaagttgcctaagtccaaacatccaggagaaaagaagcatgaacagcaatggcaatcagtgatacactgcaatcatgtgattttgattcaaaagcaacagaatcactagatttgtttgtaaaccacaaaataacacatcacgtgaagctggaagccattatcctcaccaaactaatgcaggaacagaaaatcaaacactgcatgttctcacttgtaagtgggagctaaacaatgcgaacacatagacacagggaagagaacaacacacactggggcctgtcggggtggggttgggggagggagagcatcaggaaaaatagctaatgcatgctgggctttaatacctaggtgatgggttgataggtgcagcaaattaccatggcacacatttacctgtataacaaacctgcacatcctacacatgtaccccagaacttataataaaataaaaataagtaggatagaggacaaactgctaaatctaagatgcatatttgcagcactgcctagcatagtaataatttagaacatctggcagccctttaaaagtcaacagactgctttcatctctgttatctcatctgatcgtgctagggcttggtggatagaattatctccattttacaggggagaaaactaaggctccaagatttagtaacttacttcagtcccatcaagggagaactggatcagattcctgatccaattgccaggaggcaaaccctgatccaattgccaggatccaatcttgatccaattgccaggaggcaaatatttctgctgtcccactggaatatagggctttcctggcctgcccttctagggtctgcatttgccagccctaggatgaacacttatacaggagctatttctaaatgtctagatagccatgtttatcagtgccccaccattcactatggtaaccctagatgctgaaaataaccatattaaggaaattagcctgtgtacattcactctcgtcatcatcttggttttggtgggttttggctggcttctttactgcagtctgttttatcagcaagatctttatgacctgtatcttgtgctgacctcctatctcatcctgcgacttagaatgccttaactgtctgggaatgcagcccagtaggtctcagccttattttacccagctcctattcaagacaaagttgttctggttcacatacctctgacagggaggcctcaggaaacttacaatcatggtggaaggcaaacgggaagcaggcacatcttacatggccagataattacactacaaattttagggtataaataagattactttaggagagaatatggagtaagagggggctttgctagagtcctgaaagctctaaagagaggcgatatttagagttcacacagcttagtaactcagatctctctgactctaaaactcattctttttctaggatactatgctgcctcttaaagaatagatattgaatacaatataattaagttgatattaataccaaatgcgaacctttgcaaaggggagataaagcaaggggaatgattaagatcaccaggaagagtgtgaagagtaagaagagaagatggcatagggcagaaccctatggaatgtgaacatttctaaagaaaatgaagagctgccacagaggtgggaggagaaccagcagggtgtagttcttggaaagagctaacagaataaaggggttcaaaaaggagggaataagggccgtgtgtggtggctcatgcctgtaatcccaatactttggaagactgaggcgggtcgattatgaggtcaggagttcgagaccagcctggccaatatggtgaaaccccgtctctactaaaaatataaaaaattagctgcctgtggtggcgcacgcctgtagtcccaactgcttgggagactgaggcaggagaatcgcttgaacccgggagacggagctggcagtgagccgagatcgcggcactgcactccagcctgggcaacagagtgagattccatctcaaaaaaaaaaaaaaaaaaaaaaggaataatgaaactaaagtcctgcagagttgaaatacggtaatggcttaaaagtatctatttgttttagcaacactgttgagaattctgtctgtaaaggagaggtgagagaaagaccactagcttatctgtgtttggtctgtgtttgatgagggggcttggggtatggggttaagaaaggtgactttggaatgttttagatgagagaaattttgacagcctttaagtcctgatagtaaagagcgagttagcagagagccgttgaggagtcatgcaacggaagggttcatcagaggagcttgactctgagtcggcaacagggaatagagatggaagagggctggcttagatcaaaggagagtagtcgtttattattattattattgcaaaaagaataggagaaaggattggtgaggggtacaagaaaattagaaaatttcatggcgaaagtagaggcagttcctgtcagatgaattctattttgtctgtgaggaaacgggcgacgctgcctactgagactaagcaggagagacggggcaagcttggctcttcatttatgccgcctactcattgctggtagattctttatctagcctgcatcctctcattttcctggatccctatacggcatttgacgctgtttaccacaagagctgtcgaacgaacgtgaaacactcagtgatactccaaccggaactactactcccagaatgcagtacggctcctgggaagtgcggggggctgggaacgcagcaggcctagccgtgtcgcctgctgccattggaggagcgctcccactcccaagaggccacgcgtagacggggcgcttcatgcggaagtcagcggcgtccggtcccagcctcctctgggagcgggcagttggcgaccctgcactgacccgcgtccctccgtcccgagcccgcgcgccctcagagggtgcccggacaggtaaatggagtggggtgcgcctgcgggaggcggggagagaactgcggagggagggcggaggtgtcgatggaaaggtgctggggtggagcgaggaggcagtgcaggggtgacttgggcttctctggtgtcgacagttccagttgtcgggcaggaccagttttggcgaggtgcgtcttatgccactggaaaggcctcgagttaaagagtgtcagaatgcgtcacttaagctgtcattacaggagggaaaaaatgttaactttctctcagtttgtattctacaagacctttctgtagcatttaaatctcttgagatcgccagagtcttctaaaaactctctacgtccttgttcgatgacgtcactttctgcttcaccttctacttctggctgtttatgctccttcgtgggttcctagccccttattcgcccttcctccactgctcagtattgacagtccccttcttcctctgttcagggactgtatttctgcctagacccgtttcctcagcttcagacctgtttggtgtttttattaatggccaatgtttatcaaattctgactgcgtactttggtaaatgctttacatctccgtctcccataactctcacaaccaaccaactgtcttcatttggcctcattaattgctttcaactacctgtatctccattatccctcccttgatcccagaggatacagtcatgtttaggatattaattccctttgaatacctgtggctgagagcagatccattcatacatttaacaaatatttattgaacggctggtatatgcttgacactcttttaagtgcaggggatacagctgtaaacaagacttaggaggttgctactctcaggaacttacatgtttgtgtctagaggggaaaacaggaataatcaggattatgttatatattggttaatgcaaaata

SEQ ID NO: 12546 - DNA, 6000 bp, Homo sapiens
gccgggcgcagtggctcatgcctgtaatcccagcactttgggaggtggaggtgggcagatcacctgaggtcaggagttcgagaccagcctgaccaacatggtgaaaccccatctctactaaaaatacaaaaattagccaggcatggtggtgcgtgcctgtagtcccagctactcgggaggctgaggcagtagaattgcttcaacttgggagacggaggttgcagtgagccgagatggcaccactgcactccagcctgggcaacagaatgagactcagtctcaaaaaaaaaaaaaaaaatttcagggcgagcaagtttattatgaaagtaaaatagtgaaagactaggtactccagaggccaggcgcagtggctcatgcctataatcccagcactttgggagcccgaggcaggtggatcacctgaggtcaggagttcgagaccagcctcgccaacatggtgaaaccccatctctactaaaaatacaaaaattagccaggcatggtggtgcgtgcctgtagtcccagctacttggaggctgaggcagtagaattgcttcaacttgggagacggaggttgcagtgagccaagatggcaccactgcactccagcctgggcgacagaatgagactcagtctcaaaaaaacaaaagatttcagggcgagcaagtttattatgaaagtaaagtagtggaagactagctactccagaggccaggtgcagtggctcatgcctataatcccagcactttgggagcccgaggcaggtggatcacctgaggtcaggatttcgagaccagcctcgccaacatggtgaaaccccatctctactaaaaatacaaaaattagccaggcgtgttggtgcgtgcctgtagtcccagctactcggaggctgaggcagtagaattgcttcaacttgggagacggaggttgcagtgagccgagatggcaccactgcactccagcctgggtgacagaatgagactcagtctaaaaaaaaaaaaaattcagggcaagcaagtttattatgaaagtaaaatagtgaaagactaggtaatccagaggctgggtgcagtggctcatgcctataatcccagcactttgggagcccaaggcatgtggatcacctgaggtcagaagttcgagaccagcctggccaacatggtgaaaccccatctctactaaaaatacaaaaattagccaggcgtgttggtgcgtgcctgtagtcccagctactcggaggctgaggcagtagaatcacttgaacctaggagacagaggttgcagtgagccgagatggcgccactgtactccagcctgggcgacagagtgagactccatctccaaaaaataaataaataagtcaaccaagaaggccgtacgtacagtggctcacacctgtcatcccatcactttgggaggccgaggcagggggattacttgagatcaggagtttgagaccagcctggccaacatggtgaaaccccgtctctactaaaaatacaaaaattagccaggcgtgttggtgcgtgcctgtagtcccagctactcggaggctgaggcagtagaatggcttcaacttgggagacggaggttgcagtgagccgagatggcaccactgcactccagcctgggcgacagagcaagaccgtctacaaaataataataataattaataataataataataactagtgcaagagaagtacacaaatatcccaaacatttagtgactcagcagagggggccagtctcaaggaacaggacttctacacctgttaccaccacctggggagttgtatctgaatctcaaggtcaggcccacccagacagaacatgcatctctagggtgccacaggagagtctgtccagtgcccagaaacacctgcaagacccagaagcaggctccaagaagcggggtgccacagtccagtgggggaagcggccacatccctgtcatgtgggctacagatgagttggggggcaggggcaggagaagaagaaacaggtgtggcctacatgcttttacttcctcttagcaagcgaggttcctcttgcagaggaacggtctgagagacacaaccgttttttttttttgtttgtttgcttttccttgagacagagtctccctctgtcacccaggctggagggcagtggcgcgatctcggctcactgcagcctccacctcctgggttcaagcgattctcctgcctcaacctcccgagtagctgggattacaggcacccaccaccccacccggctaatttttgtatttctagtatagatgaggtttcaccgtattagccaagctggtcccgaactcctgacctcaggcgatccgcctgccttggcctcccaaagtgctgggattacaggcgtgagccactgtgcccggccgagagacgcaatctttcagagaggaggtttggagcaggaacctcagggtggacagatgggtcccaccaggtgcagatgcttgaactaaagatgctacaaaggccgggtgcagtggttcatgcctgtaattccagcagtttgagaagctgaggcaggcagatcatctgaggtcaggagttcgagcccagcctggccaacatggcaaaacagcgtctctactaaaaatgcaaaattagcctggcataatggcgggcgcctataatcccagctacttgggaggccgaggcaggagaatcgcttgaacccgggaggcggaggttgcagtgagccaagattgcaccactgcactccagcctgggtgacaagagtgaaactccgtctcaaaaaaaaaaaaaaaaaaagaagaagaagaaaagaaatacattagtttggtccataaaggcgggacaactcaaagtgggggcttccaggctataaatgaatttaaacattttctggttgacaattggttgagtttgtagctcctcctccttctcttcttcctcctccttctccccccttcctcctcttcctcctcttcctcctcctccttcttcttctcttctttcttcttcttctctttccccttcttcttcttcttcctcctccttctcctcctcctttttcttcttcttccttatgggcttggatagaagtatattgacatggatccaccatttgtagaatcataccgagtagcttcttttctcctccttcctctccttctcctcctcctcctcctccttctcctgctccttctcctcctcctcctcctgctccttctcctcctcctcctccttctcctcctcctcctcctgcttctcctcctcctccttctcctcctcctgcttctcctcctcctccttctcctcctcctccttctcctcctcctccttctcctcctcctcattctcctcctgctccccttctcctcctccttctcctcctcctccttctcctcctgctccccttctcctcctccttctcctcctcctcctcctcctgctcctcctcctccagctccccttctcctcctactcctccttctcctccttctccttctcctccttctcctactcctccttctcctactcctccttctcctactcctccttctcctcttccttcttctcctcctcctgctccttctcctcctcttcctcctactcctccttctcttccttctcctcctcctccttctcctcctcctccttctcctcttcctccttctcctcctcctccttctcctcctcctccctctcctcctcctccgccttctcctactcctccttctcctcctccttcttctcctcctcctgctccttctcctcctcctccttctcctcctgctccttctcctcctcttcctcctactcctccttctcttccttctcctcctcctccttctcctcctcctgcacctttcctcctcctccttctttttccttttttgcataaagaagtatcaaataagagtagtttcactgccctaaacatcctctgaggtccatgtattcatccctccatctgcccaacgccaaccaactccggatctttttactgtttccatgattttgtcttttccacagtgtccaagtgttagaatgactcagtctgcagccatctcaaagtggattctttcccttagtcataagtatttaaacttcattcatgtcgttttatgtactcaccctttttttcttcctcttcttttttttttttttttcactttccttttatagctgttgcaaaagtcaagattttttaaaaaatataaaagagcagggccgggcacggtggctcacgcctgtaatcccagcactttgggaggccgaggcaggtggatcacgaggtcaggagatggagaccatcctggctaacacggtgaaagcctgtttctactaaaaaaaaaaaaaaaaaaaaaaaattagctgggtgtggtggcaggcgcctgtagtcccagctacttgggaagctgaggcaggagaatggtgtgaacctgggatgtggaggttgcagtgagccgagatcgcgccactgcactccagcctgggtgacagagcgtgactttgtctcaaaaaagaaaaaaaaagtacaaaagagcaaaacaaaacaaaagttatgaaaatgaaaacctgagccatcgtttatcttatttccccaaatccactaattattaacagaaagtaaaagctatgaaaaatgaatgaaagtgactgcaatttccttgaagtgtgttagaacctgcctttagtgtcagctatgggttccctcatgaaggtcagctgagccatgacccatgaaccatggaagcttgactctagattgaccatcttgagatgccaaagatgtccacgtcctaatcccatgtgggagacagaataatggccctgcagaccttcccagctggccatgacccctcatttgaccaggtcagcggctgaccaccatcctgggtttgtttccccaaatcacctccctggggtcccctgccaggaatgtcctgggagaggcaaccttctcactgtgtgatattttctctcctgcagctcttcccttctctctgaccagcaccatgcttctcctggtgacaagccttctgctctgtgagttaccacacccagcattcctcctgatcccagagaaatcgggtaagtatggaaacctggctgaaccttctccgcggcccctgtttagatgtcctgcatctggagacccatctggatacctgggtccatctgcatttcatctctaatgtttatgagggacccaataagcaccagccaacccaccagaagctcagagctcctcttgttctcacctccttttctgctgttaattcccatccacccattctacagatgagaaaacggaggctcagatacctccacagtttaacccaacgaccatccaggtagtgatggggccaggatgaggacccatgtctgcatggggccaaagtgttccttccttccttcgttccttcgttccttcgttccttccttccttccttccttccttccttcgttccttccttcgttccttccttccttccttccttccttccctcccttgcttccttctcttcctcctgccctccctctttccatccttccttctctccttccttccatccttctctccctcctgattcatttcttctctttctttctcttccttccttccctccttccctttctctctttcttccttccattgtttccttctttccttccttcttccgtccctcccttctttctttctctttcttccttccctccttccctctctctctttcttccttccattgtttttctttctttccttccttccctccctccctccctctctctctctctttctttctttctttctcctttttttttctccttctttgtttctttcttcctctttcttctttctttctttctttctttccttctttctttttctttcttttcagagtctccctcttgttgcccaggctggagtgcaatggctcaatctcagctcactgcaaactcagcctcccgggttcaagcgattctcctgcctcagcctcccgag

SEQ ID NO: 12547 - DNA, 6000 bp, Homo sapiens
ccaatttcttcttattctcctctatgaatcataagaacctatcatcagctcaccaccactcctgttttcagggtttaatttgaggattatctaaaaaagcaacctcatgtagcagggtggccccccaaatgcaggttccaagaactcactcaagacctgctaggtttgaatcctggtgtttagctctagaggcatggattttgtaaccatcttcctgggtcatccttgtgcaccttgaacttccaaagcctttgctcacactatatctgtttctcgtctccagatattgttaacttggaataatgtcccacccctgctctccaattccccagggaaaccttgttcatctgtgaaccattttctcagcatcccaataggaagcctgttacgccttctgtatgctttggagatggcatatgtcacacattgagttgcattttaataattaaagagcttaatttatcctcttattagattttaagcaccttctatactatacatatttctctctctaataatgattagtaattaataacatagtatatattactattgcacgaacaattattatcctactgaaaatatttctgtttcacttggaccattgtattaggagagtcagtatgaatcagtagtgccccactggcttcaccagtattgcattcagagttctacgtattgatctcacaggagcttgaacataataccagaatgtggttgatggagacactgagatggaaaatcagagagaacaagtagtgtggtatagattatttctcatgttccctccagttcttgtaccaaactcagcttatatatctttcttggaaccctacagttttatttcattttatgactcccccagctcccacatttcaccatactccacaattagatttaaaatggaagcatgaagaatgatactcttatctcttccaggaattgtggatctaaacctctgtagctcctctgtctgtgttgcaatctggtggcccagttgttaaaaattggtgttttgggtcctatcctggtctcctgtaagggattttggattagggaaaatgataatttcataacatcttatattcactttttcttacaatcatgattccacctgtctaagatgctttctgacttttttctttttttgagggagggtctcattctgcaacccaggctggagtacagtggcacgatcatggctcactgcagcctcgacctctctggctcaagtgaccttcccccttcagcctcctgcactaccactcccagctagtttttaatttttttatagaaacagggtctcactatgttgccctatttttcaaattattttaaaaaactctcaatggagtcattcagatagaagtgaaaatgtgcttgcctgctctcttccaggtcacatatctcagggaagagatctggtacccaaccaatccacccacaagctaagccaagcattcagattttgcccaaactctccttcccaatcttactttatcatgctgccttatttagaagtgatgtctccccacatcaacttctcttcccttcactacccttcccttcctttttcctcccttccctttctccttttctctttctctctctgtgtctctcattcaggacttcatttgttgcatccattcttgcaacaatcttacaaatattttcttttctttccacgttggccctcttcaacttgttctccatattgccatcacagtgattgtcctaaaatataaatctgatcatttcttcccctctccctgcagaaaatatgttactggctttcccactgcctactggataaattccaccttttcagtatggcactcaaaattcttcacaattaggtctttaatcctttccttaccaccttcttttcatactcaatgtcatggcattccaaaccctccctatttctagatctccacacatacagtattgctatgatgtctttatccatggcttctttctcaacttcttgacccaatcagtgtctgtgtaccatttcttccctactcagaaagttcttcctttgcaaacccttctttaatcattttcacctccatgggtccctatgaattcatatgtattccttgtgcacaccttcttgtaatcatattttttctcatgcttttggctatcttgtccactagactgtatgctttctcaaaaataaatggatgagtttcactcacagatgcatgtcagtgcttaggactgcaccagtgctaaaaaaaaaacaaccctgaatttatgaataagtcaatgaattaatacattcttggcaaaacccatgactttctggcctactataaattactgtgttcaaggtgagattctgctttagtttaggatatagatatctatatatatgtccatatatctgcagctatatatccatatccatgtatatcactgatttggggaataagctatacttattaacaatattactatgttaatgggtcttcaatatctatacaataacggaaaaagtacatgcatatttctaaatatctatccaataattggaacacacacgtatgtatggatggatatatttttttttattattgggtatagatatctattaatagataagtgtatatttatgtacctatcttgttggtaaaaggtgcttttatacatattatttcatttagtctccacaagaaatccacaggaaaggtaattttaatctcagtttaacagattcacagaacataactgactttacaacaaggcaaagtttgtgaggatagagtcttaacatgaaaccaggtccccaaattggtgtctatcaccttccccattattggtcaggctgcccaaatatccttcacatcaccatggcaggcttcatgctttggtttactgcctaaagccgaagcaattaggaggatatcctatgtgttgcggacactatctttttccttccataaatgaattaatgggccatgaaataattttaagaaaagctaacttttctggccaagcagaagaataaaagtaatcaccatgtaatattgttgtgaagactacctggccccacacattaactcagctaatcattacagtattacacggtgattatctgttccattttacagatacagaaatggaggcaaacgattaaaatacacacctaaggtcacatgcatcttgaacccaagcaatctcattttaaaatccgtgttcattgtcacaacactctattatgccctctgatctttgcattgccaatttaaatccaactttctccaactcaactttaagtacaggggtcatacccccgtcctcgccccccgcaacttgaaactccctgggaaagataacctcctggaccctggaaatgaagaggcgtatttaaaaacaaatgcctcatcctgggcacaattccaacattttatcaaaatcatgaaagtataagaatagaagtaaacaaaaagctttcatcgatcccctctcaaccataccctgagcataaaacaggtcctgtactttacagaactgtattccaaattttgctgctcttaaaaattttttttatatcattgcttcccaaatgaattacaataacgcagacatagagactgctggagatcgtgaccttaaacagttaaagatgtttgcatatactgcagcatgtttggtgtggagggtatctagagagtcctaaaaaagcaaagaggaagaaggtttgctgtacgcgtctggtgcggtggcaccgtttgccatgcccacctgctctatctcccgagtacccgggatctctccgttacagctggtttgcattgggattagcagctctttgcatgaggttgtagctgtggatgtggtttctgtagtgatggggccgactccggagatctattggctgctggctttgtaaatttcattcagtttggtccaatggcagagggagagccccggagacagcaggacctctctcctcaatctctctttttcttgcagaaccgtctctctcccttctctgtctcttagcacagagctcttattcagccactagcttggcccttcctgcttcaattgtaatgcttgttctgcccgtccacagactattggcggcagaaacaacgaatttcctccaaactaggcggtgttggtggctcttgcattcctctggatgaggaaatctagttggggggttccagaaggggaaggctcctgggctttcaatacatcctcctgaatcatacctcgtttcgggttccctagaaaaatctggacgtgtaaaaagaactcttaacggccgatgcagctcttccaaagctaaggtaggtgcagttttaagacctgtctctgggacattattctcattttaaaaagccgtttaaacattttgacttgcagcaaaggatggaaagcctcactgcagatacttgagcttcacttcatctgatctttattttttccttttatgattattaatattatttttggaaaatttggacaggactttctcccatctgtctcgctgcatttcttaggtgtgggtgggagtgtagaccttcatacggtttttacatgcaacctctccacagaaatatttggttttattttcacttaaagagaaaaatccagaccaccgttgtttggaagcgttttgctgcaatcagctatttgaacggctctggggccgtgtgtgatgtgtttacaaagtagcgctgccttccacacaaataaacagaagactgtggcggggagaggaggaaaaaaatatatatgtatctgcagtacagggagaagaaggagagaagcggccagggctggagatggtgaaggcaggaagacttctgcaaactgtgaggcatgggaggcttttcttttctttttctctccccccccaccccccccccttattctttaagaaaactgtcagctaccaccgcctggggtgcttttttgaggggttgggggggtgctgttaaccagaaagaaaaagggaaaaccggcttggttggggtcgcatttaagcgattttttttccctccttcatctccgggcctcggataagatgacggcttgggtgatgcacgaaataacgcacgtgattgattagacctggcttggcttggctagggaacgatccaggcgcgctggagaccccgcgtgaagatgaaatgacggtagctccgggctgcttctgtaaaccggggagcgggctccatgcacccctttcccgtgtgtgtgggtttcgaggcgggtgggaagggtgaggcaagccgcagaaggagggtagagctggtggttttgcttctttcggagcctttgagtgtagtctgaacctttgaggggggcgcgggggggcttgcagctgccgccctgggaaccatctctgaactgcccgcttttccgaaggagcggaaaagttggaagctgcgaggacagactaccggagccctggtctgggtctcgggggatctggagccctagtcggtgcccactgagaacaccccttctcggagcgagggtgtcggggggagtgttaagcctgcggggcgcacggtccgccagtccccgaggtggggacgggggaggaggctgaggagtcggttccaataggcgcaccacctctacagccctggaaaacgcaaccgccaccccctcttcccttccatcccatcccaagcctctctgctgtcccgggccgatttcatctcgtctcttcccccgcctccccgcttccccgcctcccaattcccgcgcggctcggctcagccccttcccactccagtgggcagaactgatggagaagatccgccaagcgcgcagccggcggcggaggagacagtgcggggtgggcgaggggcttcgagaccacgcagagagagagtgaacttcagtcctgacccctccccaaggccgcggctggggcgcccacagcccgcgctggcacccgcgtggcctgacctgcggaagcgcgagcggggatgaggtagggagagggaggtaggtgccgctcggctg

SEQ ID NO: 12548 - DNA, 6000 bp, Homo sapiens
acagtcatagtcatattagcatagaatagtgattcgggtcaggcacgatggctcatgcctgtaatcccagcactttgggaggctgaggcaggcagatcacctgaggtcaggagctcaagaccagcctgaccaacgtggagaaacgccgtctctactaaaagtacaaaattagccagggtggtggtgcatgcctgtaatcccagctacttgggaggctgaggcaggagaatcacttgaacccgggaggcggaggttgcagtgagccgagatcacgccattgcactccagcctaggcaacaagagcaaaactccgtctcaaaaaagaaaaagaaaaaaaaagtgatttgatttctggcctttaataagtgcttaatgaatcttggatgaataaacgaatgaatgaacaaagaaatgaaagaatgaaccagccaactgaccaggacgatgtccatagaggtctacatgggattccctcaccttggtcttgttgtgttcaacatttctatcaatgatttgaatcccagacacacaaagcatatttactatacttggaaacagaacaaatctgggaagatcattaatgtaatagatcacagaagaaaaatccaatatgatcttgccaggttaaaaacagggccaagatgtacaggcatcagccaaagccctatgtatgagtttaacatgtcaactggaccttgggagcctcctattttgagggtgatcgtgaaagagactgggaagtgttatatccttccccatcattcagccttctcacagaagttccaaaggctatttggtggtaaaactcctttctgcttgctagtcctcatcctttttcctccttttatggtatttgacactattctacactgttaacttgatgcccttcacagaacctttctcgaatttcatgattccactttggtcttatttccctcgttttctaatttgtccttctttgtttcttttaccctctttttaaagtttttcctttacctttacatttaaaaggtagtgtaccctaagctctaatcttggcatacttgaaatctgtatctctccctggttgtttaacattgatttaaaatagattttgttgagaacccgctatgtgcccagaagtgttccaagagctcttagaatacagtggagaataagacaacaatttctgcctttaaggagcctgtattctaggaggatgggaagtgatgaacaaataagtgaataacagtgttgagtcgtggttaaagctatgatgaaactcaaatccagattaaggggaccaggaatgtcagggctgctattttagacaagagtcagggagagtcccctgagaagatggcatttgagcagaactgggcttcttgtactcccagggctgcctccacactgaagactcccggatgctgctctctggccagctcctctcttctggagccatattcctgaatgcctcttagtccctgcaggatgtcctaagagcaccttcaaccacgcttgataatctcccctaccaaacttcttccttctctttggttccccatattggttcccagcatgaccatctcctcactcacccaagctagaaactctagcctccccttcaaatcctcctccacccctactcatacagatccaatccaatgacatctgggtcctcacttcctccccgtgccatagttcaggttcacactatctcttactggtactgttgcaggagactcctgactagtttgccagcctctagtctcatactccacccaccctgtcttccacgttaccaatagaatgacctttgtaaagcacgatcagctctgctcttgagccttctatctctacctactgcctctagggctagcaaggtgttcaacctacctggttcccaacctactggctcagccatctcccttcagtccctctgtcagaaaaatcacttcctgaccctttgacagtaccctctttttcctctcatatgcccttcagtttttcctagaactctttccgttcctctttcctgcttttcccttccctaccctacccagcaggtttctaagcattactgcaatagccaactcaactctgcaaagcttttttcaaattctcttccccctccatccattttctttgttgtgatgccatagtgcttgtggcaggcaggagcaccctgttttagaagagttttctgtgtcccattagccgtgggttacctggagacaggcatcgtcacttgtgcatgtctgtgctgcttgtagatgttggcactagggaggttacttcatgcatgtttactgagctggctgcaattatacagaagacttacaaacatataagtcaaaccacgtgaaactgctgttcttcttggtcaatatcagcaatttcatatgtttattctaatctgttttgttcagtattttgtattcctgttttggctttcagaagtgttcttaccttcaaccagactgccttagagcatggggctcaaagaaatattttcagctctggaagacattttccatcctacttctacatatagaacttttctggccaaaaatggatgcatatctcagaaatgtaataagcaatactcttctctcttcctcttgacaattgtttttcaaatggtttatcataaacatcagtgagatcttgaggctgttataaagtgatataatggtaatttctagaattgtaatacattatcctagtgaaaagaaaatgatgaagttgtgaatcaggcaaaagtgatgaattgctcatttccatgtagtttttcaggtggaaagtagatgcaggtatcaactggaggatgtgtgaatattttgtctaatggttttgatctcgatatagaactagagttgttcttaaattaagaatgtctttcatattctgccttttcaccagcatcactattaaaataatattcttaagcaacagccaaaaaattattaggatctgctggttctataatcagatgtttttgctggacactttaaaaaccaataacagctaatcacagtgtcctcttttgtgctgaattgaattttgttttggttttaattctcatttgaactgctgggaaagcaagcctgttacataccaacacttgccacctttctatatttgaatggacctaagtagtctttgcaaaaaatgtctaagactgtcctatccggacacaccatagggttttcccatggaaataattatatcacaaacgaatcttttttctaaagtctgtggttttaggctgccatacttctcaatcccctgaccaggagacaataaaattggctggggccttaatttgagggaatacatatttgattgtgggcgtggtcttctaagacaatggtaaagggaaaagcaagatgtaaaattaaacgttgaaacaagctaaactggttttcaaaatcttctcgactgtaacacatctagaagttctaaatataagaaggtttgagggattatctaaaaccaaggtattaaaagatcaggtttttagaagattttgattcagtaccttatacttttttttcaaggagttgagcaagaaaccatcaaaacttaggagagtgattttaggagagggtggtctccaacttgtctttatgtttgcttccaagataagtgttaagcccaaccaactagcagactattcatgatctgggaatcctatcagtggtcatccctgtatttgacttgagtctctctaattttttatagggacggcgaaggccagttggtcagccaaatgcataaaaaatggtgcagaaattagtgatgcttggaaacatggctcataatcatgataaaggcttatatgttggtatgggttgagaatgttggcctcatggtatctgggtatgcaagaaggcaaatcattattggtatactagcctttatgttgaatatttagagagctcttgaaaacaccccttcgatttggagtgaggaattctaatgagtaaaactccatgtagaaataaccatatccgattaaaaaactattttgattttcattccaagaaactaccaaaatgtcagctcgatatacttgtgaacatgttatgcttatttttaaataaggaagggtgcctttttacaaattaggcttgagtttctcttactatcatatatattaactatagacaagggagtgggttctaataacaaattgctacattgctatcgttaaatccgtgtttgagttttcttccctctaatgtattttctccccctctttaatttatatttttaaaaagcaatgtacttatctagaaattgtatgaaagacaaatatttaagaaagtaaatagagactatgggcacgtcctttgaatatgttttgccagggtcgaggggtaaatgaaataaactgatacatcataaatggaccacacaggaaagaaagtgtcatgcctatgcaaagacatgcattctccttagagacgacatatattgctgtcgaccaacaaagtcacgtggtgggagggggctcttttctttctccttcacatcccctcctctgatgtcacaaatctattttttcctgggagaattaattagcattcattgggtgtacttggctagaagaaatgaggtggggagaaagagagagagagagagagatcgagattgagatcttaagaaagagagcaaggaggaagagcccggtggggagcaggtccttctcccccacccccctacccccaactcccactggagccgcattgagactgtaggcaccaccgggcgccgaatggctgttttctaactgggatcctcggtgacgtatggctgcctgccccttggcagctgtctttatggaccagtaggcagagcgaaattgacgctgacaagacttttgcatcttggaagggactgtaatctactgtagtgaagaacagagcctctcaatcagacgggtgtaaataagagacggaggggagtccaaaagaaaaggaagaggaggaaaaacaagtgtgtgttggggggaacagggggaaaagcatttttggtggatggtatgaagccagccatggaaactgcagccgaggaaaatactgaacaaagccaagagagaaaaggtacccagcgctctgacaatagcctgtttaaagcttttcactggggggtgcttaaaaagggttagctgggttttgtctctcttttaaaatggctctgagacaatccctatggcatggtcttgctttcagggttgatttttttcctgtgggctgatgttaagttaatagagcagcctttcttcaatccattcctgttccaaatctttctaccgacgtgatatttcatagagggatgtctatagtttgtcaccttgggctgatgcattggggaaactgtctttttttattaatataattaatcgtaacttaggtcttgtgtcctgcatgttatattccaggaacgtggaatgtgtagttttctgctaatgctgaggaggaactggaggggcatgcatgttaattctgctttggttccgctaatgctgtagtgatttgggcattctctaattttcttattctaatatgattgctctttcttgtatcaggccctgactacgacatgtaataatcatttacagttggagcttcagagaggggacatcagctctgtcacccagtgctgatggaaaggcagggcgggggatcttctgctaattatgacttggagactggggggaagaaaattgataaaggtcctatttcttaaagagaatcttagaacgtaccacaattttcatatacagaatggttttttggagaataaagtgtttttgcagtaagaaaatggcagaaaggaactaaaattaatctcttttttctaaataatgactgatttcaagtttgatgtcccatagaatcggctcagccactgttaggttaatggatctcactgcattgtaattttccctcactcaaagtcatagactgtcataaatgcccaaaaacatattctgtaaccgcagtggctctaata

SEQ ID NO: 12549 - DNA, 6000 bp, Homo sapiens
ggcaaagtatcgattgctactctagtcttactcatcaactcattaattcgcttcaaatctcacaactaaaatgctctttcaatgatgttattgcactgtaatttgtataaggtacactccacgaaatactgtcaatacattttattgtgagcatctaatatgtgtcagggagtgtgctgacattgggtaaagaaattcatgtattaaactaaaacttcctcaacatccattaccaagaacagatcctgcctcagtttactatctggcagggaaggcagacatttaacaagcaaatacaatttccgttttcagaaagaagtccatgtgagatctcaagagacaagtaatcaaggatcagggtgaggagggagaatgcaatcaggcaaacaacttgaatatcatctgataaatgttatactttggccagcatgtggccaaagtactattaaaattaaaaagtgagagtatttcattctctggaggcttggggaaagcatcagaaaggagcagacattttcagggatgaataggcttacactaggcttaataaaatgggtgccagtaacggtggctgtgatggtactcagaaaggaatttcttctcgaaaacgcacgtatggcagggatgggggattccaagtaccagctgtgacgcatggatgaccgtcataccactctcactgattctttagcttcctagtcaagcaccatcgtaactagttgaaccagtcgagtgggagttgatatttcagatcagacctcgtatgtttccctcagagtgtagaattgccatataaataacaggatgtctagttaaatttacatgtccgataaaaaacgaatgtgtagtgaagtccccaatatttggtacatgcttgtattaaacatcatttgtgctttatctgaaattaaaacttcatagtttcatctgttttgactttttgtgtatttttatttatttatctggcaaacgtcccagagcggtaagaaccggcacggttttgccgtggcacagctgattacaaacaaaaagtctctccaatcagaagcaagcgcgcagagaactggcgtccggaatagagacgctgtaaccaggaaaccagggtgagcacccaccctaccgtcggccgcttctaggagacgggcgcaggcgcgcgctgacgttacatctcgcgcttaagggtggggacgacagagcgtctctctcggacgtgacctcagcgcctctttgtgattggctgcctcgggggcgcggcccttgggcgcggacgccctagattggtgctgcggaacagcagggagggactccggctgcagccgcgggaggtccggacactggcggccatggaactcaccggtgagtgcgcgtcgcgccgcccctctccagcgctctgggccgctttcggatggggctgttctgcgcgcgtgggatcgtggcgggtggtggagggggtgaaaccgacccggttcgaagcccggaagttgggtcggagggtctccagagtaggttggggctgagggtgcgtttagggcggacgcgctgggttccttggctcaggcgggtgggtcgagggactggggtctccggaaccccgggcctgagaccaacgtccactctttggttgttttctttctctctttgggcctggccatccccgccatgaacccagcggggtcgctgtctgagcaggggtatcccctccttggcccgagcgtttccccagcgacctctcagggaatcagggaatgaagctcagacagtgcccaggaattgtcggtggaagtaccattctcttgacccacaactcctgccaggtctccctaaggttcttcaggaacctctactgctaatgattgcccagggctcgttggtcgtggtcgagaattttacggtaatgtctttgccactttaagtggctgggtgggaaccttggacaaatcactcaacttgtctgggttctcatttgtaaaacgagagaggtattcactagagctccaagcctcatttcggctttaagagctaagattctgcgattgtgcagcataatgaacttttatgtcaaagatgtttggactgaaaacctggcggaagtgggcagactcctcacagaacgttgcaggctaatgacaacattttaaatgatatcatttggttcattactcactgtttttgctatcgttcatcttttaaaactggtagaactggaagttcgggtttaggtgaccacagtaagaaaatgttagttaagccacctaaaagtacaaacttggggaatttcaatatttggtaatattgaatcttaattagtaaactcagtcaacaaacacttctggggtctttccgagagtatatttaaaatgtagatgaggccgggcacggtggctcacacctgtaatcccagcactttgggaggccgaggctggtggatcacctgaggtcaggggttcgagaccagcctggccaacatgatgaaaccccgtctctactaaaaatacaaaaattagctgggcttgtggtgtgcgcctgtaattccagctattcaggaggctgaagtgggagaatcgcttgaactcgggaggcagaggctgcagtgagacgagatcgctccactgcacactagcctgggcaacagagtgagactccgtctcaaaaaaaaaaaaaaaaaaaaaaagtagatgaatttgttggagagactagacagttaagcctttgcacatacagttaattggcattttctgagtttgcaggtgaaaccggaaactcagagctttaggatggcttctcattgtatagttgtttgttttctggagccttggaaatctcatttgtaaagctgaggaagattttgactagatatccaagattctttttagctttaagtgtctaagaatgtacagtagtactaaatattgagtgggcatttcacattaataaagctttaggggacccctgagataaacatttcgcactttaaattgagaaaatggtcccagatacagcccatctctagtttagcctttatctttagacaccgcactgaagggagggacactcattgagtttgaaaggcctgcataactgatagaaaagtttaaaaagtgaagggagcagttacataatcaccctctttggtttttgtgtttctgttttttgtttttgttttgttttgtttttttgagatggagtctcgctgtgtcaccctggctggagtgcagcggcgcgatctcggctcactgcaacttcggactcccgggttcaagcggttctcctgcctcagcctcccgagtagctaggaccacaggcaggcaccaccacgcccagctaatttttgtatttttaatagagatgaggtttcttcatgttggccaggctggtcttgaactcctgacctcaggtgatccacccacctcagcctcccaaagtgctaggattacaggcgtgagccaccgcacccggcctaaataatcaccctctttgaataaggaaggagaacatgtgtgcagcatgtgctctggtgacatttgaaaaaggtgctctcaaaaagatagttcgagctccgggtgtgttttagtgtaaaccacaaaggtaatgctagcaaaactttgagagtaattgaatcagtggctaagctatagagcaggggttggcaaactttagtagaggaccagatggtaaatattttcagctctgtgggtcatatggtctctgttgtagctactctgctcttgtagcacaaaagtagccattcacataaatgaatgggcacacctatgagcctataaaactttacaaaaacaggcagtggaccagtataaccgagtttggatcctggcctgttttagttgtctgttattttttaccaaaccaccccaagacgatgtaaaacaatagccattttggtatgtttcatgatactgcagtgagctaggctcagctgggtggttctcttggtcttgccagtggtcactaggaggctgcatttagctggtaagttggctggatggctgggcctctggctctttccatgtagtctcagagctcttccttctccatattatctcttcccttgtccctctagcacagtagatggattccttacactttggcttaggatatctaagagtgcacaagtgaaaaccaccacaccttggaaatcaccacaccttttttaggccgaggccaaaaatttgcacatcactttcactaccttctatgggctaaaccaggtccaaatgcaacgggaagggactatactatagaagggcataaataccagaagacatgaccgctaatgaatcagactgctacattgtgttacctctaagcactgaataactgaacaaatttcttaacccctttaagctttagactttccatttataagatggagttgataactcatggagttttggtgaggctgcaataagatatagaagagtcttagcatgtagtagctgatgtatagtggccatttaataagtattaatagaagctggtaaagtataagagtaaaggggaaatatataaatgtgtgtatgtatgtgtgtatatatacttaattattggaagagactggtttgttaacgtggtaaaccatgatatgctgtggtgtaacaaacttactatttaaagttacatgtagcagtatttttagggcaaaattaagacatggtagaacctagttttgttgtatgtaaatgccaagcaagtaaatgtcaaatgagtaaattgatgatttgctttatttttaattctggggaaagctaacaaatttacattaacattaaaacaatatctatatctggatttgtaatatggaatgtgttttgtttctgagctgagatcctgttttactctttttcaggtaatagaggacacatctcttaactgggttgctctaagaactgatgtctaaaccgtctcagcatggcctgtagaggaggagctgggaatggccaccgtgcctcagctacactctctcgggttagccctggaagtctttacacatgtagaacccgtacccataatatatgcatggtatctgactttttctacccaaatatgggaggcgtggaaagccacatttaccagctctctcagtgcctgattgaaagagggcataaggttataattgtcacccatgcttatggaaatcgaaaaggcatccgttacctcaccagtggcctcaaagtctattacttgcctctgaaagtcatgtacaaccagtctacagccacgaccctctttcacagtctgccattgctcaggtacatatttgttcgggagagagtcacgataatccattcacatagttctttttctgctatggcccatgatgctctcttccacgccaagacaatggggcttcagacagtcttcacggaccattccctttttggatttgctgatgtcagctcggtgcttacaaacaagcttctaaccgtgtctctttgtgatacaaaccacatcatttgtgtgtcttatactagtaaggaaaatactgtactaagagcagcactgaatcctgaaatagtgtccgtcattcctaatgctgtagatcctactgacttcactccagacccatttagaaggcatgatagtataactattgttgttgtcagcagacttgtttacagaaaaggtaatgaaatgatagctataattgcattgtagacttttttccctatagaaagctgttgaatacttgtatataatgattgtttggcttttcattttgttttatggttttataatgctataaattatagcaaagaaagttctaatattggtttatatatccaagaagagcgatttttcaggatggtggtgaatgctgtcccccaacctttgatgttttaatggttactaaaaataagaataacctgatgctgttaaatttcagatctttttaaaaattaaaacagccctgcacatgtggtaaagaagtagagggcaggccgtgtacggtggctcacacctgtaatctcagcactttgggag

SEQ ID NO: 12550 - DNA, 6000 bp, Homo sapiens
gcaggtcacagaaccataccacagaatgtatgtatccatctcatgtttctgtatctatacgtatgtatgtgatggtactgttttgttagttaaaaacatacacagtcatagggaaaaaaactggaagaatcatgactaaaatatcaagagatgttagttctagcttctgtagttcagtggtctcagttttctacaaggaaggtgtgctttgggttttttttaaatttttgtttatttatttatttctaattaaatatagatacgaggtctcaccatgctgcccaggctggtcttgaactcctgggctcaagcagtcttcccacctcggcctcccaaagtgctgggattacaggtgtgagccaccgtgcctggcctcgggtatgttttttgtttgtttgtgtattttttgagacggagtttggctcttgttgcccaggctggggtgcaatggcacgatctcagctcatcgcaacctccatctcccaggttcaagcaattctcctgcctcagcctcccgagtagctgggattacaggcatgtgccaccacgcccagctaattttgtttttttagtagagacagggtttttccatgttggtcaggctggtctcgaaatcccggcctcaggtgatctgcccgcctcggcctcccaaagtgctggaattacaggtgtgagccaccgcgcctggccgggtatgttttattagaataattttttacttatccaaaagcaagggtgggcacggtggttcatgcctgtaatcccagcactttgggaggctgaggcgggcagatcgcttgagcccaggagctcaagaccagcctgggcaacatggcaaaaccctgtcttcacaaaacatacaaaaaattagccaggtatggtggcgcacacctgtggtcctagctacttgggaggctgaagcggaaggatcgcctgagcccaggaggcagaggttgcagtgagccaagatcgcacactccagcctcgggaacagagcaagactctgtctcaaaaaaaataaaaaaacatggctggttgcagtggctcacgcctgtaatcccagcactttgggaggtcaaggtgggcggatcacaaggtcaggagtttgagaccagcctggccaatatggtgaaaccctgcctctactaaaaatacaaaaattagccgggcgtgatggcgggcgcatgtaatcccagttactcgggaggctgaggcaggagaatgtcttgaacccaggaagtggaggttgcagtgagccgagatcatgccactgcagtccagcctgggcgacagagtgagactccgtctcggaaaaaaaaaaaacatatctcactgtgtcggggcttcctggccactgtgttataatggtgcttaagtactctgcacacttccgtttactcctttaagagctgagtgctgcacctgtgctgctctcggtgctggagacacagcgctggccaggcagagaaggccctcattgtcaagtgggggagacaggggcagatcctgcctcgggttggatgctgtagagttcctgagaaccacgtgtgtgtgtttcccacccagtgcgccctatccactcctccacatccagccctaccatctccatccacgaggtgggccataccggagtcaccaaaactgagaggagtggcattaacagactgaggagtgaaatgaaacaggtaagaacacctcagtggcagcgagggatgagtggtggtctccctacctgggcttaccccagaaagcgacagaaacctagggcatgaggctgcagcccactgtctgtagagtgggaggtcccttctgtctgggatctgaacacacccctgtccccagatagatattccagagccggtcatgcgcacccttacccactcatccttaaccttaacgtgatgttctcatgaacgttccagaaaatacccttgtccatgtttgcctctgttcccgagaaccactcttaggagtgggccacagccattgaaaaagtagagtcatgcaaaaagtcaccgaatcatctgtgtccttcaaacgaaatagcaagagggctctggaaatagaccagaatgcccatgatacttggattctccaccagccacaggggtctcttttcttagttcacctttaattcctggtaaaaaaaaaaaaaaaaaaaatccttttgaactgaccgcacagggccacagctcaacatcggagtcttaacgtgctgggtgctgtgctaggccttgcccaggatccatgctgggaaagagtttccctctgaccatgagaaatgcactcgaattttctgctccattttaaatgctgttcatgacccactaaatggagtccatgatgcactcatgggtcaccccctgcggtttgaccaacacggccctggattaagagagagggcaatagaagaagcacgcgttcttggctcaaagctggttttgatttcctgatgtatttttgctttcagatgactaggcggtttagtgctgatgaacaggtgacacccctttgccttgttcgtcctttacttcctgttctttctggcttgaatgtggaaagtgaggctgtgactccgcagcgtgtgaatgtgtagagggcggctctatccagcaaacgggctggggcacaggcagagagcaggactcgagggcaggagagacgaccttgccccatgcctttaaaaataatctgtttctcaaactcttgggctttgtagggtactttgtgaaagagatcatccaggctctgcctcagtgggagtttctattcaaaaagagggaactaaatagaaaactaaatgggggggaaatgcggtcattggttatatcagtagaaagaatgctgctattcctgtcctcagatcgcctggggggacttaaccctggaaggaaaaacatgtaagggtgctcttcttttatatcaccctggtgacatatgttctccacccccctctgggacactggagtcgcatttctaatattttgatgtgtattaccacaagagcctagagacatcttaatgacatgtaaaggccgattccacatgttgcccagaggtaaaacatgctttatctctcctagtttatgctgtttccaagtagggaactgccttttcaaacatcttcccttgccagccactcggtggcaccgtccctctgtccccgcatcccgatggcctgaccgtgggtgaatctgagtggttccttccgcctctatttcatgctgttcttgcgtgttacggggatgaagtgatcacctctgttctttgctgggcttagagtcacctagctagtacaaactttgaccacttacgtcaaggaacatattatttgttccaaaaatgtaataggtgttatggtattttcaatctctagtctcttttgtaagaataccttgtagatagcacactgtacccttgcaaattaagggtacattctagattttagacgaggaaatacttatgtggccaaaggtatcagcccgatcatcatattcattcatttaatgaatatctactgaatgttaggtgcagcatgttagtgtcagctgtaggtatttggttcatctgtagattttcacaattcttaccataaaatgtgagcatttcatggctgtgagtttggaaaataaatagtgtcctaacttgatgatgcaccctccacatatgacaggaacatttaatgtttacattcaatggtaacagttcatgtttttaaaaagagcagttagtaagtttcacgtggagtcgaagcccagagcggtgcttgcaggtgcccctgcacctgagcttgcctatgtgcgttgctgtggcaccttctctgcgcccgcattctctgctgctgctttctgtgggtgtttcggatgctgctccatgaccctcctctctgctgtgtctcttggtgtcattgctgtcaactgagtggattctttttgttttgtagttcttttctgtgggccaggccgcgtccagcagtgcgcattcctccaagtctgcggtaacagtgcctcgggattattgtgtccgtccccgctcctcctcgcgtccttcctcatgctcccacctcatgcccaacttctgaggattcgagcagggctgaagtgttttcagcgggatgctcacaggctcctccaactggaattctgaggagggtagaaagaaggccccaaagtgcttgccctgagctttgttctccgtcttaagctctcagttctctgcctgtgctccttggcacagtgtgggtgaggagtttccttctcaccaattcccagagcttctggaaacttcggggcattagttccatgcctctttatggagccaggatggtgagcccttgcccacatgtgccaactagcactctgcacctgccatgccccagatctcgtgcagggctcggattgagctcaccgcagagcagaggctgaatcttcctcctgaaactggagggcccggatcagctgagtcattgaggagtgcagctgtaattacttttatttgtgtctaattgttgccttaagtggcagtaatgagcccaatggaataacccagccgaactgccttttcaaaataagatctgttgaaatccaactgctgcagaaaggagagctccacctcctgccctgctagcacacttcaggatttcactttaaccctttacatttgactgtgcacatttgatgtgtggcactatcgagaaacaaaagtgccagatagtcccaggcaaagagatgtgtgagagtgaaggttatcccttctcgacctggaggtctcgaagctagaagccccgcagggcaagacagaaggctgggagctttgccgcagggaggggatgcgcccccactcacagaggcccgccccgccagcggtggggagcctctcagacagtgtccccctctggagcctgaatcagtccagccaatgttgaggtgggaaggagatggcgccctcttccctcacttcagcaaagtcagccccagttcagaggcagccattgccccaaattaagataaagcccagtgccaagaatagggaaagccggaaatgggattgcaaagggtgggtggatggaccctgatctgcgaggtcctcgccactaaacgcgggcttcactgtttgtcttcccccgtgtcatgtattgccttctctgtggttcctgtcctgtggaaacgtgtctgtcacttctctgtggcactgcagcaatgaagtgggcactatggagtttgtctccctgagccatggatgcctgctccgagggcccgttgtcaccctcaaagctctcccactgcagtggcacaggcgccacgtgcgggtgacagctgcccctcatgggcacttagcgcacactaggtatgcctcaggggcttctgtgtctccacgtggtgaaggcttccgggcagctctttataggatgcctgactgtgtccccactgtgcagatgagactgaggcccagaatcagtgttcatggcagggccagacggcctcgggtgtgtccttggcaccgctggcattgagtggggattagcactccggcagtctgacccccaagcccgtgctcgccctgttcggcctcctccttatgggttctagctttgggggtgggactgcctctcggggggcagggcagagtgcaacatggaatgaagtgatcaacccaaagtatgcgagtcatctcacatgaggaaacagacaaggtggactggaggaaccgtgttcctctctggcgagtggtgttctggcatttgtgcctaggtcgcagggccgcccttcgagatggcgcactttccctggggcacctgctgcgtggcttctgaggccccaagctgtctgtcttgcagaggtccagcaccccatcctcgcccactggcacgtcatcctcagactcgggaggacatcacatcggctggggtgagcggcagggccagtggctgcgcaggagaaggctggatggggccatcaacagggtccccgtgggattctaccagagggtgtggaagatcct

SEQ ID NO: 12551 - DNA, 6000 bp, Homo sapiens
ggcctttgggagccctttggggttggctcctgtgcccttctgctgtgccctgtcacctttgttgagtacatctttactttctggcactgtgagatttttacatttctccataaagttcatcagaagcactatacaatgagtgtcttttgtacagcactcagcacgtaatttatattaatgtaaagacaatattaaaggttatcaaagtattgttcattaaaggcaaattacagatgttaagtccgagtactcagagatagcaagtatgaaagacagaagctcacccaccttcaattttttctttttttttgagacagggtcttgctctgtcacccaggctggaatgcagtggtgcagtcacggctcactgcagcctcaacctcccaggctcaagtgatcctcccatttcaaccttctgagtagctgggactacaggtgtgcgccacctcatccgactaatttttgtattttttgtagagacaggatctcactatgttgtccaggctggtctgaaactcctgggttcaagtgatctacccacgtcggcctcccaaagtgctgagattacaggcatgagccaccatggccggccacaccttcagtttctatccaaaaatatgttactactactgagcaacatagcggtgccttttaagtcatacgatatcattttaagtgtaacagctccgatactttctatttccaaactgcataatctcctctggtggaaatgggagttcagtgggacaaagatgtattaaataaaatcctatttctctagaaatattcatgagatgaatttacatcatttgaaatattgcaataaccattttgttaaaagatactcttgtaagagggaggcaggatgagaaattatgcatctattcatgtcagcagctggatctgaatcttgatattaacttcccttgtgctggtcagcaaaagtttctccaaggaaaaatgaaaggacaataggaacaattcagaagaactaaacaataagtgaaaaaatggaaggttcattttcataagtcagagaaacttaaaatgaaaaataaactatagtgttttggatagaatcaccacaactttgtttagttaaggcattaaaattagggcacatgtcccggtgcgatggctcacgtctgtaatcccagcactttgggaggccaaggcgggtggatcacctgaggtcaggagttcaagaccagcctggccaacaaggtgaaaccccatctctactaaaaatacaaaattagctgggcgtggtagcgcatgcctgtaatcccagatacgcgggagtctgaggcaggagaatcgcttaaacccgggaggtggaggttgcagtgagccaagatcccaccattgcactccagcctgggcaacaagagtgaaagtccatctcaaaaacaaaaaaataaaaaataaaattaggacatagctcagggattttcaaaaatattgtcttgccatcagtctttcttttgtggtaacgcaaatttgaccacgcaggaagcagatcaaggaggagcgacaccgcattcctgtccaagaaggaaaagatatgccttgaaatagaccagagaataaacaagactcaaaacttcaagcaagtcgggcgcagtggctcagcctgtaatcccaacactttgggacaccgaggcgggggaggatcatttgagcccaggagtttaagaccagcgtgggcaacatagtgagacctcatctctacaaaaactacaaaaattagccgggtgagatggcacgtgcctgtagtcccagctatttgggaggctgaggtgggaggatcacttgagcccaggaggttgaggctgcagtgagccatgatcacgccactaccctccagcctgagtgaccgtgagaccctgtctcagaaaaaaaaaaaaaaaagacaacaaaacgaaacaaaccccccaaatttcaagtgatctgtgttcacctgtgtgaagttggaaataaaattccatgagaagactgtcttctccacataggacagagagaccaagcaggacataagacaaactgctgattttttctttttctttgagccgacagggttcccgcaccccatctgctggtttaggtgtagtggcctctgtgatgcctgggtaagtttagctatgggaaggtatcatcaacaatgttcaaagacttttgactcatcattgtgagaatgcactgggcaaccagccaagaatcttcagcactccagataacagtccactgcaaggccagcacaactgttgccatgttgaaatgtaccccatcactttcaggggtctgaggctctttgagagagggttaggatgacccactgatacggccttaccaaagagaaccacctctggaattgagcagacccccataccagttcttctggggttgggggaaaaaaaatgtcccagtagcagagggtttatccaggctctgtgagtttcagtgtttgtcaactctaagatggtatcagaaggcttgattgccctgattagaacatgatataacaagacatgtaatgagtgaggcaccagggtgcctggaggaggaatatttgagtattcatcatccctgccttcaacatttcacattctttttttttttttttttttttgagacggagtttttcgctctgtcgtccaggctggagtatagtggcgccatctaggctcactgcaacctccacctcccaggttcaaacaattcttgtgcctcagcctcccacggagttaggactaaggcatgcaccaccacgcctggctaatttttgtatttttagtagagagaggggctcgccatgttggtcagcctggtcttgaactcctgacctcaggtgatccgcccacctcggcctctcaaggtgctgggtttacaggcgtgagccaccgtgcctggcccacttcacattcttttcttttctttttttctgagacggagtctcgctctgtcgcccagtctggagtgcagtggcacgatcttggctcactgcaagctccacctcccgggttcacaccattctcttgcctcagcctccggagtagctgggactacaggcgcccgtcacaacacccagctaattttttgtattttttagtagagaccgggtttcaccatgttagccaggatggtctcgatctcctgacctcgtgatccgcccgcctcggcctcccaaagtgctgggattacaggcgtgagccaccgcgcccggccttcacattcttaatctccgtgttctctgatcccttttttaggagtctgatattgatgacactaggacttcaattgcagcctctgtgtggatgggcctcttgtcccttgattagtctcctatttcgatcggtttgacacacatgaacggtatttagaaagatgatgctactgatctcttgtttgtaagaccctgactttgaggttttttgaaaaactcatgaaacagttataagaacaattttctacagaaatcccaggacggtaaccaatttacaagagttgccccgccaacacaggtgaggtatggagacagcccctctcttgggtagggggtcggctttcatttgtcccttttgagtccactagccctcagcctcctccatttccaggggccactgatgtaatttctctattgtcttacgtgctctttgcctaaatgtctcccatgtagttcactatcgcttcctaccaccagatggtggaaagggaaaaggaaataacgggccggtagaggaatgtggtggcaggcagagtatctatggcgaaaggtgtggtggtgaatggacccaaaacggagcttctgaattgcccacgaatgcccacggattccctgttaacattttagcgcccactcaagggtcggccgtccaggtctgggagtcagtaaggcacaataatgcctgctagggagggagccagccctcatctcagcggattcctgggaacgtcagagctcgggaacattcctgaacacccgaaccgcacctggcccaggcactggggcggggcttaggcgggtcccagcgaggcgatgcgtcccctcggccccgctgcgtccttcgcccgtttttccccacgtcagtgccaccgcctcctctgtgcggaactcgcacctggcctgcctgcgttcccacgccccaccgaagggacgccgcgtttctctcccttccaagggacccttttccttcccctccaacagccccccgggaaaactcattccagattgcctcgatgccccagggccacctgccatcaccctggtcaggcgtttggccccgggcctgccctggtctccatccccagcccgtcctccacctcttgtcgccccctcccgctcagcccccttctcctccttctccacgtgcccctgcactcccacgcccctcccccaagaagcccctctcctccggtctcgaggagtctcgcggcacttcccggggcgtcagcccagccgctgcgggtgggtggcagccgcgcggagaggggtgcctctggcgcgggcggtgaggagggcgcccaagcccctcagccgcagggacgcccccggcgcctgccccgacgcggccccggccccggccccgcccctctccggccccgcccccgcccggcggccgcgcgtccccggcaggcggagctgcaggagcctcgcggcagcgctgaggaggaggggagagcgggcggcgcggccgcggctgccgggcgctgggctgggcggcgctgtttttttttttttttttttttttttttttttttttttttttttttttttcgcaatttccactcgcggggagcaggaaacccggcgcagccgggcgcattgggccgcgatgcaacagcagcagcaggagtcgccccggggcagcagcggcagcagcagcagaggcagcagcgggcggcgctgagccgccgccgccgccactgaggaagaagccggcccagccgccgccgcgtccggaccctcgcgcctggatcccagcgccccgatcccggcgccccaacccccacgcccgcctccgccaactttcacgctgcctcggcggcccggcccggctcgacgccaatgggtgagtgggggccgcccgcgtccgggcgtccacttcagccttgagggcggcgcgccagtcccagaaccgcggagcccgggagggcgccccgggggcagggtccggacgggggacaccgcggtgggcgccctcgcctgcctcgcgcacccccattcactcccacttgcgcccgtgtgcccgccgagcccgcgcgcggcgccgacgggaacccgcgggggcctgagcagacgatcacgggggctggccccgggcggctcgggctgagggatgcagggggtgtggttggtttttcgggtgggcggggagagttttgtcttggccatttttgcacccgagcgcgccctcctctgcgctgcggacacgggcacccggacctggtgggctccggccctgcgcggggctgctggtgtcttcctggtcctgtctcgggggaagctggaacctcggggtcttggagggggctgggttgcctttgctgggggttgacaggggttggggggtggggcgggaaacgccccagttcctggtctggctcgcagtcccggggtccagagcacctgacgctcctctccttgcgccccccttcctcccggccccgaccctttcgctgctgccttcctccagcctggcgagctctctgctccgtgatgctaaaaggccacttcccatactgtcctttaagtcttcagggtctgggacctggaaatggtgatccggtctttgatttactgagtaaacatcagttcgaagtagccaactaacctttgaaccccctgggtcccatttgatttagaccccggagcattggaaccaccttgctgcccagagaagctgccactttattggcaaggcacttatgattacttgggctattaaatgtttggtctacccaggtaatgttcttgctgacagccagcttctgtttttcagc

SEQ ID NO: 12552 - DNA, 6000 bp, Homo sapiens
aattgcttactggtagcaatcatttcagtatgtataagtatatcaaagcatcatgttgtgcgcttcatacaataaaatttaagttttatttatttttattattattttttgagatggagtctcaccctgtcacccaggctgtagtgcagtggcgtgatcttggctcactgtaacatccgcctcccaggttcaagcgattctcctatcttagcctcccaggtagctgggactacaggcacacgccaccacacccagctaatgttgcatttttagtacagacaggggtttcactatgttggccaggctggtctcgaactcctaacctcaggtgatccacccaccttggcctcccaaagtgctgggattacaggcgtgagccactgcacctggccaagtttttttaattttaaaagctagagacaagccattattaagtgagggtttagttttagatcctgaggcccctgcacaatgtccagcacagagtaagtgtttttgaattaaagtaaaataagaaagaaaattaaatgtaaccaacatttacggtgctcctggtatgtggcaagcatggcttttgattcttttgcttggaataccatcatatattcatattaattgagtgagtttgtgatgtatgagtatgcaggtcatatatatacatacattagttcccccttatctgcggtttcactttccaaggttccatttaccttcagtcaaccgcagccccaaaatattagatattttgagagagagacagtacattcacctaactttcattacagtatattgttataattgttctatattattattagttgttgttaatcttttatcatgcctaatttataaattaaacttcatcataggtatgtttgtgtaagaaacaaacagtatatatagcgttaggtactatccaaggcttcaggcatccaatatcccccgtgggcaaagggggagtactgtatatcacaaatatatgtagtacatacagattatattaaaacccttagaggaaggaaaatttattcaaggaagttctttaggccttgtgtgagctcctacacgtttatatccacatggttaaatttaatcagctctaggttaagcctttaggacatcacctttacctagaaagtccagggaagattacttgagtcttgagtttagggctcacttgcagctgtctgcaaaacatgatatgacgaaagtattagccagaccagggacggtggtgcgtgcctgtagttccagctacttgggaagctgagacaggaggatcacttgagcctaggaggccgagactgcagtgagcaatgatcatgccactacactccagcctgggtgacagagtgagaccctgtttctaaaaaagaaaaaaaaaagagaaagtattagctgaaggaaatgtgaaggcaaaactaaaacagtggtctatgcataagacgtggccagaactgttggtttttgtaactgagaagcagttggaggcatatcctcagaagagaattcctgggaaagtaaaacagggtctgtcctccttcctggccacatgatggcggtcttacctcactcactgacagctcaggtgctgggttggagtgatgagccaggcagttgcagggaagtggctcctattcatggcattgagagcccggcaggctttagggaactcctcactgttccccatcaattgtgggacaatggggcagtggctgctgtaggaacttatccaccaaggagctagtgttgcccttatattttatggatctcaaagagaacatttcaaaagcacagcagggaggttctgatttattcatttcatcccagctgtgctttgggcaactatgagaccaaaatcaaaacacctgcaactttgccatctggggagggtgtcaccctgttacgtaaatggggcataactggggacacttctctatggagagcaattgttctgtgactttaagcgaaatttatatcttgttacaaacacctggaaattgtagcatcatttagattaatgccagtattacaacattttagagagaatgtgcatacggctcagacgaaatccaaattaaccaattattgaatccctaccgctatgtatgacatcagttgcccttgaaagaattatctaaaaaataaaaataaaaaatcttatgtatctagttaagggaaatactaaaaagaacaagcatttattgaacatatatgctaggtactgtgctagatgcttgatatgcaatttttatttcgtccttgtaacagcactatggcataagtatagatattgactcagagaggttagctaacttgtctaagatcacacagtcagttatagaggaactcagattcatgttcagatatatctgacacttagtcccatgatcataacctccctacccggagacacctaagaaaacatggggcactaattgaaggtccaaaatttggaatgtagccagcctgggacagtaagagtaaggggacacattttctgaaagtgtcatttcatatttatctcctcttttgtttctgctacttgtagataccccgtggtgctcccccatcaaggtgaagtatggggatgtgtactgcagggcccctcaaggaggatactacaaaacagccctgggaaccaggtgcgacattcgctgccagaagggctacgagctgcatggctcttccctactgatctgccagtcaaacaaacgatggtctgacaaggtcatctgcaaacgtgagtaggccagctctgtgttgggtcctcagggatgaccagagccaaagttcttttgctctgagattgaggattttcactgaatattgatgagaaaaattctccttatgatcagggggacaccagggggattctaagatatggtggaagtgagttggctcctctcagagagaatgatatgatcagctgtttgagaaaaggggagagaagatcattgttcagaaaatgagttacatttgttcagttagtgctggatcctgaagaggtgttggggatttagaaacaaataagacgcacatgggtcctgccatgaagaggctttagtaaggcagaggtgtcaactgggagataagtacaagaagggtacaaagtcagggacatatggtagcagattaaagaagagttctcctggctgggcgcagtggctcatgcctgtaatcccagcactttgggaggccgaggcgggtgggttgcctgagctcaggagttcgacaccagcctgagcaacacggtgaaaccccatctctactaaaatacaaaaaattagctgggtgtggcagcgtgcatctgtaatcccagctactcaggaggctgaggcaggagaattgctagaacccgggaggcggaggttgtagtgagccgagattgtgccactgcactccaacctgggtgacagagcaagactccatctcttaaaaaaaaagaaaaaaaaagtgttctcccaaggagtggggcttagggaggcaggaaagagtcacagaagaagtgatgcttatttatgaaagtgagtgtgcctcaagggagaagcttagaggagcagcatttcaggggctggcttttagcttcatgacaagtcatacctcatttggaaaattgcaagtggtacagcattgttgaagcacattttagatgtctttggtattcaaaacagccaccactttttgagcgcttatggtttgccaagaatttcacatacatttgatttttacagtaacactatcaatatgggtgccattatgttaacttcattgtcagggaaactgaggtttcaaggctgcagccatgtcatcgagactatgcagactctgcaactgggtgactgtagtggacaatctgctctacccagatctcctcgatgccttttactagttgtatgtatccagtacccagcttctgagtactttgctcttaaagacttggaacttcaaccttattcagaagactgctccttcagaggactgatcccactcgctctctctctctctcactctctcactctcgttctcttttcacaagagaaagcatctcctgtgagcagcctgtagctgcccaatgactgactgataaagaattatgaaagcccagcttccttgcctgggggcaggacagaatgagctgtcattcacactccagagcttccctatgggatcaggctgctgctgactttgcctgagatctcatcttgcctggatttctccccttccctgttctgctttcctcaccccctcactagtctccctgggagcactttcttactaaacctcatgcacataaatccgtatctcagaatctgcttctggggagctcaacctaagatagtggcttagctgggttgccaacccaagccagtgtgacaggaaactttgtgtcttctgtgtgacataaaaccatccattgtttcttaaattccatttgttttatttatttatacaaagtcgtgttcttgttgcccaggctggagcgcaatggcgcaatctcagctcgccgcaacctctgcctcctgggttcaagcgatcctcctgccgtagcctcccgagtagctgggattacaggcatgcgccaccacgcctggctaattttgtacttttagtagagatggggtttctccatgttggtcaggctggtctcgaactcccgaagtcaggtgatccacctgcctcgacctcccaaagtgctgggattacaggagtgagccactgcgcctggccttcttatatttaaattaacttttcacctcatgctttcagagtttctagactctgaaatgaaactctatagacaaaaactaagaaatgctgaatatctgattttctcattttcagaaaagcgatgtcctacccttgccatgccagcaaatggagggtttaagtgtgtagatggtgcctactttaactcccggtgtgagtattattgttcaccaggatacacgttgaaaggggagcggaccgtcacatgtatggacaacaaggcctggagcggccggccagcctcctgtgtgggtaagaaaatgccacagcccttaggaggcacttgctttgggaggagcagggggtgttcacatcgtggattgtaaagggagcatcactattcctcctgtaaggcctaagcatgcaactttgctctcagtagcatcactggttctctggctcagccctagatctaacctcagtgtctatcctggagctgacttcgtagctgatggcttccatctgacttttgtctttttcttggtttgctattgaggcaactacaggctggcagagatgtggcatactcctgctgattttagttcgggggcctgagcaaagttattgacactatagggacagtccagtagagaacatctatgtgtctttcagccccaatgtagcttctttgtcattgactctggtggtcagcaagcactcaatttgttcagctggaagggatttggatattttgccttactctgggtttgttgggcagtgagtggttcccatggtgtggtcctgggagcagaagcagcagtagcatctcctggtctaagaatgcaaatttttaccaacccacccccaccacctgctgagtcagaaactttaggggtcaggcacagcattttgttttttaatgagcattccagggattgtgaggcactcaaatagagagctactgatctaaggcactgcttctcaaactttactgtgcagcgaagtcctctagggaccttgggaaaaatgcagatttaaattcagcaggtctgcggtgggtcctaggattctgctaaacgatgctttagggcaaagtttctgaacctcagcatgatggacatttggggccaaataattctttgttgtggagccctgttttttttgtttgcaggatgtttagcagcatccttggattttattcactaagtgccagtaacactgcccacagggggcacctcacagatgttgctttcaatatcctccctgtgattagctatgtgcatagctctt

SEQ ID NO: 12553 - DNA, 6000 bp, Homo sapiens
caggtatggtgggcaggatcaccagaaagcttttattttaacccagggccagggaggccgaagcttcaatcctgctgcttggttcgggaggcctctgcattggcccggagcacagcccctggggatggatacggccgctgctggaagaggggcccagctgctgtggtgtcagcgccagtcttggcctcattccgcttggggagtcctgttgaccacgtgcccctgccggtgaaagagtcaggggatggggatgggtgatgtggcggacacagcccacctggtcccaatgaggaatggaggaaggaggccggaggatggtgtccacgtactgagtcaagaggggttgtcacttaccggggggcgtctgagtatgagctagggtccatggggtctaactcttcatcctttcggcttactgctgtggaagtggcagggcaaagtcttcaatagaggcaccaggagcccctgatcactgagccccaccccacaagaagaaatgaagcccctggctgccatgtaccacagcaccctcctctagccccaggtccaggcatctttttgagggaaggcttcctcacgcagtgcaccctgcaccttgttggtctcaccgagccccattctgcccagcttacccttcttgctcttgggatagggagccagctcctcccggcgatggtggcgccgttctttgccctcttcccggtctgccttgtcatacccgcggtcccgatcccgttccctgtctcgctctctctctctgtctaccttgtcatagccacgctctcgatccctgtcagacttgtcgtggccccggtctgacttgtcgtggcccctgtctagtttctcatggctgcggtccgacttgtcatggcccctgtccgacttgtcatggctccggtccaacttttcttcagcatctggggacacaagtcttgaagtgacctcttgccaccccaggacccagcagcctctgccttcaacaacctcccttgcctgaggctgggcccgcctggtctcacctgcccctctgatccactatcattctacttggcctctccgtgagaactgctaagatcactcaaggcacgcttgtacctgccaactcacctgcattactgcttctgagcttcttggccgatttggtaaccacggagttggggtcatgtggggagagccaggatacaaggtctgtgtctgcattccagtagtaagggagcccgctgtggggccgcaggaaagaagtgtcagcacagatgtccttgccttggatcctcaactcttgtctccccagtctctgcctatacctgccccatgtcaggaccccacaggcaggatccccagaatctcttctcctgaagagaaaacactgtcagctgggcgtggtggctcatgcctgtaatcccagcactttgggaggccgaggcaggcggatcacctgaggtcaggagttcgggaccagcctgaccaatatgatgaaaccccatctctacaaaaaatacaaaaattagctgggtgtggtggtgtgcacctgtaatcccagctacctgggaggctgagacaggagaatcgcttgaacccacgaggcggaggttgccataagccgagatcacaccattgcactccagcccgggctacaagagtgaaactccgtttcaaaaaagagagaaaagacagtcttccaaccccagaggagccaggccccagcaggcagcaacttgagtcctgcagatacctaatgccaacaccctccacccgaggctccctcccttgtgtccccctaaacctcacaaccaaggtcagcacaggaagggtgaagccagaagttagctccccctcacccaggctcaccaggaagggtcgaacaccttgtaccagcttggtggtaggccctccaacctggtggcctcgtagtccacaggatcatcgtcatagtcctcggcaatgatctcttcctctggttctggtagaacaaggtggggatgaggagagcagataaggaccaggggacctcatcctacatgtagagcctagagacacgcactcacattcacacaagccacacataaaagacacgtgtgtgtgtgtgccgggaagaatatgaagtatctttcacattccaaatccaactctctatattaggaggtttacaaaaaaaggttacctaaatctgtgtctgggttcagatgatgagttctactgttagccaaagctatctggtttcagagttgatagggattcatcaaaaaatttactcatcttggccaggcgtgatggctcatgcctgtaatcccagcactttaggaggccaaagtgggtggatcacgaggtcaggagttcaagaccagcctggccaagatggtgaaaacccgtctgtgagactagcctggtcaacatagtgagacccctgtctctacaaaaaaaaaaaattagctgggcacagtggcacacgtctgtagtcccaactactcaggaggctgaggcaggaggctcatttgagcccaggactttgagcttgcagtgagctattatcgtgccactgcactccagcctgggcaacagagtgagaccctgtctctaaacaaataataaataatatatataccataggcacaggtcattcaataggcttaaaagaaaatccagcctggccaacatggtgaaaccccatctctactaaaaaatacaaaaattagccaggcacagtggagcacgcctgtggtcctagctactcgggaggctgaggcaggagaatcgcttgaacccgggaggcagaggttgcagtgggccaagactgcaccactgcactccagcctaggtgacagagcgagactctctcaaaaaaaaaaaaaaaaaaaaaaaaaaaaagtaaatcaatgatcattgccagttttatttttttgagatggagtctttctctgttgcccaggctggagtgcagtggcatgatctcggctcactgcaagctccgccttccgggttcacaccattctcctgcctcagcctcccgagtagctgggactacaggcatctggcaccacgcccggctaagttttttgtatttttattagagatggggtttcaccctgttagccagaatggtctcgatctcctgacctcgtgatccgtccacctccgcctcccaaagcgctgagattacaggcatgaggcaccctgcccggcctgggatcattgacaattttattaaccacaaggtctataccttgcacacagtaggcttgtaatagatgtcagttatcaataaggagaagatatattttccagtgcctggcacactatagccccaaatagatgccagtttttagtattactgataataaggtgtgatttgcagccagagcacagtaggcctaaatgatagatcctcactgcaactacgcttggcacacaggagacagcagtagaggttagcagtacttcctattagatactatgtcatcacccccatagagtaatccatgggatttaacttggcatacagtaggccccaaataggcattaggtggtcagtattattttgttgttttttttggatttttttcagacagggtctccatgtgtcggccaggctggagtgcagtggcacaatctcggctcactgcacccttgacatcctaggctcaagagatcctctcacctcagcctcccaagtagctgggactacaggcatgcaccacaacacacgattaatttttgtattttttgtaaagacggggttttgccatgttgctcaggctaatctcttaatccctaaactcaagcaatctacccgcctcagcctcctaaagtgctgggaatgccagcttgagccgccacgcccagccagtcagtattgttaagaatgaaatatctgccgggcacagtggcttatgcctgtaatcccaaccctttggaaagccaagggtggggggtggatcacctgaggtcaggagttagaggccagcctagccaacatggtgaaacccgtctctactaaaaatgcaaaaatcagccgggtgtggtatcacgtgcctgtaatcccagctacttgggaggctgagacaggaaaatcgcttgagcccgggaggcggaggttgcagtgagacgagatcacgccacagcactccagcctgggcgacagaccgagactctgtctcaaaaaaaaaaaaaaaaaaattgccaggtgtggtggggcggggcgtgcctgtagtcccaactactcgggaagttaaggcaggagaatcgcttgaacctggaaggcggaggttttagtgagccgagatcgcgccactgcactccagcctgggtgcacaataagactctgcctcaaaaaaaaaaaaaaaaaaaaaaaaaaaaaaaaagaatgaaatatctattcccccaaccccctccacttgacacgcggtagggatggatgtcaggaatccacattgttaacaacgaaaaatgcctgccaccccattgcttggtgcacagttggcccatgctaggtatcaagcgtcagtatcaacaacaaaagtgcctgtcgaggctggcacgtgttaggaccatctgcttttagctgtctcaccaggctccagatgtttgaggatgcctctcttggccaagcgggtctgcagcgcaacgggcagcggcatagctgatagcagacagacctagggacagacgaacaaactgacaagcagctcagataaagattcctatctggatcccgtaaccaagcgcctcccgtaaacatgtactcatctgactccgatctactcaaatgaaccagtagctgggtggacagaacatacgcactaaaagatgtaagaggtaggtggcaatatcatcgcaactcccaccaaccctactgtccccgaaaccaggtgctccagggccctgttcctctcccaggcccaggctccgcccacagcctaagaagcccggcccctccgcacttcagaaatgggctcatccagcgtccccatgactgccgggtgggagaaaccaaagcgctgggatgggggagcagagggcagcacttcctccagctccaaaagagtgcacccaccccaacgttaccaatacactcgtgcaggtagtggaaggctgtcacaccgcccgtctctctcgtgtcgccgctacgatacctgggcccacacgactctcttcccaaaacaccgaatgagaccttctctcaacgaggccttcactccccgagcctgaaagtaactggactacgctcaggaggcaatgaacaaatggcagaaactcgattggccaatgagagtgcgtccttggcgtgacatgcggtatagcgacccaatcgctgcccggtaataggcggaaagctccgacgccggtgtgcgtctacgctgggggcgtggcctgactgcgcggccagacgccagcgccatggaggagtacgctcgggagccctggtacggcaatgggcacaggcatccggaatattgctgcgacgccaaggccagccgtgggggtcgggcgggggaggcatcggccgcacagagccatgtaccagactcgggggactcttaacgtatctcccgctacccccactcggttcctgtcattcgggctccgttatgaggggccacaaccagagaaggtgcggcgaaggccgaaccacgccatgtttctcctgacttcgtaatctcctagccctgttaacgaaaaaagacacgctggacgatccatcccggctaggggtggtacggtgttgaccggaaatccccagagttgccgccagtggtttttcccaggtcgcctttgtcagtggggggcggggcacggatgaacctgttgagggccggcggggacggtggatgcttcccgcggtcgctcttggtttttcccagttgtgccggattgaaaaggggcggggcatggttggacgggctcaccgtcggagaaggggtgcgacgcggtcctgctttgctgacagtctgtcttggctagttaacacgcctatgtcgcttattgaaacgtcaactctgcgtg

SEQ ID NO: 12554 - DNA, 6000 bp, Homo sapiens
tttgaactgctgacctcaggtgatccgcctgcctcggccactcaaagtgctgggattacaggcatgagccaccacgcccggctgcatttatgacttttttttttccttgagacggagtttcgctctgctgcctgggctggagtgcagtggcgtgatctcagctcactgcagcctccacctcctgggttcaagcgattctcctgcctcaggctcctgagtagctggaattacaggcacccgctgccatgcccggctaagttttacgtttttagtagagaccgtgtttcaccatgttggccaggctggtctcgaacccctgacctagtgatctgcccgccttgggcctcccaaagtgctgggattacaggcgtgagccaccgcgcccagcctctaattttgtatttttagtagagacggggtttctccatgttggtcaggctggtctcgaactcccgacctcaggtgatctgcccgtctcggcctcccaaagtgctgggattacaggcgtgagccactgcgcagggccacatttaggctttttattggctggttctaggtgcttggtgatgctgacaaaacacatgataacactaagtccttttgtgctaggtcctttgtaataaatcactcagctgtttaacaaattaggtatattgaccacctactatatgacagacataattctagacactcagcaaagtattacataagtattgagagctcattttgtgctaggtccttttttactaattgttttcacctgtttaacaaatatttattcagccctactctgttagcagccactgttctagtgcttcatatacgtccgtgaacaaaacaaaccattacacaataagtgtttattgagtgctaactgcttgtcagagcccatgctattaagtgctgtcatctgtttaacatttattgatcacctgtgtaaggtactattctaatctgggatatgtcagggaacaaaacaaaacacataatggtggtgctgcttctgctgaaagccttcagttgataaccagatttttctttgtatttttgcttgtttgttttgagacagctggagtgcagtggtgtgatcttcactgcaacctctgccttcttggctcaagcgaccctcccacctgagcctcccaagtagctgggactacaggtgcatgccaccaagcctggctaatttttgtgtttgtgccattttgcccaggctgatcttgaactcttgggctcaagcaatccacccacatcagcctcccaaagtgctgggattgcagggatgagccactgtgcctggccgaacttctttcgtttattcaaatgtttattgatctacgacatgcgagatttgtgcaggctctttgctggtttcaccctctcaatcgctgtgtgagtttgtgtctttagggaaagtgaggcccaggaagggaagtgagttgcttagcgacacactgtcaggaaaaggggccctgagttgagcttaggtaaaaagcctcagagctgttgccctgacatctgtcttttttctctccctgcttcccaccccacctgtgcccccagtcagactcagtcacatgcccactcgaagtcgcactgctatggaaagtgggtgcaggtggtgggcaccctggcgtgatccgcctgcttgactggtttgagacacaggagggcttcatgctggtcctcgagcggcctttgcccgcccaggatctctttgactatatcacagagaagggcccactgggtgaaggcccaagccgctgcttctttggccaagtagtggcagccatccagcactgccattcccgtggagttgtccatcgtgacatcaaggatgagaacatcctgatagacctacgccgtggctgtgccaaactcattgattttggttctggtgccctgcttcatgatgaaccctacactgactttgatggtaaggcttctctaaatctccctggagggattgtttttacttgatggccttgtgacctttggcctccagtggtggggtgtcctgtaatccttgacccatactgcattatataagatgatcgattgctaatactggggattctcagccttgccctctgataaagtccatcttttaatggtgtgctaaccttattctgggctcctattctggtgaggggatcctgttaccatcctgagtattctttctctggtaaggggatcctgttacttttcagtgcttttattctgttgaggggactctgttattttagctgctttttatctagtgaggggactctgcttttatcttgagtgctcttaattgtggtgaggccatccttcctggagagtttggggttggagaagggcatcatgagattgagttggtctaacccctggcttgtgtgcagggacaagggtgtacagccccccagagtggatctctcgacaccagtaccatgcactcccggccactgtctggtcactgggcatcctcctctatgacatggtgtgtggggacattccctttgagagggaccaggagattctggaagctgagctccacttcccagcccatgtctccccaggtgaggcctcactgaccccagcccagaagactccatccttctcagggaccagtaccccctactgactgctaatcttccctctctgcttcttggcctacagactgctgtgccctaatccgccggtgcctggcccccaaaccttcttcccgaccctcactggaagagatcctgctggacccctggatgcaaacaccagccgaggatgtacccctcaacccctccaaaggaggccctgcccctttggcctggtccttgctaccctaagcctggcctggcctggcctggcccccaatggtcagaagagccatcccatggccatgtcacagggatagatggacatttgttgacttggttttacaggtcattaccagtcattaaagtccagtattactaaggtaagggattgaggatcaggggttagaagacataaaccaagtctgcccagttcccttcccaatcctacaaaggagccttcctcccagaacctgtggtccctgattctggagggggaacttcttgcttctcattttgctaaggaagtttattttggtgaagttgttcccattctgagccccgggactcttattctgatgatgtgtcaccccacattggcacctcctactaccaccacacaaacttagttcatatgctcttacttgggcaagggtgctttccttccaataccccagtagcttttattttagtaaagggaccctttcccctagcctagggtcccatattgggtcaagctgcttacctgcctcagcccaggattctttattctgggggaggtaatgccctgttgttaccccaaggcttcttttttttttttttttttttgggtgaggggaccctactctgttatcccaagtgctcttattctggtgagaagaaccttacttccataatttgggaaggaatggaagatggacaccaccggacaccaccagacactaggatgggatggatggttttttgggggatgggctaggggaaataaggcttgctgtttgttctcctggggcgctccctccaacttttgcagattcttgcaacctcctcctgagccgggattgtccaattactaaaatgtaaataatcacgtattgtggggaggggagttccaagtgtgccctcctctcttctcctgcctggattatttaaaaagccatgtgtggaaacccactatttaataaaagtaatagaatcagaagcggctggccatttgtaggtgtgaggcttttatggagcatctactgtgcactgagacagactgtccctctgctttgtcctcaggaagccacagtcttatgttgccatcctaaagagctttaaggattcttgaagctgcaccacacacacacaaaaaaatcttgattcccctgcccctgatcttatgcagtgcccagtatgtgcagaagggttctctgttggagatactgtgcatattgaaggtgtttagggcacatccccaatcaagatggctatctcagaagcagaaaaactaccttccctggcaccccaggggaatgaagaagccctttcccctgttgcagaagaaaagccctgtcagggtactggccagggcggggctggggttgggcgctgactggaatctgtccagggtgtagtcacctgttttgctctttatctttagcctcttcccccatctttacccttacatacccatccctctaatttctccttcaacacttgacttacctggcctaccctattccatgttggtttcacttgttccgacctgagttgttccctctcttgccctgcttatttgtctcggttcagtataaactccgccttccgggttccagcggttctcctgcctcagcctccagagtagctgggtacaggtgcataccactaagcccgggtaattttttttttttatttgagacggggttttgtcgttttgcccaggctggaactcctgagctcaggtgatcgcccggctcagcctcccaaagtgctgggattacaggcgtgagccaccgcctctggcccggactcttgccctgcttccaaatgctagctaacctgtgagcctttcgcctgtcccctttgccatcctcagtggtgactcacttgtcttcccttatgtgcgtcaactttcctttgcattttcacttgtttatcctcacctgctctgcttttatctgctagcttaacattcctgactcgcacctgatgccagtacgccctcaccccgaccccgccaggtcaaagtttcttcgtccccagattcccgtgtgctctccagggggcgaggcctcgctggaagacgggaaagcggaatttcagtccaaccatgaagcacctggtagtttctgatacggaaagggcggcgccttatggagaagctgccaataaagagccgagatgaaaggggtggctgaaccaatgagtctaggagacaagatcgggggatgatctggaaagcgcgatcagtgaagcggacgaacggcaggataaggcgggtctagtgacaggaatgggccgatgaagctctgtagggatggtgggtaggccgatcgggccgtgtccccggcctcccgatccgacggaatttggaaatcccggggctattcatacattgagcttttaggagcggaggagaaaagccaccaccctgacgatcccggctctcgctccaccttcactcaggtggcccggcagcggaagtgacgaacgcggaagtggtttttctgttgccgaggggacgggccgggcagatgccaacatggcagcggttggggctggtggttccaccgcggcgcccgggccaggggcggtttccgcgggtgcattggagccggggaccgccagtgcgggtgagacagtctgcccgagcagtcgcatgggaggcggaggtcgggatcgctgggagtcgggaatgttcctcactaaagtgagagggagcatcccgtgtggaccgacgtgtgtgtgtgtgtgtgtgtgcacattgtcagtgtgttgggggcggggaagagaacattctgagagtgattgtgggatccttccgcatatggagagtagagaccattgtgagtgtggtgggtaattctttttgggaaggctaaggccaccgaaaccattctgaatatgtggagtccttccgtgtggaagagaccattctgcgggtgtgggagttcctcactgaagaagggggagactattctgagggtggtggttccttccttataaagggacagagactattgtgagttagggtggggcgagtccttctttatgtgactagagagggtccattttgaggatgggggtgtctttcattatgtgcggaggagaccgttctgggggctccctcctaatggaggtagagttcattgtacattcgggtgggagggctcatcgttatatggtggagaaagaacgttctgagagtgccgggtccttcctt

SEQ ID NO: 12555 - DNA, 6000 bp, Homo sapiens
cttcaggtgaaagtgttgtgggcttgagagctgaaaaggcaggggagagacaggcctcttctgggggacctgtgatccgaggaggccccagggcctagcgtgaagcagtccactcacagtgctgtcttcctcacccctgcctgccttaggactttctggccacggctgtgttcgccttcatgtggctagttagctcatcggcatgggccaaggggctgtcagatgtgaagatggccacagacccagagaacattatcaaggagatgcctgtctgccgccagacagggaacacatgcaaggagctgagagaccctgtgacctcgggactcaacacctcggtggtaagccctgggtgctggctggaggagggagagtggaaaacagtacagtccggcatggggagtggtggagtgggagaataagaggagagtcaggggagatccaaggggtgtccctgaagaacgcgtgccaacaacaacgttgaaggatgagctagcaattgtaaccactgtgacaccacagactgtccccaaagggggaacatgacaggtttgggagacctggatcccagacccagcctagacatgtaaaataagcaactcagcaccctcttgggacctcagtttcctcatgtgcaaaatgaaggaaaaacttgaaatgtttccccacttggatgccccctactggctggagtcagactgtctgcgctcaaatcccagctctacctcttgcaagctccctgacctgaaactagtcacagcctctcaaggttcagttgagcatgcataatcgaagactaataataggtcctgctccaaagttgagtatttattgaactaagaatacggagtgctcagaaaagggcctggcacaaggtaagtcgtatacaagggttacagatgctaagattacaacttttctttcctgtcacttgctggatgtgagacttcaggtaacttagcctctagggcctcagtttcctcaactgtaaaatggagatagtatttcctgcccaaaactgaattttaagtgagcttataacatgtaaagctcttagaagagggcttggcatataaggaaaggtacagaaagtgttttatgtcttaaaattactttatgtggccgggtgcggtagctcacgccagtaatcccagcactatgggaggccgaggcgggcagatcacctgaggtcgggagttcaagaccagcctgaccaacatggagaaaccccatctctactaaaaatacaaaattagctggtgtggtggtgcatgcctgtaatcccagctactcgggaggctgaggcaggagaattgcttgaacccgggaggcgaaggttgtggtgagccgagatcgtgccattgcactcccgcctgggcaacaagagcgaaactccatctcaaaaaaaaaattatgcaagtttcatatatcttatacatgtgcacttatacatatattttatctacatttatttagatgcatgttagtggtatagctatatttaataagtttgtatccttacattttactatgaatatattacaaatttacattttaaacatgcataaatgtgtatataatgtgtatatgtgcaaatatgtaaataattgtatatgtaatactgatagatcgcagcatccccagggctccaaattcttctaacacgcccaccccgccagaggtgatttttctgcacatcgacgttctcgcactgggactcagagagtctgggtttcagaaacccccaccttgcggagcctacggattcattccccgcatgctcattcctgcacgcagggccgccaaggcaatgggcggggtaccacagccgagccttgtctccctgcaggtgttcggcttcctgaacctggtgctctgggtcggcaacctgtggttcgtgtttaaggagacaggctgggccgccccgttcctgcgcgcgcctcccggcgcccccgagaaacaaccggcacccggggacgcctacggcgatgcaggctacgggcagggccccggcgggtacgggccccaggattcctacgggcctcagggcggctaccagcctgactatggtcaaccagccggcagcggtggcagtggctacgggcctcagggcgactatgggcagcaaggctacggcccgcagggtgcacccacctccttctccaatcagatgtagtctggtgagtgaccggcgagcggtgcggccaaggagggtacaaggaaggagacgagcgggtcagtgaaccaataagagtcaggggtagagagtacgtaaggcgtttactggggcaagtaaggactgaagtttgaaggagccaatcaagaggcagaactacctgctaagagctgaaaaactagctaatgaatggagaaaagaagaatggtgcttcaagatggacagaatgaagagccaatgggagggaggtagaagggcaactcggcggaaaggcagggggagagaagcagagcaaccaataaagggagggaatatcgggggacttgcgcagtggcgaatcagcggagcgcaagagccacggaagcgacgaggaggtgggtcttagaagtgactgataagccaataggtgataaggccaatagatggtgagggtaaatgggcgtggatcttgaaggtcagacgagctcaccaatccgggaggaggggatagatctgccgcctctccccaacgctggaggggagggaagtagtgtggaatttcaaaggaggaagagggatagggtggggttctggaaaggtttgccggccttcttgctgggccttaaaagagaagtgagggtcggggcttggtggctcatgcctgtaatctcagcactttgggagaccgaggcgggcgggccgcttgagcccaagagttcgagaccagcctgggcaacatgatgaaatcccacctctacaaaaaatacaaaaattagccgggcgtggtggcatgcatctgtggacccatctactcaggaggctgaagtgggaggatcacttaagcccaggaggttgaggctgccgtgagctatgatcctgccactgcactccagcctgggcaacagagcgagaccttgtctcaaaaaaaaaaaaaaatggaaagaaagaaaggaagaaaagaaagaaagaaagaaagaaaagaggccaggtgaggtggctcatgcctgtaatcccagcactttgggagaccaaggtgggcagatcacctgaggtcaggagttcgagactagcctggccaacacggtgaaaccccgtctctactaaacatataaaaattagccgggcatggtggcgcacgtctgtagttccagctactctggaggctgaggcaggagaatcgcttgaatctgggaggcggaggttccagtgagtcgagattgcgccactgcactccagcctgcgcaacagagcgagactctgtctcaaaacaaaaaaaaaaagaaaaagagaagtgagatttccctcagataggagggaggatataggggaggaaaggcaggaggaaaaggctaaggggtggctaaaaagtgggggaaggcaagaaggtggcaatacttggatggaggtagcttctgacactgggttagccaggatggaaagggcatcccacatctaattcatcaaaaaatcctgtgggtcctaccttcaaaaaatatatccttcatcttccactgtcatctctcccagacctcttctcaggtctccatttccattctgttctactcacagcatctggagggattctgttaaatcctaaattaggccacagtcctcctgtgtcagaactctgccctgtcgcaggctgggcgtggtagctcacgcctgtaatcctagcactttaggaatgctagacttgaactcctgggctcaggtgatcctcccacctcagcctcccaagtagctgagactataagtgtgagcgaccatgcccagctcactttattttttccatttcacttattattgtcaccctatgttatacgagataatccactcatgcatcatgttcgctgtgtgaagtctatctctgcttcagtataagctccacaaagacagggatctttgttttgctcaatatagtttatcacaaatggctagaacagtacctgttaagggactatttttttggttggaggaaggagactgtaatctctttggtacctaacccagtgggggcaaggtcaggtatatcttctcagcagaggcagctgggatgaagctggctccaggaaagaagaaaagacataaagccaggacaaaggcataacagcccaacccctatctgagggcgccacccatgtcagaccccctctcctttctgtgtcttttgtctctacaggtcagtgaagcccaggaggacctggggggggcaagagctcaggagaaggcctgccccccttcccacccctataccctaggtctccacccctcaagccaggagaccctgtctttgctgtttatatatatatatattatatataaatatctatttatctgtctgagccctgccctcactccactcccctcatccactaggtgcccagtcttgagtgggccccctctcttaccccgtccctttccctgcatcccttggcccctctctgtttaccctccctgtcccctgaggttaaggggatctaaaaggaggacagggagggaacagacctcggctgtgtggggagggtgggcgtgacttcagactctctcctctctctccctccactcctcccaactctggccttggttcctccagcaatgcctgcctgaacaaaggccgttagggaaatccaactccagggttaaagaaaggcagagattgggggggcttggggtagagaggacagtttaggacccaaggtggtcttggagaggaggtgtggagtggaggggtcagcaggggggttgggttccagacagagtggatctggagtctgaaggagaggagtgcgctagagcattctggggtggggcttggaagggcgctgagggcagggttctagaaggggcgaggctttaagcgaggcagaatggtgggctccagagtaggtgggtcttggattggtaccagagcctatggaaagggtgtggcttggaacatttgggagactgagcttgattctaaaggggacagatcttgagcaaggcaagaagtgggattcaggaatgggccaagccagggttccagacagggtggggcttagaatggggcttccatggtggtttcagaaagggcagcccctccccatggtgcagtgaagaaaatgttttacaatggctgggtttgggcagtggagaggggacttggataggagcttccagatgggttttgttaggggtgggggagaatggctctggctacgacttgggacggaagtggcctgagaagagtcgagtgatatggcttgtagggtgaggcgtgggatccagagagaagcaccccaccacacacacccttccccactcccgtgatgaaacagctaggttaataggaggacagaaccaacgggtctgtgggactggcccacccctcttcccccttcccctgcgccctccctccctccacacctccacccgtcctggggtggttggaggcctggtctggagcccctatcctgcaccctctgctatgtctgtgatgtcagtagtgcctgtgatcgtgtgttgccattttgtctggctgtggcccctccttctcccctccagacccctaccctttcccaaacccttcggtattgttcaaagaacccccctccccaaggaagaacaaatatgattctcctctcccaaataaactccttaaccacctagtctacccggctctgatttctcagtgtgtctttttcgggcgccggggaggaggttggccgggggagaaaggagggagaggtggtgagaacaagctccacccggacccaccgaccgcagttcagcttgctgcaccatttcaggccccttcaaaagtgttaggcagagcagcatcctctgggaagcctctcctgccaatc

SEQ ID NO: 12556 - DNA, 6000 bp, Homo sapiens
cagctggacttccaggactctcaagagagcctctctgacgaggagtatgcccagatgcagcacttagctcggcttgcagaaaacctcatcagcaagtaagtggactggcctagatacagggctgagaatcctaagaaggcatagggagaagaagccaatttgtgtctattggctactagggagcctggcctcagagaggaatttagcttagagctctaaaaattgagcgggaccctcacaatccaggcaggaaatattctctgtgctcagcaataagccaggttagacatctctcattagacccagggattaatttggatctcttgttgctaatccaaacccaatagaactaagactgtttacccttgcccttaaatatcaggagggccttggagttcctagagtcagctgccctcctctgttctagccttctaccctccccaaattcccaatatctaaattcaggtgagacaaggatgggtaaaggtaaatacctagagaagagtagaaacatttgctagcataggtggctacctagagaagagcagaaataacaggagggagtcatgagtccaagtcaggtacccagggctttcacttctacccttacccaaaccctcaccagtgccccaggccagaagtccttcagaaatcccaactcatctatctgtccttgctttattacagacttaatgacctgagcaagatccaccagcatgtgtctgtcctcatgggttctgtgaatgccagcgctaacatcctgaatgatatattttacggccaagacagtggcaatgagatgggtgcagcttcctgtattcccattgaagtaagtagaaaggagtgaattaaggaaaggagtcaaaccagataggaaagaggatgaaagggaaagaagtggagccggaggctggacggagaaactgggcaaatatggcaggaaactgatggagagagtggacgggaaggcaggcattccttgacttgttacaggtccaaggtggttgctgggggaaaatcacagcagatttcatcagcctgagagctagccctcttccctgatagccatccctcccaccagcttcaagggagaaatggacaataaacgaagagaaacttgtacttggcccttccttatcacaagtagatctctgtataacctgataagggaacacctgtcattggaactagaacttccgggtgcctcggttttcctcttgagggaaaggtccatatcaggcaggacacttaatgttaaatgtgtcaccccatggctttgtccactgccagaattgttaactgatgcttttaaaaagtaactttagtgctaggcgaaagatataattgtgtcagggcctgattacagttggaggaggcctacaactcaaggcctggagttgcaagaagagagatgttaggccctaatttcacctgccctggaatgatggttttggcctaggacaacaagtagccttaaatttaccctctggtttgcatatttcctattttcctatacccactgcaatcaatcagtgatgccaaagccaagccgtgctctgccacttcacatagtactacacaactactgtaccagcagttgtcagctggcactcgttctgatagtacagctcatgctgtgctagttgtactatattttgaatattgctttttcacctatagccacatcctactagcctgcttctaccttcccacggagaagacagctgcatgcttactaaccaacaactcccctgtctttgtctttttctctccttttccgttcttttcctctcagactctaagcagaaatgatgccgtagatgttacatttagtcttaaaggtctctacgatgacaccacagctttcctggatgaaaagctggtgagtgcagggggttggagtctgggagggcaaagtattctatctgaacatggtcatggtcttgtgcttggtccaagggcactggagacccgtgggagcattttggccaggtgcttgcctggaagtccctactgtgtcacctaggattgttgttggttgtatgacttcatgggttatgctaatccacagggactaccatactcttgagagaaagtctcaacctctcctttggtaaatgtcttgtgggttcagaccaggccaataaaaagtagagtgttaccgtacttgatacagctccagtagaaaaaggtgagctattttgagctgctttgtacctcccaagtttctacatgcctctttcaccctatgagaaggtggtgtggaatagtgggaaaattgggagattcctgggttcaaatctcaaatctgccacttactagctattaatatattcgtttcctaaggctgccataacaaagtatcaagaactaggtgtcctcaaacaacagaaatgtattgtctctcaattctggaagctagaagtccaaatcaaggtgtcagcagggccatcctctctctaaaacctgtaaggggtccttctttgcctctttctagcttccagtggttttctggcaagctttggtgttctttggattgtagatgcatcacttcaatcctctatcttcacatgatgttctctctgtgtttctctgtcttcacaaggccatcttcttataaggacaccagtcacattggattggggcctaccctatccaatatgacctcaacaactaattgcatctgcaatgaccctatttccgaataaggtcacattctgatgtactggggattaggtcttcaacgtgtcattcctggggggacacaattcaacccataacactagctgtgtgacttcacctctctgggtcttagtttccatatctacaagataggaattataatccctacctctccagggtgttgtatattaagtacctatcagtgcctagcctatactagcagcttcatagtgcattttgttagttctagggagaacagactgaggctccatttttgggctagaaggctagttgcatgtttctcagaatgcaaaacccataggcatacttggtgagtgtgctctgatgaggtgactaattatgatcatccactttagggttggctggtaaggccctgaggcaggtgctgtgcttgcctctcatctaattaaggtttatttgaagaggggcttcagagttgatattgcagaagtgcatctatttcctcttttcatttgctcatctaattggcacactgcacaggaggcagagtggctaaggcaatcaggtcagactgtcccaacatctgagccccaagctagtctttgagcctcagacaacatcaacagaagtactttctatatataggcagagctcaatagccttgcccatttgggcagcaggaaataggtgcgtttggtctcttgtcgccactttcccgaggctcatgacctgaaaattggttcacaccaaccaacaacccaacttgagcccataccacacttgagaagtctcccacctcatagggcccagtgaggacttaaacacacatacacatccacacatccaaatgtggccaagaagcaggcagcagctaagaatgaccatgtatctccagaaaggctgtcctagaggtgagatggagatacagcttgtttcatttgggtgttattcctccccttgaagaagtagggcagtaaggagctcagagttagtaaagggaagtaaattgatgacgaagtgaatccctcccagtaactcccacttcccttacttggcacacacatgtcccgtgcatctagggcagtttgtattgtcttaagttactagttgaaaagcaaaaaacattatttgtcggcactgacttgctcctccctcagtatcccatagtgactgaccataacttcctaccctgtactcctctcattcacatgccacccgtttgtgacagccagcaaggctcaacctatggctggagcagcaagtggcctgtgcacagcaagaagccacataagtgctagattgaaagtaaagtgcatgccagggagtagaggtgaggccaggttaggtgggctgtaagcatgtgagggctgaagatatctttgcccatctgttctcccagctcactacttactggaatgtgaaccatctcacctgtgttgatgttctagaacttgattcttctgagtcgaagatggtcccaaaagaatccattttaagtcttccatggactgtacaaagttcatcttgtgggcgctgggggttactagggagcacttaaatttgcttcctgaacctgtgggacaagccatctagaactcatttcttaattagtcatagtgatagctgggggctaaagcatggcctggggagacagaccctcttttccaggaggagaaagttgagccagcctctctctagctctctccttgcttcacaaaacaacctttaaattacagtaagcatgtaataaagattccctcagcatctggcctccccacatgtctttgataagacaatgttgtatagagggcaggctatacagttaaacagacctgggttctgtctagctgtgtgatcttgagcactaaacttcttggagtctgttttctcacccatggaatgaaaacaatagtaccttgtaaggtattgtaaggttaccgggaagatgggacaaaattatgtatgtacagtgcttggcatacagtatgtgctcaaagctaggtagcttttacttaggggaacactgagatgtctccagggactggaggtcacagtaggacccttgtcctcaaccctaagctgtaggggtgaagctcagtgttaattgatactaatcaaaagacctctctgcttgcaaaactgtaagcatgcccagccccaaggagagccccaccatttggttgttttctggatattccttttgagaaagaaaacagctggctatgggccaaagggatacaagttggcaccttgtggtctcttggtcactagcagggactgggagtgggggagagtgtaagagtctacaaaagtgctaggcattggacacttactctttttcctgtctgtaccagctgagaagtgctgaggatgagactgcactacaaagcgccctggatgccatgaataaggagttcaaaaagctatctgagattgactggatgaatccaatctttgttccagaggtgcgtaatcttgggaattgggaaataaagggaaagagggattcttccttagtgccttcccttccagtgtgggccaggacatggtgactgtagtacagggggtccagtgctggctttaaactgaaggttactggagcttcctccctgcccacctccccccaatctcttcatcataaatagatagggtaaggcagaaaacatgtagaaaaattaggtgactgtggaaaaataaccagaaagaaggctcattctgtaacaagagatgatcaagaaagaataagcaagataggtttttttgtgtgttgttttcctggctgcaaattccccctccctgctcagcacctgctgccaggactgaacttcatctggttcataccagtatggccatgccagtttacagccaatacctgttctaaatggttggtgcccaggccatactggtggttaaatcttccaaatattacctctccctgctgctttccgtccctcccactctgggttttctgacaacaaagttaatctcaaaattgtgttttactgagaccagtagtaaaacaagcatactttagcaggcctaagctggaattacagagcctgcatgatctgcacagcagagagcccaagttcataattaagagttatgtttagagaactctctttgcattccagacagggaagcagctggcctggcaggcaagggtcttccctataagaaggtatttggccaaggctcaccaaactatatgtctgaaggaagaggtgttttttcctaattcatgcagagattccatgtgagctagcagtggcgctagcaatctcatccttctaatccctagccacatgagctcaggtgaaatatttaacctctcca

SEQ ID NO: 12557 - DNA, 6000 bp, Homo sapiens
ggtgacagagctagtctctatctaaaataaacaaataattttgtagcctcttttactaggagttctggaattagggaagagaggaaaggtacaaccctcctcccgaactccaggggaggagaatctcattgcacagatgtcctctgttcactcgattctcctggagcatttctaaggcacacagagctgctaccatcatagccattactgaccaagtactctgggtgaaattcctttattaactgaataaacttgttctgaagtgctgaccggacactctggggacagggggaggtttcggctgtatccttgctggcagatgacccccacacttggggggtaaggagagccatggcagaattcaacccacggtcccctaggagtacacaggagaccaccctaccctcacctgagggatgtgtgtgtgcaagggttgggtcagggcagactcttcagaagaggggaggtttgtgcggcaggcactttgattctgcacagcttacagtccagagagccgaagaacaagaggaactagattcccattctcagtctgttgatttccacaccacatttggagtctgatcaactccacagctgtgttgcagccgctaacgctgcctctgctctgtttgcctctagattcttcttatctgttaaataaagtgaggctgatggagatgtaatttagggcgggggtggattgcaagtgtctctgtgatagggcaaagcgcctcccggtggaggcgcagaagctaaactcgactggtagctgtgaggcaagggacgccagggcagctcctgtggactgtgttagaacttttcagggtggctttgccctgccaggggcctggatctcacagggggacgtcgtgttaggaccaagctgactgtcccatcacagaataatatctgcagctcagcatggggagcataagcaaagtacgttgtcgtgagtttaaagaggcctggctttggagtctgacagaacccgcgtgtgagtcccagatccagccttttctgcctcagtgccctgacctctttcagcttggttccttatctgtagatgggagtttgatacttacctctctgggtctttgggaaatcaacactgtacatgagtagcacacagtaggtcctcaacaaccaggctccagggagagagagccattcacactgtgccatgttagaggcacatcagtgtgcaggccagcgtgccaggacagtgggagtccagtctaccctccagccagggtttgggcttgggctgatggtggcaggaccagggccatttccatcttttctcttttattgtccatatgtccaaagcagacacttccattcatattcaggtgtgcaatgctaggagctgaaataacaggctgtagtgaatgaagcgaagcctcacagttcactctatggcaggaagaaccagctgtgaggcaggtcctcagcccacatcacttcatggtactgaacctggggccacaattccaaactccatgttcacacatgatgagtctataggaatgaaggagagatctatgttgtgtatctttattattatgttttattgtatatatttaaggtataaaacatgttgttatacacacacacacacacacagtgaaataattgctacagtcaggcaaatgaacctgtcaccttcctcagttaccttcctgcatcctatttttgcaagtaaacttttcctaaaaaccctactctcacgtgacattccagttggttggcccattgggggaattttcatgaatctccatcatgtgctattcagtaaaaatatcaaacccactaagcatgccttttcatccagttgctccctaggtaaagtataatttgctctccttcacttgagagctgaaggtaaggagcaatcaggcagcggttgatggagcaagtgcaggccagacagagggaagggcggttgtgaggcggcagacacgagagagagacagcgagagagcgagcgtgcacgctagacagagagaggcctggtagtagctggggcctgatacccctaatccaggaggctggactttatcctaagggcagcaggcagccctagtagaatttgaaaaggtttgacatgaccagattagcagtcaagaaaggtgccccactcactgggacagagaatgcgtgggaaggggtcaagactggcagcaagatgagctatgaattgttggtggtcatcgaggagggagatgagggtgactggactagggaacttcctgtggtgatggagaggagtcagtgtcaaggtctcacttagaaaaacttgggaggtctaactggccaggctcggtcaactgtgggggtggtaagaggcagcaatcaaggatggctttcaagatctttggcccaagctgctgggtagagggtggtgcctgtcactgagtcaggcagcacaggaggaggggcaggcgtgctgagtggggatgggtgcgttcactttgggacatgctgagcagtacttgctatgggactcaacgacttatgacttgaagacttcgcagagctgacctaacctccctgtgcttaccgtgcctcatctgtaataggagaataagaataattagaaaaaataactaattagtttcatttgttgagtctaggagaatgttctccttttatactgcagagtggtattttcttgtcaggtcttcccaagtaaaatgggaatgtctcgacttgcccatacagtggcttgattttacctgtctgctttgggtatcaccaccattcggcatgtattgccaatactaaacaaataagtaaatacataaattcaaagtaacaggtgtttattatcacgtgtgtgctgtaatagcccatcagcctgtccctcagacaaataaactctctttaaatcttctaaacttcctcttgaagcccacctctccctccaggggctggacagggcatttgggacccaggatctctaacactctcttctctgggaagccatctcccactgcccaggatgctggatgggaggtgagtgcaacgggcctgtggggttgtcagttggcggaagaaatctgtagatccagggagagaatcgagccacatgtgtggatttggaaatgacagtgtatggctgcacagcacgaaggggatgaagtcacagacacctggatttaaatcgagactccaccatttatttcttgtacgactttggggaggttacttaatctctttgtggctcagttacttcatttgtaaaatgaaatgataatattctgggagaatggttcatgtttccttccttcataaactgctgttcacgaggcggcttcttccagggttaaaaaggaatctactatccatgtatctgctaggacagacattgttgcgtgtcacttgactcctgaaatacgccacggtaaagaaatctctgtacactttcgtgttctgggaagtcactgaccacacaggaccaattattctccatgagacttagataagggatgctgtctgcccactctgtgccgtgactcccagatggcagacaccaccagtccttgttcttttgtctcatgaatgtgttgtaaccaagcgagttatagagaaacgccacacttttgagacaaattaaggggacctttattagctggcgacctacaggcagctaacgctcaaaattctctcggccccaaggaaggggctagttttgtttttataccgtggtctaaacaggggaggggggagtttagctgaagcaattttacagaagcagaataggcaaaaagttaaaaaaaaattaattggttatagaagcagttacaaaaaataaacagttccaggtgcaggggcttaaactatgattaagagataaatgcaggggcttttaggtaccttccaccgagcacattcccgagctgttggtacagcctgcctcaatatcttaccagcaggtgtattcttggatgtgcttggactcagcttgcactagttattcccttaagggggataaagggggctgcaagtgaagaaactaaaatggagtctgtccggctctctctgctaggaaagagtcactcaggttaaaacaaggtagggtatcacaaatgattcacttagacgggaagtctgtcctcctaaaagtagctaggcacagagagaaacattccctgttcagctggctgagacttccgctgattaaaaaaaaaacaaaaaaccctgccccataaatctccccactgaaaccggtgtactccttcctatgaaagtaaaagacacccccgccccgccccggttaccccaacagtgtgatttccacttctggggcgctctccctaaggcagtagcctgaataatttcaatgtattggattgtttggtttctgtctttaccaaggtgcatttatcattcatgcaaaaacagtaaaaaaaaaaaaaaaaaaaaaaatgaaacagcacgtgtcggttctcagcggcgcgccctagctcaaaactccagccaatcacaggagaagtcggccgcctcccaaccctccagcccagttcccacgtccctcgcccgggaagtcacgtccgctacagggagtgtcttcccatggcctccggaagcattcggcagtccacaagccacgcttcagagaagccgctccgggaacgccgcggcgcacctccggaagggatgacctccacgccttctcccctcgcagtccacccgagcggcgtgggtcgcgagaagccacccaaccgctccgtcttccggctccggcggtccgcggcagccaatcaaaggttcagtttctcagcggcgtcgcatccctgtgacgtgagcacatcctcgccggcgcccccttccgcgctgcggcgcctctagcccgccggagggcggctcctctcgatggtcttaacccttcaattacgagcgggcggcgctgcgtttccagggcagaggaaacgaggcgccgcgttggcgcttggacggcgggaaccggctccggagcgagaacgcgcgtgagagagcccgagagagacggagagcgagcgagcgcgcgggagagactgagagcggggggtgggagagagacttccagagagacagagcgagaggccgagacggaggctgtccctagcacaggccagggtgtcttgggactcgaatccctgggttgggctggccgggagtggggctttcgaaggaagcgggtgattttccacgtcgtccatatctccccggtgtgggaatggcggtcgtgcactctgggggtggcgttgttctcgttccctacttgggggtggcctttttcagcggagaaagagaatgccgcgggcattggtagccggcgggactacacttgggctaggatcagtgttcagcgggttcagaaatcaccgtgtccttggcatcacctccctccccacctcctctcccatcgcacagcaggagacagtgactggagggttttcaaggaggactgcattgcccctattgaaacaaaccgtccgacaaaccctttctccgacgtgtgacagagggacggtcgtaatgtgaaatacgactagacatgcgtttaatgggcggtgtgattgctgcattcgtgcgcaatgaatggtccaggccatttgtgtccagtagccgcacaagctgcagggtctcatgtttagagagggagggcctctccgccgtccaccttgctggagtacaggcgaccctgggcggtagccctctccgccatcagaaatgtggtgctctgagtagccacagattcccatctgcatctccaataccatttccctctactcactgacccgttgggtgcgttggatttgtgcgtgggtgtgagggtagtttggtgtgtttgcttgcaaatggaaaagcgaatggccttggttggctgagcttatcagggcactagcagtggagagagaaaggactactgtattcttaggagcagaatctcaacaacttcctataaaacgggcagtgtgtcttacctggaatgctttggcatttaataaaatgtcc

SEQ ID NO: 12558 - DNA, 6000 bp, Homo sapiens; identical to SEQ ID NO: 3792

SEQ ID NO: 12559 - DNA, 6000 bp, Homo sapiens
tgaggggaacttccttaatgtaataagaatttctattttaaaagccctgtaactaacatcatgtttaatggtaagaaaatagaatctttcccattaaaatcaggaacagggcaaggatgtccatgagcaaggatgaccctcttgtcatcctttcaataacatactggacgtcctagctaatgcaatgagacaagaaaatgaaacaaaaggaatactaatttggaaggatgaaataacattgtttttgttcatcagttacatgattgtttatgcagaaaatctgaaagaatcaacggaaaagctggagctaataagcaattataggaaagtcgaaggacacaaggtgaatatacaaaagtcaatcagttttctataaagcagcaatgaacaagtggaatttgaaattactaacacaatcccatttacattagcacgaaatacttaagtggaaatcccatttacattagcatgaaatacttacgtggaaatctaacaaaatatgtagaagatttatatgaggaaaactacaaaattctgatgaaatcaaagaagaactacataaatggaaaggtgttccatgttcatggataggaagacccaatattatcacgatgtcagttcttcccaatccatagattcaatgcaatcccaatcaaaatcccagcaaattactttgtggatatcaacaaactcgttctaaagtttttatggagaggcaaaataaccagaacaccacaatattgaaaaagaacaatgttagaggactgacactagccaatttcaagacttactataaagcaacaataatcaagacactgtgatattgatgaaataatagacaaacagatcagtggaaaaaatagagaacctggaaatagaaatagacctacataaataaaatctcctgatctttgacaaaggggtaaatgcaataccatggagaaaagaccttgtttgttttgttttgttttgttttgttttattttgtttttaaagacggagtcttgctctgtctcccaggctggaatgcagtgatgcaatcttggctcactgcaacctccacctcctgggttcaagcaattttcctgcctcagcctcttgagtagctggcattacaggcgcatgtcatcacacctggctagtttttgtatttttagtagagacagggtttcaccatgttggccaagctcgtctcgaactcctgacctcaggtgatccactggcctcggcctcccgaagtgctaggaaggatcatcatttttacaaatggttctggaacaaatggatatccacatgcaaaaaatataaatctagacacagaccttacacccttcataaaaattaactcaaaatggattacacacctaaatataaaacacaaaactgtataactcccagaatgtaacatatgtgaaaatccagataaccttgggtttggtgatggctttttagatggaacaccaaagacacaatccatgaaagaaagaattaataagctggacttcattaaaataaaaaagttgctctgctaaagacactatcaagagaataaaaaggccacatgctgaaagaaaatatttgcaaaagacacatgataaagagctgtaatctaaaatacacaaaaattatttaaaattaaacaataagaaagcaagcatctcaaaaaaagggctaaagacctgaacagacacctcaccaaagaagatatatagatggcaaataaacatacaaaaagatgctccacactatatgtcatcagagatgtgcaaattaaaacaatgaaataccactacagacttttccaatggccaaaatccagaacactggcctcaccaaattctagcaaggatgtagagcaacaggaactctcagtcatttctgctggaaacacaaaatagtacagctacttttgaaaacactttggcagtttcttacaaaactaaatatactcttaccacatgatccaacaatctcagtccttggtatttacccaaataaggtgaaaacctacgtccacacaaaaacttgcacatggatgtttatagcagctttattcataacaaccaaaatttggaagcaaccaagatgtctttcagtgagtgagtgtataaataaactgtggtacatccagaaaatggaatattattcaacactaataagaaatgagttatcaagccatgaaacgacatggaggaatcttaaatgcatattactaagtgaaagaagccaatctgcaaaggttacatactgtatcattccaactatatgacattctggaagaggcaaactatggaaacagtaaaaaaaaacaaaaaaaatcaatagtttccaagagttgtggagagggagagatgaacaggtagaacacagaggagttttagggcagcaaaaatattctatatgagattgtaatggtggatacaagtcattatatattcatccaaacctacagactgtacaacaccaatagtgaatgctaatagaaactatggactttggatgataaatatatgttgatgctgattcacagattctaacaaatgtactactctggtgggggatgttgataatggaggtggctatgcatgtggtggtaggggttatatgggaaatctttgaaccttcctttcaattttgctgttaatctaacattgctctaataaataaagtctttaaaaataaatttaaataaatgtaggctttgcatgctatatgacctatgtcacaactactccaactcagcattgtacaaaacagccatagactacaaattgacatgaatgtgttccaataaaacttcattcataaaaagtcagtgggccatatttggcccataggcatagtttgccaatccttgatgtatacacttgaacatggtttgtctctctggttcttggccctccatgctcctttgggtgtgagctatccctgtcataagccccccggccccagactatttgattagtgatcgggctaccttagaagaggaagacttaggcaaaattaatcatgtcaaaacgtgaaagttatcaacttcccccacgaactctgctcttctcacaatagcccctatcatagtgattggcaacattgttcattcaggcattgaagttagaaatctggctgttagctttaacttatctcactcctcacctgccaactggttgacaaattctgttgatttccccaaacactattacatctttcccctcctctccttcccttcatagcctggcttaggcctaggctcttaccatctcttggttagagtactgttaatatcttccagcaaaagcgggctacttgcagtcccccaagtatgttgtgctgtttcgcatacatttgccactacatatttccttttgcctggaatcccctcctcccttaaatcctgctcccatctcttatcttcctggtgaaatcctagtcattattcaaaacccaactgggactttccctttcacacttaatcattgcctcctcaaggctacttggtttaaatagtatacccttgacaatcccaatatacatgttccacaagccccgaattatgaatattggaaaatttaagtatacatgtcagaaacttagggctcaaataattaactaggctactaaatattgtaactaaaatgaactctgcatttcattgcatcatgaatttagtaacatcaaccataaaattagcttaatctgaaaagaaacaataaatcttttatcacttcaggtaatttactgcatatataaccataaataaagaacagagatcaacctcgtagagacacttgctcccacacagtagtcacacagaatgtgaatcacacatgcatctcagcaaaatcacaaatttctccatgtaaaagacctttgggaaaaacagtgagtgtcaaatccataaatgccaagagcctgctgtacttctattattgtacttgtgtcaatgaacaactacagccccaatgagaacatgagcttcttggggtcaggcccactattttgtcattctttttgtaccaaagttgatctaacaggaagcaaccactccaaaaacatttgttgaattaaattacctcctaattgatcttcctacttcaaggccatcttcctttccaaaatcctgccagttatttcacaaaaacatatccctgatgtcactccatttcccccaaacctttgatggctcttcataatctgctttacatgattatgtccccatgccatgctaggacatataagagccttcacaccatggcctcatactcccagtctcattcttagcctctcttcttcacaaacactcttcaagccacactagctgctcctggaacatttttggactttcattactctatgactttgtaaatgctgtttcctctgtctaaaaggtcctcctcctctcatctgcctggaaaacctgaatttattaatatagctcagcttaaatatcgctacctttgtagctttccctgacccctctcagaatcagtctccctcatttgtttttttataccaatgtgtttgttctaaaaacatactaagctgattctgcggggagggaaaagggaaggagggagtgccctgtcaaaggacttacccaagcagcgactgcggcactacgtgttaagcatattgttcaagcagcagtgggaggatggagctggatggccttcatgttacgagatgctatggctcgcatctttcacactgcgtgtgtgtgtgtgtgtgtgtgtgtgtgtgtgtgtgtgtgtgtgtaactgtgggggggggtagcagggggagagaaagagaacgaagggagacagagagactgagacagaaacaaagagggcggacgcagtgcagtaagagcagatgggcggacccaaatttcttcggcttcacgattttgcggaggtctagccctgcatccagccttgaaacagggtggggaggaggcagaaaggggagggactgcactccctctgagcgtgctagctccgactgcctgacggatcacccttccgctccaacatggctagttcctcaacgccgtgactcaagcctgttgtgccaggcagggcgcactcagcagcgcagccccacaggtggcgaaggctccgcgagagggttcccgccaggctagacagtggagtgccgcacagcgcgccttccagcctcgcagccgccaccctagcggttccgacccggcgccagcaggcctgcttggtcgatcttcgagccaaagatgcggcgaggctggaagatggctctgtctggggggctgcggtgctgccgccgggtactgtcctgggtgccagtgctcgttattgtcctcgtcgtgctctggtcctactatgcctacgtctttgaactctgcctgggtaagtggggctgggcacctaaggtggggaaattatactccaatataatcgtttgccctaccttcacactggtgtcccttgtgttctcaagccttctctctgcggttttcctttctctccctggagagttccttgtccccagcctctggcttcccacaatatttcctgcgccctcccaccagggtcccgccgtgtctccatcgtctcccacctagggtttcttatttctttgccctacccacaataatgtcctggctcttcccacgagggctcccttttctcatacagggcaaccatctgcaccttgtgctctccttctgggagcccctactgtaccaagttgaggaaacaacataccctgtgtctttaaactgtttgctcacactaggaatctcaccaatgcatccaactaggagccccaccattttccctcctactagaatcctactaggatttcctactagggatttcctactgagagttccaaaatatttcctctactctcttactagctctcctttttcacacactggaatctatcgttttcccgtgatcctctcacactggctgaagtgcttcatatctttgtccacttgtgatcccacagtgcaccctattctactccattaagatcttccgt

SEQ ID NO: 12560 - DNA, 6000 bp, Homo sapiens
ggtcaaatcctcacatcctctttagtgaggggtaccttggacagtgagaaactgcacacatataaagaagtaaagcttaaaattttgctgaggaataagggagttggaaaaaatgtttccaaagttacttctggctgaaagtgtttccagctcctgccaagcaccacctgcaaagaaggagcagagaagtgcctggtatgagttcccacaggccagatttggggggcggaacacattcaaagtccaaggctgactagagggctctggagggagagctgaattagcaaagctagacagaacaaaaggatttccgttttttttgtttgtttgtttgtttgtttaattttgctttaagttctgggatacatgtgcagaacgtgcaggtttacatgtgccatagtggtttgctgcacctatcaatctatcatctaggctaaggatttccttttcaaagtggcctcacacttcagggtggggcagtgtattgaagggctaaagcataaaaaaaaaacaaacaaaaaaaacaactctgggtagagcctgggagacggatttttactgttttgtctgctagaattaaaatttttttttttttagcttttgaagatttttcaagaatatttaaaaaatattatcaaagccatacatgctcattaaaagaaagttgaaaaagacagaaaagtaggagcaaaactaaaaatttgtttagttccatcatctagagacacccactatctatccttctatctatctatatatctatctatctattttttttttcagacagagtcttgctctgtcgcccaggctggagtgcagtggcgcaatctcggctcactgcaaactctgcctcccgggttcatgccatcctcctgcctcagcctcccgagtagctgggactacaggcacatgccgccacgcccggctaattttttatatttttagtagagacggggtttcaccatgttagccaggatggtctcgatctcctgacctcgtgatccgcctgcctcagcctccgaaagtgctgggattacaggtgtgagccaccgcccactatcaatattttaataaaagttcttgcatacaggtataccttggagatattgtgggtttggttctagaccaccacaataaagcaagtcgcatacattttttagtttcccagtaatataaaagttatgtttacactatactgcagtctattaagtgtgaaatagcattatgtctaaaaaaccaatgaccttaattgaaaaatactttaggccaggcacggtggctcatgcctgtaatcccagcacttttgggaggccaaggcaggaggatcacttaagctcaggagttagagaccagcctgggcaacatagtgaggcctgtctctaataaaatacttttaaaaatatatagctggacatggtggtgtgtgcctatagtcccagcaactcggaggctgaggtgggagtatggctcgagcccaggagatagagtctacagtgagctacaattgtgccaccgccctccagggtggtgacagagcgaaaccttgtctcaaaaaaagaaaaactttattgttaaaaaatgcaaatgatcctgtgagccttcagtgagttgtaatctttttgctggtgggaggtctcgccttgatgttgatggctgctgcctgatcagggtgatggttcctgaaggctgggatggctgtagcaatttcttaaaataagacatcaatgaagattgctgtattgattgactcttcctttcacaaaagatttctctgtagcatgcgatgctgtttgattccattttacacacagtagaacttcttccaaaattggagtcaatcctctcaaaccctgctgctgctttatcaactaagtttatgtcacattctaaatccttttttttttttttttttgcgacggagtctcactctgtcacccaggctggagtgcagtggcgggatctcggctcactgcaagttccgcctcccgggttcacgctatattctcctgcctcagcctcccgagtagctgggactacaggtgctggccaccatgcctggtaatgttttgtatttttagtagagacggagtttcaccgtgttagccaggatggtctcaatctcctgacctcgtgatccgccctcctcggcctcccaaagtgctgggattacaggcgtgagccaccgtgcctggcctctaaatcctttgctgttgtttcaacagagttcacatcatcttcaccaggagtagattccatctcaagaaatcactttcttggttcacacaggaagcaactccttggtcagtcaagttttatcatgagattgcagcaattcagtcacatctctgggttccactttttttttttttgagatggagtctcgctctgtcacccaggttggggtgcagtggcaggatctcggctcactgcaagcttcacctcctgggttcacgccattctcctgcctcagcctcccgagtagctgggactacaggcgcccgccaccacgcctggctaactttttgtatttttagtagagacggggtttcaccgtgttagccaggatggtttcgatcttctgacctcgtgatctgcccgcctcggcctcccaaagtgctaggattacaggcgtgagccactgtgcctggcctctgggttcaacttctaattctagttctcttgctatttctaccacatgtgtagtgacttcctccactgaagtcttgaacccttcaaagtcatccatgagggttggaatcaacttcttccaaactcctgttaatgttgatattttgcccttctccgttgaatcatgaatgttcttaatggcatctagaatggtgaatccattgccttgagtggcatgttgtcatttactgatataagaaatactggaggaggaacaaatttaagagaaaagatggtaggtttaactttggatgtgttgaatttgaggtgtctgcaggacattcaagtggagatgtcaagaacacagaactcaataaagcagtctgggtagagttatagaattagagttgtgaccatatatatggtaattaaagccaagtgagtgaaaaagattatttgggggagggagtatatgtatcctagccctgagaatgtctgactttcagaggtcagatagcagaagagtggcctacaaaggtcactgaggagagggcaaaggagtaggaggaaaagcaaaagagtaaaatgtcatagatgccatagaaagtttcaaggacgaggaaatggttaacggtgttaaatgtaggggagaagtcaagcaaaataaggaccaaaaataccttacttatttatggatttattgacactgagggtcattgtttgtgtatctcattgagaagtttcagtgggggaaggaagccagactgctgagagctaagaaatgaatgagaagtaagggaataaaaattgcaatttcacctgtgaagtacattttcaatacatttgcccataaagaggacctgaagagggacctcctgtgtagggaggttctttttttaagatggtagatacttgagcatgtttaattgctgatgtgaaatgagggggagagggatgggagaggcagggagaggaatctgcaattactgggtaggtataaacattttcaagtctattgatacatattgctcacgtgctttctaaaagggtttttaaccaacatatgctgctatcagcaattaagacagcttgtttggtggctactttgtcatcattaagtgttattaaaaaataaaaaatatctttgccaaagaatctcattattgttctaatttgcttttctttgattactagtgagttggatattttaaccagttgtgtccttgagtgtgtatgtatgaatttagtcaacgcttttgcccaaaacgtttctattttagacagacatttatttgccataaaaggccacaagtcaaaggatcagaatggtattatattttatttactcaaattagatagttcatactcttttatcttcttagaagtgtgagacaatttgacaacttttgactcagctgaacgaaagagacaggtgatttcaccgtctaagagagtgaccaacagatggaagtaagtgggtgaggaggcacgtctagtgttagacccctatcctcagtccccaggctcccattcctaacctggaaggacattcctcttgtgtctcaaggctttgggtcccagagctcccttttgggctgagtggccccctgctaaggagcccggggcgctgtgcggcccctttaagagtccagctcctccccgctccagggaaagttgcagctttttccgcctcccgggagggtgagaagggccggctgccggagctgggttgcgatcttcccggagccggagaccctcccttgaaaccggcactgggacttctcgatctctggaggcacctgttgcaagtgacaggtaggtcaacagccagcggccggcccctcgccctcggtccggtgctccttctggacccccagctccttttcgctgctgaagcgcccccacccccatctcggggtcgtgcgtcttccctacccgctctctggtcccccaatttttccttctccctagctgaccgcgtctcccctctccccgtccgcctctcccgaccgcatccccaggcttggactcccgtctgcttgggcggtccctcccggccacttttctttctccagggcttcttctggccccttccctgacccacccagcactaatgcggtctgtgcccctctgggagccgcctcccctctcctcttcggctcccctcgcggggagtgcccgggcttttcccgccagcccgagctggtgcccctcccgagagctggccctgggggcgggggcggggccgagctcctagcgggaactgcgccctccaaggcgtccagtcaccttttcgtgggttcctctcacagcgctcggccgtcgagcggggtcgctaacccgcactctcttcggacctacgacatcgcggcttctctggcgttggccagtcagccacaggtaaaggctggaggctggttggctggagtcctgcctcagtgggctccctctgcgcttggggctggggacctggctgtgtgctgtggagctgctttatattgccgctcttcaagcaggctgtgagagatctggtactggaggagggtccccgagatctcagaaggggcacagaatgcttctgtctcctgtgttggtttgtaatggggcagaaaaaggtgttcctccaacccttaacattgaatgaggtgggatttggggtggtgaaatcatttggttagaattctggtggcttgaaaagtggtgactttctaatcaagcttttcttcccccagtaccctgcttcttcaggattagaggacgtaaaattccagagtactgtgcttggcagggttgaccctagaccttgtatatttgtggcaaaaatgagtcttctgtacatcctggacctcctatatttaactggcttattttctgctctttaagctccccacccccacctctcataaatctattaatattgaggtattaatgacttaagacttttgtcgctgtgggaacaatgtttaatgcagagacgtggccttgatgaagttttctgcgtttttggttgtttggtttttagcaccctagtagaaaagcaccaccaacttggcttgtgaggccctttttgggcagaggatgaacatttctggtaacacaatttcaggtgtctcactcttggtcagagcagtgaaatggagctggaggcctgttctggggtaattgatctgtgagtatatgtagcattctggctctctgagcttgttaggctctggttgttaggctccattgagctggacactgtgataagttctttacataaaaatgcaatcctcacaataactctatacagtaggtgctacagttataaccatattatgatgaaaaagagactgagaagttaagtgccttgccctcaaaatctcggaggca

SEQ ID NO: 12561 - DNA, 6000 bp, Homo sapiens
aagaaaatagtttgtgtgtatgtgttttggacatcaacatcagaattattttattaggtaagtttttaattgttaggcagtggaatcagagaaatgtttaaaggcaaaaatctccttaccaagttttactataatttttattttctgatttcctggtactgggccttaatgtcagttttggggagtaggtcccttgttgaacatgtatttggagttttccttgctgtgaagactctttggctttatactgtatgaatgatctcagtttttttttaacatacaatgggttttatcatgttgaaatattgaatagttttaagtttatcagagcagctaacagctgaaaggaaccctgattttaatccttttatgacacaaaatctagtctatatcttattttgcaaatttagatttttgtatattttccttaaagtaagcttccttcagtaatacagaggtaatgagtagtgatgaaatatattagtatttattatcaattagtttagtgtttgaacttctaaagtcatgactggccacaggcaaaattaatacaattttcttcctgtttcccatagtcccccctttccctctcactttatgatgctaccatttttgggtacttactgcatgttctttttggttaaaacctccttagaaaaaatttgaaatgcattgatatcagtatgtcagtaatttacttataacagcttcaagtgttactcttcctgggggtgattttatcttaacagaactctgtgaacactaagctctaatggtgttctaagtgtgaaatgttatggtatgggaaggtttgagatgggtgattgttggtggtgattatcattgagcctttcttggtgttcttaaaatcacagtcacccagtatcctcatgtaaattttagtaaatataaactaatgttctctcataaagtgatataaaatctgatcagcagaaaaatactaacatacgtataagctttaagaattaatgaaatttgttgtagaacaataactaatttacttttatgatttccaggcggttatacaattaatgacaagccaaaccccagaggtgaaatcgtaattggtggacagaacatctccatgggatattttaaaaatgaagagaaaacagcagaagattattctgtggatgaaaatggacaaaggtggttttgcactggtgatattggagaattccatcccgatggatgtttacagattataggtcagaatgttttctttttatggttttctttagtttttataacttcagtatatatgaaaggtaatattgatcagtcattaataaagttgatggttccattagttcaaactttggacaagttatttaacttatgtatgagcttctccatcagcaaaacaaggacaataccaacctcatagggctgtcgttaagattaaatgagttgatatatgtaaaatattctaaacagagcctgaaccttagcgtaagtactagcagcactagcaacagcagcattgagtgtagagagaatgggcagggaaatagcaaacaggtaatgagaaaacaaaaagagctcagaggacgtctttcttggtcaaccacatgtgattttatataactgtttcctataacatactctatgctaggccttcctcactcttcacctctccacccaaggggcagcatgggcacatatatttttttttactgttggctatttatatgtgtctaacgaggcctgaaccttagaaaattaatatcaatccttagcactagtcagttctgagaatgtcagttactttggcattgtcctcattgagtctactgaagtggacctttatgttcaaaaaatgactccaaaatgggcccttgtgctattcacttggatgaggcaaaagttaaaacttgctgatgagaacccctcagcaagatcccagtcaggtcttttttaagacatagagtttcctcacctatatgtagtgactgatttcaatccatcgctggacctcacgatatctgacctgaatatagttagagatttcctgggaaaattggttcttcatctagaaatttgaaccaggaaccatggttcagttgagaaacaataagcttttttcccccttgttccttaattgcactggaatcaaaggttatttctgtagagtgggttcccaggctacgggtaggcaaatcagcactcatactcattccaaggccatgtgatgattattcaagctgtgccatcctgtgctagcactttcttagagaactgtcattttaacaagataatgtcaaaagtggaaaaggagaattaacatgtgttaaatgtgttctatatgccagacattgtgggatatgtctgtatgaggtaggcatcattatcctgataaaacttgaggattagaaggttaactgacatgccgaggatcacttagctagtaccaggcagagttaccattcagatagaatgttccaaagtcctagttccctctattaaattgattataatatttaagattataataagatgctaaagctttgggtttaaggtgtaacttttagccaatacttacttaagtaggcattttatttttaactggtgtgtatgggcaacattatatatatgcagtttttgccattttaaaagtaatggcaaaaaccacaattacttttgcaccaacctaataataattttagaagaagtagttttgtaaataacgattaaggcaatgatattcaaagaagacagtcagaattgcatataccttagttaaacagacttaacattctttatgacttaacagatcgtaagaaagatctagtgaagttacaagcaggagagtatgtatctcttgggaaagtagaagctgcactgaagaattgtccacttattgacaacatctgtgcttttgccaaaaggtaactttccaaagttgtattttttgtttcgtaagtcaaaagatatttagaaaataatgtgattacatattatcataagggtaacatagtcttctcttagaattttcatcagatctggggaattgtacatttatgtaagttagtgaattcaacagcttaaagatcattttagataactcagacgtgttaactatttattggacacctgcatcttgctaaatacttagctatgcaacaagttatttcatttaacatccatgacaactgagacttagtataagtaattttcccaaaaatgtaacacaactactacatgttgagatgaattttgaacccaagtttttctaaatcaaaagcctaagagattgagccattttctttatatgttgatatgtcttatttttatgggttttattcttttttaaaaattgtaattgtggtaaaaagcatataacgtaagatttaccatcttaaccatttctaaatgtacagttcagtagtgttgtgtatatttacattggtgtgcagccaatctccagacctttttttcttgcaaaatggaaactctatacccattaaacagcaactcctattcctcctccctccttcccctgggaaccaccattctactttctgtttctatgaatttgacttctctagaaatctcacacaagtagaattatacagtttttgcctttttgtgattggcttaattcccttagtataatgtcctcaaggattatccatgttgtagcatatgtcagaatttccttcattttgaaggcttaacaatattccattgtatccatataatgtattttgtttatatattcattgtcagtgcacattttggttgcctccccctcttggttgttgtgaataatgctcctaggaaaatgcgtatgcaaatatctctttgagatcctgctttcaattatgtggatagatacctagatttagaattgctggatcatatgacagttctatttttaattttttaaggaactgcaatactgttttccatagcaacagcaccatttttacatttcctacaacagtacacaaacattctagttcctccacttcttcactagcacttgtttgttttatatagtagtcatcctcatggatgtgaggggatattttgttttagttttgatttgtattttcctaatgattagtgccactgagcaccttttcctatgattgttggccattcatatattatcgctggagaaatgtctattcaagttctttgttcattatttaattgagctatttggttttttgttactgagttgtggaaattatatattctgtttattaaccccttatcagatatatgatttgcaaattttttttttctattccatagattgcctttttactctgctgattgagtcttttgatacacacaagtttttagttttgttgtagtcccagttatctgttttttgcttttgttgcctttgcttttggtgtcacacccaagaaatattgccaaatctattctcataaagtgtttcttctgtttttttttttctagcagttttatagttttatcagattggtgcaaaagtaattttggtttttgccattaatgtcaattacttttgcaccgacttaatagctcttcgatgtttagatttttgatccattttgagctaatttttgtatatgttgtaaggtgaaggtccaccttcattcattgcatgtggatatccagttttcctagtaccatttgttgacgagactgtcctttcctcattgagtggtcttaacacccttgtcaaagatcgtttctccatagatacaagggtttacttctagtttctctattccattggtctatatgtccttctttatgctggtactatgggttttatcatttcctaatgaaactttaataaataagagaaatatatatttggaattatctgtactgtactatgtcattgactagtttatgaataacttttctcaatgttttcatttctattttattttctgtttttttagtgatcagtcctatgtgatcagttttgtggttcctaaccagaaaaggttgacacttttggcacaacagaaaggggtagaaggaacttgggttgatatctgcaataatcctgctatggaagctgaaatactgaaagaaattcgagaagctgcaaatgccagtaagtaagaaattgctagactggtatagtccctaaaagtcatctaatgatgtcttttgcattaggctcttcaatatgtttgctttaataataaaatacaggattttaagaaacctatttcttaaatatgtataatggatttccatgttggaaggatccttcaatgtcatatagtagaataacctatgtagttctttattgcatgtttcaacatctttcccaaagtggtcatctagcctgtgtttggaatggtccatctttgggtagatctgttatataaatctactttgtgtctgtaaagcagaaattagtaactctaagtttagtaaatagtgttataaccatgattatgctttgtgtgtatactgtggctctgtaaatggactatcttcagatggtacattaataaccaattggagaaaatctgcttatatagtatatgccaggaattgtgttacacactaggaatacagaaagtagtaagactcatttcttgctctcatgtagttcattatcaggtgagaggggcacatgagagagacaacaatcttaacagcaatagagagatgaacagagaatcatggtaccacagatgagggtacctaacctacttgggaggacatggaagagatgtcacttcagctcatccttaagggttaattagaagttaactaggttgggcattctaggccaagaagcaacatgagaaaggcaaataggtatgaaaaggatgatgtgtgcagggaactacaagggagtctggtgttaccggtacagtgcaaagtatgaggtaaggctgtagaggttagcagaggccaagttgtgtagtaccttctatgcttgttcagaaatttggatgtaatcctgtagacagtgaggagccattggcaggttttactaggttagtgatgtgg

SEQ ID NO: 12562 - DNA, 6000 bp, Homo sapiens
accttccctggcagattgcaaacagggtgaaggcaggattgaagtgtggttcattttggtagctcctggagtacttgcactctgaaattattagaatgactggctgatcagatgagtacttcagaaagataatagcagtgaaaaggaaagattaggactggaggggctgaaaggcagggagcccacttaagaggctgctgtgatccaggctagaggtggtgagggctcagcaagtgacaggaggaataaaattgaggccataaatcttcaagtgtctgagatccacatgactacacctgtgctccaaaagttggaaacaaaatacagaggaaagggatttctgtcagattatgagttctcttttacttagttgcagtttattctaccgcatgatttcttcttctgtgtaatagtgttagattgcttttcttctgtgggtattaaccgtatctgttatctgtagacagttgtgaaatgttaattaactggaagctctttttcaaacagaaaaatgaaaaccgattttatctgaaggaagtgaacatcagcatgtatttggttaatggctccggtaagcaaagcactggcctggggaaaaagactgtggattaccctgaaggattagaaattacaatggtcttattaccaaatagtgccttatttaatgaaacagaagatgctatgtaaaaagtgtaccttgatcataccttaaaatcagtaacttagaactatgatgttctgtctttttctgtatcccattttttcaaagtagagtagataataattaaggatatgactgatttttagactatagaaacatctatagaaagataagggaacctagttatggtaagaattgctttttgtgggttgatcttgtcccccaggccttcactgaaaaaccctgaggactgttcctttttttttttttttttttttttgagacagggtctcgctctatgcccaggccagattgcaggggtgtgaccacagctcaatcccaggttcaagccaactacccacctcagcctcctaggtagctgggactacaggtgtgcaccatcatgcccagctaatttttttttgtattttttgtagagacagggtttcaccatgttgcccaggctggtcttgatctcctgggctcacgtgatctgcccaccttggcttcccaaagtgctggaattacaggcgtgagccactgtgcctggccaactttcccatttttgatgttgataggataagaagttactaacctgtttcttttctttgaagttttcagcattgcaaataacaatctcagctactgggatgcccccctgggaagttcttatatgtgcaacaaagagcagactgtttcagtgtctggagcatttcagataaatacctttgatctaagggttcagcctttcaatgtgacacaaggaaagtattctacaggtaagaatcaagcaaacttcattaataatttatgttcttatgttgacaggtggcttttcctttgaatcatagacatttaaacgttgaaatagaggaatatgaattcatagccttgaccaaattgtgcaactctatatttggctcatcattttgctcaaccgagatgtttttgtgatcttaaaatcatttgcaaaaaaagttcttaaagctaaaactgatagaagctttaagtgagctttatttgaggtatgggttttagtttgtagggaagatggcacttgggagcagcagctttgagcatcttgcatctgcttcctgaggccgtcttctcactggaaacattttcatacctgaatgaaagcagtttggtctgattttgttaagacaaaagataaagagcggtagcaaagcctcaaatatcatgaactatgtttttaccagccaaaacgatctggagagttttcaaagcatgtgccagtgtgaatgacgctttttgaagatcactcagggataatggtggtatttattagatttttaatgaaaccttttgaagggctcattataatgtgttcatacgaatatgaaagacatatttggcattacaagattaaaatttgcatgaagaaaaaaagcacataaaattccttaattgacttgtccttttaagcctattacctaaaattgggggtttgtggatcacaactctgttgagcagagctagctattccaggcatccacatccttttcaaccattaattctatggtttggaaggaaatgtggaagctgtgtttaaaagcgaatatactgtgagccattcgactacttttgcagtggtgttgaatacctagtctgacttggttaggccacaataaattgggctctccaccctaccattcttgcgattaaagacgttagttacactttaaaaatattttcaagaattcattttcccttttgtctgttttgcttatgtacttcaattattttgatcctttagtagctttatttttggactttttatctggctccccttcattattcccctaattttaagtccagatttgtgtttacagtttaaaatcgtttgcagtattagtatcatcacttcaagactgtttatctagtcacctgtaatagagatgagctgtgctctttctcttactttgaaactttggtttttatgtacatagaattaaaaatatcacccaaagagatatacagcatttaatactgatattgaatgtataatctatttgtggaactaggttcttggctgtgggtacctataaatacaacacataggtaatatttgactgtatggggaaagaaatagaattgcaataaggcagaagagtgttgattggattttactggatcagaccactttctagaagtagaaaaaaatagcccccttaggctgccaaccctgaccagataagaaatgcagtaagcacgctcaaattagtaagaggtcccagttttcttgactttgcagccactaaaattgtatgtactaagtcacgatctgcaaactttaaagttccaaacagtgagtgttttaggctttggtgccatatggtctctgtcacaactatttgaccctgctattgtagcacgaaaacagcaacacataaacagatgactgtggctgggttccaataaaaccttatttatggacactggaatttgaattttatatgctctcatgtgtcacaaaatatttttttcaaccatttaaaaatgtaaaggccatttttagctcttggaccagatctggcccatgggctacagcttgctgacccctgaccctaaagacagagccagcctggctattctcatcacatgataccttcctgatcctgtttccactttcccaaaagacattcactctaccactgagaggctaatctggctatgtaaaagtgggctagattagctccctttatttctgataaagtaatatgcctattttggaaaggacttggaatataaacaaacatatatgtgtgtatgtatatgtatatgcacacatatatatcacatataaaatatatatcatatatataatgtgtgcattatatatcatatataatgtgcatatattatatatatgcacacatatacaatgtgcatataatatatgcacattacaatatgagctgtgtttatagatgtaaatgaatatacatgtattcatatatatgaatatctgcatatatacacataaacaaatgaaaggacaaagaaagtcttagaattttaattctagaacagttctccattttctatagctttatcataaaaatatacctgtcttagttacttgaagttgatcttgtaagaacatttctgacttttaaatcaacatctttgacttcgagacattcttttgtgattatactcattatttattacacactttttctcacctacagcccaagagtgttcgctggatgatgacaccattctaatcccaattatagttggtgctggtctttcaggcttgattatcgttatagtgattgcttacgtaattggcagaagaaaaagttatgctggatatcagactctgtaacactaatcaatacgtgatctctgttacaaaagaaaaaagcaagtacaagttccaacatgcaatactggtcaacttaaggtatatttagttgcagtccagctctttagaatgggtggtatgggggatttcaaacttaaacaaaaaactatcaactacaaattagttgcctgactttggtttttccaaccaaggaatttaaaactgttatttttacagcaaaagatgtgcaaaatcactggattataagttctattttactgtcttgaattagtatttcagtgttttcattttagacattcagactaaaaatacaccgtttagaaaaaacaatttttgaaaaagagattttttttccctgcaggtagttgagttggaacaacatgttctaccgtggatttgtacttgctccttttgctctttttgtgtgtgtgtgtgtgtgtgtgtgtgtgtgtgtgtgtgtgatttttgtttgcaggttaacttagctactttggcattgctgcatatttgacctttgagagatataatagtagatttgaacaggggctggtattattatgttcttagcaataaatgcttttctaatgccttttgaatacatttgtatttatgtggctgtaatgacaaaagatacaaaagctttttaaaatttagagtaggtattaatcttattgtttaatcttttttttaaaaaaactggatatttcaatcttttaaattgcaatatataagactattccaactgggcatttcaatccattttttaggtgctttagagataattgcttgccagtgccaattgagggcattagtactttgtgctcataaattggcctctgtatgcagtactaaaattaatgcagatttctctttagccttccaacatttcttgttgatagtgatgtattttattattttctttttcttaagaaatgccagtgtgtcctagaacctagataacgaagtgcacttacacttataaaataacttgcatctaggctgggcgtggcggctcacgcctgtaatcccagcactttgggaggccgaagtgggtggatcacttgaggccaggagtttgagaccagcctggccaacatggtgaaaccccatctctatcagaaatacaaaaaattagctgggcgtggtggtgggcgcctgtaatcccagttactcgggaggctgaggcaggagaatcacttgaacccgggaggcagaggttgcggtgagccaagagcgcaccattgcactccagcctgggcgacaaaaacgaaactccatctcaaaacaaaacaaaacaaaacaaacaaacaaacaaaacttgcatctaaccaaaaagtcttggttttatcttaatccattaaaaagttgttctttgtttccagcttgcattgattgctacaacatcactaatttggctttcacatttaaatggttctgtgctaatcaaaactttcgttgttattattcattatggtagaatcatttttaattcacgtgctttgtgttcagttttgtggtctgagagatgtaccaattgtcaaattaccgtgtaccacctaatgtttataggagaaagcaaaatacatcagcttggtagttaacacatcaaatatttcttgctgcttctaggagaacttttttggtgtgtgttggaatggctgagcaaatattaaaattgttaatatgcagccatatatggaaggttcctgtggggttgttttttcgtgttttttttttttttgtggtgggattatgtgcctcccattcactagaaaatgagaaaattgtctgggttccaaaatattgacattgaatggatcaatacacacacacagacatatatatatatatgcacacatatataggcagttgcatgctagcatgggtatttttataacaatataactgagttatattggaattataaatattttccgtcacttaaatttgttctttgtttagcctgaaaacctttatggctcaa

SEQ ID NO: 12563 - DNA, 6000 bp, Homo sapiens
agttcacttgcattgtgatgaacactttcctggccatcccaggctgttttttggggggctttctgcatgtttggctttcatgcaaaagtatcttttttgtttgtttttgagacggagtcttgctctgtcgcccaggctggagtgcagtggcgcaatctcagcccactgcaacctttgtctcccgggtggaagcgattgttgtgcctcagcctcccaagtagctgggattataggcacctgccaccaagcccagccaatttttgtgtttttattagagtcggggtttcgccgtgttggtcaggctggtcttgaactgctgacctcaggtgatccacccgcctcagccccccaaagttctgggattacaagcgtgagccaccgcgcctggccatgcgaggacatctttaaggtgctgcttagttcccaagagaagccaacaatctcagcacagggctgtgaacataggaggtgctcagtgaaagcaatcccatttaccttttgcctgttgaaacagataatgtggcaggaatgtcaatgatttacttgagaagaggaggctaaggatcagccattctactagaacaagattactatccaggctttccccagtcccaggtggggtagggggctgggaaacccagtcagataaggattcaattcagtgatgaatttagaggttatgaaaacgtggtggtacatggatgacaaggactctatacagtgaagaatgggtctcattttttctacctctctaccccagtcagcaggatggctaagggagggagatgggagggggcagtaatggagatgtcattataacatacagcattgactgtgtctctcttccatgccagacagttagcacacaattccctttataactccatgatataggtattagctttattttacagatgaagaaatagtctcagaaaggataaattacttgccacaggttatacaagctattacgtagcagagccaggatttgaaccgaggcctgtctggccataaggcttatgtgctttctgagctacctaccatcctggatcttctatgtcagtgatagcagcccaggcctcagagaaacagatgttgcttaagaatactagctcatcatgcgtgggtagggcattccgtggttcattcttttgttcatcaattcgttctacacacacatgcatttatagccagaaagcagaaagagatgtgcaagtcagagaggtggggtggaaagggctgtgtgtgtggggaggagggcaaagtgacatgacaagtttgaggctacagaaaatagagaataaaggagctatcatgagctcaaaagcaggatgggggctgatgctttatgtctgctcctggatgtagtactgaatgggtctccgggtggttacagaagagtctttgaagcaacactaacaggaaagcttcaacccagtggtggcactcaggatcaaacagcacattacacctacacctacacacgcctacacacacacacacacacacacaaacacacacacatgaagaataaatgtggagacaggtatttttaaacaaatactccagaacatacatgataacacaaggagctgtcttataaactggaaggctataccttgatttttgtggtgtttctagtgctcatcacatgactataaccccttttcttctctctctttctttctttctttctttctctccctctctctctctctctctctctcttagatggaatctcgctctgtcgtccaggctggagtgcagtggagcgatctgggctcattgcaacctccgcctcccagattcaagtgattctcatgctcagcctcctgagtagctgggattacaggcacctgccaccatgcctggctagagatagggtttcaccatgttggccaggctggtctcaaactcctgtcctcaagtgatctgcctgccttggcctcccatagtgctgggattacagacgtgagccactgtgcccggcctataacctcttttcaaaagagccaacactgacttggatgtaaaaagtgggaagtctgttgaaaagagaagagaaaagaataggaaaaaacagtctcagtttatagtcacaatttagttgtgtgtgtgtattaagactttaaggattatataaaatgatgtaactacataggaggaagtactatgggatgtttgtccacataaattttccttatttttctttgagtgttgagaataaataataacagattgtaataaaacaagcctgactcacatagccacttagtccgagagggaatgtgacccagagcagggagggacagagctcaggaatgtgtcaccatgacacatcgattccaggactcctcaggcttcacctgcacctgagctatggacaaaatatgtttgagtgctacagaggcttatttttcactgctccatagtcagaaggatggcagctggggtgaccatactattcctaagggcatctgatatacataggcttggaaatccacagggctgatgaggtttagggaagttcttctccctcccataccaagtgtgtgcaataccagcaccctccagaattcaaagcgggagaattggaggcaatgatactgatcgtacacttcatgaggaataaactgttgatcataatcagcatgagtgctaaggaacaatggaagctttataaagacaaaccttcctttgcaagttaattacaacacatctcagaattacctagtgttttttaaatcctttaagaattttgaagggtgccatgaaagtgtcaaatgtaattattatgtagctttttgtttcatattgtgtgggacacatatactgtaaaggaaaaatagttcttgaccatgtatgtggtccttcaactaacatacaactgccttaggaagagctttggcagtctcttctgtactaattccaaataccaaatctctaaaactttgaaatttttatcacgcttaggaaaacctaggctggtaatgtaggcattctcctccaatcttcaaccttttctcttatctcctcttacacttggaaaggagatgccaccttcaaccttttctcatatttcctcttatatttggaaggcaggagccatactggtgaaaacagacctagtgtcttttaaagtcaccctatagtataatactgtggttctcaattgtttccccccttcaatctcaaacttttttttttttttttttaagacagggtctctctctgtcgcccaggctggagtgcagtggcatgatcttggctcactgcaaccttcacctcctgggttcaagtgatcctcctgcctcagcctccctggtagctgggactacaggcgagtcccaccgctccccgctaacttttgtctttctagtagagacgggttttgccatgttggccaggctggtcttgaactcctgacctcaggtgatccacctgcctcggcctcccaaagtgctgggattacaggcgtgagccaccgcgcccagcccaatctcaaacttttaatgcatgcaactcactcggatcagtagcagtggctcatggtggcagtaatgcagagctgggtggcagaaggaaaaaatcaatctggttggtgggtgggaattctgccttggattctccccttaatcatcataagctttccaaaccgaataaaaatttacaacctttttggcaatctttacttcattacctacctggaagaatttatgtcctcagtggagtttctttaactccattaatgtcaattagttgttttaggtgctgcaaaatgataatacgttcttggggacatttatcctttacaacatgctttttatgcttgtttgtgtgttttgatttgaaagacttagagatgcaggctagggtgactgggacagatatggggtccctggctactgaatgagacttgggaggcagatgacttgtttttatgccgataaagagtaaaatctcaagttgcggttgattttaaaatgcaagcagggctggagaggcccatggcagacctagtttggggtgagcacccggatctgtgagctagtgttgcttcagcatctcactgtgtgtgtgtgtgcgcgcgcgtgtgtgtgtgtgcgcgcgcgcgcgcgtgtgtgtaggctggttccaccctttgctgtcccatcggcactacccttaacctccgtctctgcgtaactatattaatagaaggcaacacttcacatactggcgctcagaccccaaagagaggctggcagtggcttggcaggtgggcatgcagcagggagatgggtggaggagtgggcggaggcatcgtcgagtggcgttaggcaaaaccaatggcagttcgggataggggcggccggggcggaggcgccgaggccgatcggccaatagagggcgagcaactactggagcgacctggtgacgtgaggagcgttccatttggccagtggtgggcggttgccacagctggtttagggccccgaccactggggccccttgtcaggaggagacagcctcccggcccggggaggacaagtcgctgccacctttggctgccgacgtgattccctgggacggtccgtttcctgccgtcagctgccggccgagttgggtctccgtggttcaggtaacgaggggtgggggcgggggtctcctgggctcggctgcagggtgggctgcctccccttccgcggcgcctggaggcggggacgtcggcaccgcccttctcaactcggcagccgccgagcccctggcccggggtgactacacgtggcggggcgtgtgtgagtgtgtacgagcgtgtggctgcgtgtgcgtgtggatgtggcgcgcgtcccaacctgcctggggcggtggtccgcggcgtggcggagtcagggcgggcctcgagaggccgcgcccgcggctcggccccggactccggcctccggcctccggccccccgctggggagccggtcgctgcttcccgacggattttgatctttgttcttccaggccggctcccccttcctggtctcccttctcccgctgggccggtttatcgggaggagattgtcttccaggttagttttacacaaaggacgggttctctgcacctctgggcccccctccccttccccgaaccttctaccttctcgtttccctgctccgctcctaggctgtttttggacctttgccctctccagcccgcgagttggctgtttctccctccgtccgtcgggctgcaggcttccgcctcagtcctgccagcgtggggcatgtggtgtcggtaaatagaggccacaacaccacacctgagcggaggagaagggtagcagaggctgagaaactctgggcctgggaattcaggatgctgagtagagatggtacttaggacatgtcccagaaagcgcccttgtgacttttcttagctgctgccattccccaccccccaaccagccatcagcagtcaccaaccattccagaatctctcctgcttaagtcagcctttcacctacaggtctctgatgtggtttcattaagattctcacaaatgttaggctagaccagccagattgtttcatttcccggactcaggaagttgcagagggtttgatgaggggaaatctgttttgtgtaaatacaatgcacgtatgtgcacagagcgtccagaacctcctggccctgccagagggtgacttgttccctgctgtgattcatattcgagtggctaattgaagaaagaaggtgaagtggaggaagggagggaggttttataaggacagaaactctactattatttttagagtccttttaatgatgttgaaagaacactgtggcatagtggaacatgcccttgactggaagttagcagtatcagcattgctgctgtgtggtcctggataagttatttcctctctctggtcctcagtttactcatttacaaaacaaagtattaataattggcacgatcacctataaaatcctctctagttccaaggttctgtgatgatcagatcatcagc

SEQ ID NO: 12564 - DNA, 6000 bp, Homo sapiens
actcagtgttctgtgggggaaactaaatgactattgagagtgatgcatataacacacccagcctgtttataatattaaagcctgaattgccggacagtgttttcattaagtactgctattcattccgtttggagagacacgtaagaacagaaaccagtcaactcagtagtttgcatgccttccatctttgtgacagaattgcctattattgagagtatgaacgttttcacaaaatgagagacagctagaaagccagggttgaagagaatgctcaggatgaggggaaggcataatctatgctttctggaaagaatgtcatgctttctttaatatgaagtttccactatttctgttctaatttgaacagggtaccctgctgtcacccttgtaatatgggcccagaacaactgcagctgctgctggcctggtgggatccagtgatgcaaatgccacagaatgcaggtagaaccaggtctaagtcattccccccgggctaaggccctgagtctttggcagtccttcagcctttgaggaagacagtaaaggtaaacatgtgacaaggaatgtcagatcagggaagtgcctcttgaatcacaaagtcaaccttgccatctcacagataaggaagttgagcccaaaagtgagcaagtggcttcctcagggtcatatatatatatatatagtctcattagtgtcagagtcaagacatgagcccaggtctctggactcccaggccagtgctcttgtaactacctcccactgttgtctcagattacaggaaccaaatgcatgtctggccttgtgctgcttcgcatgcaagccaggctgacctttatgctcccagaatcatcagccttttcattggaaaccatggaaggacggttctgggaaaataatgaaaatcataccacaccatagagacaaccagaagccctgctcagatgacagagttctcctcgccttccaggtactgaatcccaaatatatgcatacacagcaactccagttggtgttagaattaaggagatggaaaaccgaacacttgacagttcggccagttctcttcccttttttttttttttgcctcctacccccagtctttccccaaaaggccaaaatctagagcatttgagcctttgtcattcactgcctgagaggaactggctcctgggagcagagaccagccgagattacaagaagcctcttcaacatgcagccaaggcccagccttggcctcgggagaacatggctcttgggacacacgtaggaaaaattccctgcttctcagcaaaaagcctcttcaatcctggagggatcttctgaggtttgtgggactccctgctccccacaaagactgttttcttatacttccaggagccctgatatatgaattcctgtatgagagattcatttctttgttcctcacagcatgagggggtggaggaagggcttctaaatgcaaaaatcctagtgacatattatatctcagaaactgaactttacagccccaccttgtccctcttgctctgcaactaccaacctcactggccctttctctgaaggttggactgtgagtgtgtgtgcaggtgtgtggacaccttccttttcacaactcaaatgagtaaaacctgacttttccccccgtactgtttaccacctcccccttccctccacccaaggcactttcttgtgttccaatgccactaatccctcttacagtagaaactccgtagtttagctgctgagggcttgaatttgtgacccacctgtttcagaaatattttcctagggacccaatgaatgccattacatacaaaggtggtgtaatggcagggaatctttatgcgacaccatgaggagagccacctattgggtaggctaaagaggttgactgcagtgagtggccaagcagaaggcaggggcagctggcaagcagagctccggggccacccccatagcttcccactaccctggctcacaccctaagctgccctcagggggagcaggcctaggactaccagcctgggcaccaggggagctcttggggaagctgagaggtcaaccttgtaagttactgcatctggcttcttcgcacaagttcattgggttttcagagtgttcctggaacctcaggacaggagatgctggagtgctagaaattcaggattcccaaaaaatccactatcccttatgtctgcactggacaaagggtccctcacggtccccagtaggtttgggggcacgtagaagtctagccagggctgggaattctagggggtggtaaagacagggtgcacagccacagaattgcctgagaacggcctgttccttatttggcctgtgacgcagttggcacattgagcttagagcaacaggtaaacacagcctcacatttggagtggcctaaaggtttctacatttcatccccacggtgactcagttggtcaaaacaggggacataattggtcctatcttacagacaagaaaactgaggctcaggaggggcaagtgattatcccagtgctgcccagggacagatttcccaggacttctggactattcttaggcttgccgcttcatggcatagatagaacaggaaacggatggagcagagctcagcaagggagatactgggagagcctgtctccaggagggacatgcccccaccccaggactcagctcgtggtctgcattctcccactcagtggccccagtgccaacagcactgctcagaaacactgctgccaaccggtgccccttctgtagcagtgggactggagggagttgcacactcagtcacggaaacaccagtgtcctgatgtacagcaagcccctttgatcaatcagatggggacagactgactcctgagttcccagggtccttttcctgaaggaacatccattctttccctgttaaaccctgcattcctggtccagcagcagaaaagagcctttcggacactggagcttgaggaagatctgtgcctatttattagagaaggtggtgttagtatcaggaaataggtggatggtgctgggtttcttgggttcaaaccctggggctctgctgtgtgaccttgggcacatccctacccctctctgggcctcagtttcctcatgtgtcacattaccttggattagacggtctcactctgatggagtttttagttatgtatccattcattcaacaaaccttttatgagtcaagccctcctgcaggcacagggtttggtacacaggattcagcaagaagacagtctgtgctctaaaaaaggtcagattctcattctgtaatgctttttggtcctgctgtctttttatcatgctgacttaccttttcagaaaatgcccccgcttccgctggagaatggaaattggcaaagagagacggaaaagctccaatttgcgcctttgctattttaggagaggttgaaattacgagccaaagtggagtgatgcgctaagcggagtgacctccgtactccaagaaaagagaaaacccaggttctctgcttgtgaagtggctcgagctcttaggcgtgaggcattattatataaattcaagctcgctcgtgatccttagtaccctgagttgcctgaaggggggaatggcactgcctgcgtgtgcagtccgggagttcgagccgccgcggcaaccggagcgaggagcgcccgtccgcaccacctgtccccgccggcattccagagtagaggccgaattggcagcgagccggcccgggtcggtcgccgcctcagttcgcgcgggccctcctaggggtgtgtctcacggattccacacccggccgctcctggacaagccccgaaaggcgtcttcttccctggcgggagccgcgtgcgccccgcttttcgcgctgctgtcccgggggcgccgcaggcggatgcacgttctcaggcgacgctgggactgggctccctctgccgggccctgctcactcggggcctggccgccctgggccactcgctgaaccacgtgctccgtgcgatcttctccaaagaatttcggccccatggccaggtacgttctaggtgaaaaccgggtcgcgcctccaggcaggcgcaaggtgctgttacggggagggaaggcacccgcggggtagagaagggcgtaagtttcagctgccattggtggcccgggctagggtttccggaagggtgcggcgcaatttgccaacgccgcggatccgttgtaaatgttccgcggcaaccggcagggcaggttctccgatagcaagttgggtgccgccggctatatccccagggtaatatgagccccgggttccgagcttccttggaggccgcataccggatgaccaagcgggcgcgggcgccggcaaaaggagggtttcggggcatgcggggagaaacccggacagaggtgtgcgctccaaagaggataggggcagaagagcccggagagtccggcggacgaagcgggatggggatgggagcgggagccaccgagagtggagcgagacacgcgggggcccggactgggggcgtgagttgaggagtggggcgactgggcccggaggggtcccactggggctaaaccccgtggaggggctccggggagctccggagagctctggcggggggagggggcgaacggcccgcgggaaggagtcggggtgggggtgtgtgtgtgccgcagaagccacagcgctgagcctgccgggaaggaaggaagcggggaagggagccgccgccgcagccgccgccgccgtggagtactcggtgcggaggggagggggagaggggcgcagcagcggctccaggggaagggggcggtgcgggggcacgacgagcgcgggctgagctgcgggattgacgtaacgagcttgggtttcccccagcgtcgggaacatggatgagaaatccaacaagctgctgctagctttggtgatgctcttcctatttgccgtgatcgtcctccaatacgtgtgccccggcacagaatgccagctcctccgcctgcaggcgttcagctccccggtgccggacccgtaccgctcggaggatgagagctccgccaggttcgtgccccgctacaatttcacccgcggcgacctcctgcgcaaggtagacttcgacatcaagggcgatgacctgatcgtgttcctgcacatccagaagaccgggggcaccactttcggccgccacttggtgcgtaacatccagctggagcagccgtgcgagtgccgcgtgggtcagaagaaatgcacttgccaccggccgggtaagcgggaaacctggctcttctccaggttctccacgggctggagctgcgggttgcacgccgactggaccgagctcaccagctgtgtgccctccgtggtggacggcaagcgcgacgccaggctgagaccgtccaggtgagtgcgcgccggtagtcgagcgggacccgggcctaggcgggcggagggctgggaggcgcggctggcccaagccggggacctagcgcgcaccctgacgcccgggcgtttgcaccccggctgggcaggtgctgggcgcccagtagcgcacgttcgccgcgctgtggcggccacagaaaggctttccgctccggccccggactgaccgtctgtctgtccgcagggtggcctgcgtgatggttggcagagcgtgcgggggaggcggccgagcggccggaacggggccgctgggacggggcatcgtactcagtctccgcactggagagccctaaagagccgcgctctccgtgcagcgtctctggatccctgctttcttctactctgcacccgggttccgaagtctcctttcagcgctctcttcctcctttcggcgcccgcacttcttccctccccccgctttcccccctatttcgtctatttgccttgttctccctctttctctcttgtgtcctagatgttgtctgctcctgtttgctcgctgtttccttctttccattcccctctctcgcttttattctttttctctcttaccctttctgtttttctc

SEQ ID NO: 12565 - DNA, 6000 bp, Homo sapiens
gtgtgtgtgtatatatatattagttctgtccctctagagaacactgactaatacacatggcttcatttggtgatagtgaaagtgattatccctaataaggaacatttgagacatcatcacagattcagaatcaactcaggtatgagagttgaaagagcagaatggatagaacaaggctactattggcaaagggtaaaatcagttgattcaagagaccttgtcatgcataattgatgtgaactgtttttaatgtcatttatttgtttattcctgtgctgagtattcatactttaatacttgaaaacatttatgtctcaagtattcatctttggaaaatttattctgctttcaaatctatccctttctctttttttgagacagggtcactctgtcgctcaggctagagtgcagtggcttgatgatggctcactgcagccttgacctcctaagcttgagcgatcctcccacctcagcctccctagtacctgggactacaggtgcaccccacgatgcctggctatttttttaaatttattttttaaagagatggcttttcaccttgctgcccagactgtttgtcttggcatcccaatgtgctgagaatacaggcgttaagtcaccctgcccagctttcaagtctattctgctttcaaagttaaaaattccctaatccccctgtgaaaacgaaaatgtggtgtactggaaaaacctcaaagatctggggtcaaatcttgaccatcacttactcaccatgtgacctcgggcaaactgtttaccttccctgaattttattttattttattttattttattttattttgagagagtctcagtctgttggctgggctgcagcgcagtggcatggccacagctgatggcagccttgacctcctgggctcaagtgatcctcccgcctcagccttccaagcagctggggctacaagcatgtgccaccatgcaccactgatttttgtatttgttgtagagacgatttttcccatgttgcccaggctggttttgaaatcctgggctcaagtgatctccccacctcagcctcccaaagtgctgggattacaggaatgggccaccatgcctggtcacttaacctcatttttaaaataagtatgataatcccttccttgttcatagaactaagtgaaataatatttgtaggcagcacagcaaagaagaggcactcaacagacagtagctactattgaatgggttaattatgatctgaaaacttcctttcatgttctaaattccagaaaatttgtaaaaatgggctattagtatgtttttcaaattatatagatagaaaaaagggttccattgttaagtaagtctgtgaaatgccacatgccatatcccttttcccttggtaaataaaagttcatttaaacataattaattgtgttgaaaaatcccaaagtaaaaataaaatgtttagctttacggaaccaagggtcttttaaacttatttgatcatggaaacatttcttcccagaagatatattaacatcctaagaactttcttgtattccacttagagaaatagcaagtgtgtgaccggacgcggtggcacacgcctgtaatcccagaactttaggaggccgagatgggcggatcacctgaggtcagaagattgagaacagcctggacaacatggtgaaactccatctctactaaaaatacaaaaattaaccgggcatggtggcacatgcctgtaatcccagccactcaggtggctgagggaggagaattgcttgaacccaggaggcagaggttgcagtgagccgagatcacactaacgcactccagcctgggtgacagagtgagactctgtctcaaaaataaataaataaaaatgaaagagaaatagcaagtttgtaactgttaaaatgccagaatataaataaatcttcaatattaaaatacactgaatcatctgtgatacctggatacgaaaattaaggctgatttgattttgagcagcagcctaagacaaggcaagataaatgaggaatacagtgaaagtgaaagaccgctgactagggccaagacttggcattataatcactttcggttggtagtgttttaatgacttaattccaaactgccttcggaacgaagggtatacaggatcttgttgaaattcttagtgcagttgtttttttccctgatggagggagacacagtatatcagtgtagacctacgattctggttgtactcctaaaaagtcaagatgaaataaggtaaaacatttggaggaagaccgtgagagtattgcaaaactcacaatatttgcatgcttacattttaggaagaacatcaattttgtttttctttcaatggccataaatagtgctggagttttcttaacacttttatttatgtatatattcacttcctttgttaagctagcaattctgtgtcatttcctactgttctattgggatgtcacctgtagttctaggggacggaaaagggactgtgggactaaaggattgggttaattactttgaaagcaaaataagcataaaacatggaagttgttacttctgttttattttatgagtgtccactttatctttttaagtagcaaaacattttattttaaagcattcatttaaaaaagttgaatattaatcacagataagttcttaggaatattatgaattgtaatttatcgatgatctagctacagtggctttcagatttgtctccatatccatatgaaaaataacatttcacagttattgcagttaaatatagccaagtctcagaacagtttctaaagttgaataaagataggcatttaaatcatctgatatttactgtccaaatctggccttttcagttatcacattacttagaattttcaggtaaactttttttgctcattctattgactcttgttaacatttgtagtaaaagacaaacatttcacctatctggataaaatatattcagcttcctgaattgttagcatttagaataaatgccaacttgttttgatacccattactactttcaaactgcattacacaataaaatgcaaatgtgagttattaattagcaggatctgttttgtccaagtgtgcaagagtagagggatttttcaacattctgcagctgttacctatgaaggaaacatcattcactttgctaaaaggagctgcacaattacatacgctgttatagacaaatattttagtgtttccttaatgctatttcataatggatttcacattgaataagataaattttaccaatgctgcccaatttctgtctctaggttgtttgtaaaagagaggatgattacagttttcaaggcaatgtggagtgaaggtagagaaagagttcttcatgaacgacacaatatttagcaaggtcataaagaaatatgcccatacacgcatatctatttaagtattcatttacatattgtacgtgcatctctgtatacatgttgtgcccggtgaacatttgtgtgaatataacctgacggaagtcccataaaatgacaaaaaatgaaaaacaatgaaacatgtatatgaatgactactatagatgatacagaaggtagaccattattcacaaataatgtaataaatcctttgcccatcagatgtttctacctagatttggggcctttaaacatcaaccaattatggtaaatgtttaactgtaggagttcaggcagacagccaaattctggtttcaaagctgttgctagttttagcttaaagatttttttttttcatttttaagcaagaacatttctggataccggttgtgctctattgtggctagagccgctgggatttgaataagtaaattgggcaacacactggtcctgaagaaatgggcctggcagtattacctgaatgtggcaaataataggctaccaagagtcctagggaaatacttcccatttataacttagctctacttacctaaagctagtttattcccacagacacgaagagagagagagttgtttttcttagccaagctcctacaaaaaacagcaaggttgggggatgggagcacatccaatgtttatgccttttgtttaggaaagccaggtatctgaaatacatacatgatagccaactcctctctgctcccctcccccaggtttatttattttcttaacaagcttattaacgaaattatcaatttgcatgaaactggtttgaacattggcccttcctcagaatatttcttatctcttgtggaagcactaacaaaaagggtagaagaaggggcctagacaatccacacgttggatttgcagccactggatatttcagattcagctgctaaagcctctttggtatacacaatgaggggcgactgaagtgacttttcttagtccatttcctctccttctccccgtctcccgaaggtactccgtgggtcccttccctttctctcttcacagtccctcctgagcagtcccaaagcttcaaaccttgttctccaaccccctttccctaatgtctcccaactaccacccccttccccagtcaaactcccctcccggtcaccaccaaagcccggagaagtggaatgcacacaatgcctcccttatagggcttgagctgggaactgggcatgctcagtagccaaagtagatttttttttttttttttttttttttcttttggtctcaagtgcggcatctctcccagtcccacgcctctctttcctcaacccctatcccctatcccctatccccacccccagctccaagatcatccggcttaacccattctgcaccaaaggcccacggagttctaaggtgcggataattaacccgtctccttctaacccggctaaatagtctcactttaggctaaagcctcacactttcgccttaaagcccctggccccttacgcgcagacaggtagggggagtgcgaatactactggatcctaggaaattggttcccaagaaggctccttccaggatcgaccgctacggagaagtattccaggagccctccgttctgcggggtgacaattagccaaaggtaccgtacccgtgatacaaaatccaagtatgattgttgcatttgaatgtcattgttgttgactcattcccctccatcctgtaattattcaattccgcgtagactcgacgaccctatcgatctccctcggcccccctcccccaggctctccagtgtttctttggcttttcctggcttcttggttgctctctcaaaggaatgccccgtgtgtgtgtgtgtgtgtgtgtgtgtgtgtgtgtgtgtgtgtgtgtgtgtgttccttcgttattaggggactggaagagaagaaaagggctcgagtgtgtgtgtatgtggtgggggggatggaggcgagtgcgcccttgttagaggactggggtctccacgcctgaggaaaggggtcgctcctccctagggaatgttttaggcaaaaagagggggcggatgccgggaggaaagcgcgctgtctttctgggtgtgtgggtagaagaggaatcaaatgggcatgtctggatgggggacgggggtaggagctcaggaatgtgagggggtcaaagtggtcgagtgtcgggaggaaggactgcttgtgtgcggggtgggggggggtggtggagagcgggggcggggattcagcgcgtgtatgtaaaggtgcagcccgtgtgctaggcgctgggtgcgcgcgcggtgtctgctcgggtgcgcgcgcgcgccgctgcccgcctgcccgccggcccgcctgctcgcctgctggggctgctccgtgggtttgacgggcgagcgggcgcggaggagctctgtccggaatcacatagataccatcgtggaaacagcagcgcaggtcacggcgccgcgggccctgcaccagacgctgggctctagaggtgggtgaattttcagcgggggctgcacaagctgcaccgacacgcgtgctgcctcttccccgctcagctcagtagcgcgtgtgcctgcgtgtgtgtg

SEQ ID NO: 12566 - DNA, 6000 bp, Homo sapiens
cagtcataaaggacttctgggcccccaggtacctgtgggggctccctggagcagccccctttatgtgctgtctacataacacataacaaggctttcctctggcttcccccacctctgggacttgggctgcatcaccatagaaacccgccagccacggcctggggagcggggcggggagggccagcgggagccttaaagggacacagtgcacagggtgtaggtgacacccacaccatcgtatacacaccaacaggcacagaagccccccaggctcccaggcctgcaagcacatgggcccagcaccacactctgaccctttcatgtgccctgtgctgagcccccagccccacccccactctggcccactgagtcaccaggcaccatgtccccaggagacaagggcaggagaagccggatagtctctgctgtgctgttgaagggctctcttgttgcttctcctttgagaggaactccaggcagaacctgagaactgacaggcaggtgtgcagggcacatgtgcagggcaccgctggaggttcccttctcaaggtgtgtggtggtggtggtgatggggtgtgtgtgtgtgttttcagggaggaggcagtcactccaggtctagccaggctccacaacctcccaggtccctccctggcaagctgcttcccatcagaccaaagcaggcactttggagcagaggacagaggactccctgagggacctgcgggtgtagtgggaggccaggtggggtgggatggggcaaggctcttctggggctgaacccctccctgtaggctgctgggcgtgacccttgcctccctggccctttcccaccggggaggatgggtttgggaccggacttactcaggaatggccccatcttcaactgccccagcacagcggccactgtccactcagtgcatggtcacgcaggctcactcttggcctaacacatgtgcgtctcctccagccaggtgaccacttactcccagccagcagcaatattggaaggcttccctgggattttctgggtgcttccccctccccccgttcctacccgcagcaggaatcccccgacccccacctgttccctggcatggcatgggtcagccagcagtgtgccattcatcctgtctcacggccgtcccttgcccagtgccacaagtgggcagggccttgatgctctgttgcgtggggctttgtaggcccctccggccccagctcacagctgctccaccctctgtctgtctctctaccctgctcccaggccagcgtgacgtccacgccgggaagcccctccactgacccaggcccatcttccctcctccccgccccttgcctggcacagcccccagggacaaggacgctgtgcaggcggcctgcgcgcacgcgcacgtgcacacgcccacccccacccctcactcttctcgctctttctgccatttctcagcggcgcactctgcagctgcctctcaccctttgtgctccggtttcctcttctctccctttctctgctgcctgggtctccgtttcggaatttccccaccccctaaccatctccatcgtggttagcgctgtcttcctacgtctgtctttgtctcctgctcccccctgcctcttctcactctgtctgtcacccttggcagacccggccttggctccatctgtggaacactcccccctccccgctcctttgcccttagtggtgctggtggggggtagagggcctgctgagctgacaaccctagctgcttgctctgtaattgcctgaggaatggtgagagatcagagacccagcagcagtgggaggagaggagggagcgccccctcccagctgttatatctcgcaaccttctggctgcttcctgcctgtctccgactgcccagggcggtggcaagctaggtggcaaatactgggagaccaaaaaagaagttggatatgagcctgtggggagatgggatggggctgggatggggcagggagcggggaccaggggtttggggatattgtatttcccctgagcgtacatgccaaacaccattccaggattctagatttggaggacaaatagaggaacttgcgtggcagaaattatcgacctccagagcacccaaaagcctctgacatgcaggagggtccttctttgagcttttccttgctccggtttcctcccctccccctcctaagaccagtgctcagagctcccaaggctgctgtttgatcatctgctctctgatccgagtctcctactgctcctacaggccttgaagttgaggccagtgctgcctggggcctcccctgatccactggctttgtagggagaggccggggtggaacagatccactgttgctcttcccttctgggcccaggtccagctcttgcaggctgggaatcactcttcttaccctccaagtcatctcttggcctccaggccatgcacgctgacccaccctgctgcttctccaccaccctctgcagcaagctcttgcccagagtccccacgggatctgccgcattcacagctcttcttgggtcactctgttacacaaaactgacaaggcccagagccttagcacagcatggctgacttctctaccatcctttcggtgttcctgctgaggctcggtgcccgctttgataaggtcctggctgggcagagggaggatgcacagtatggatttaatgaaggcgtctagtctgggacttcagcctccaagctctgtcacctaacaacaccctttcttgccttgcctgcactttaaccacttcctgtttggaattgaagtggtctggccacttgggagtctgtttcctcttgtcattgtcagaggagccccctctttcagacccttagtctttggctccccttacttgtaggtgaatatggacatggccggtgtggcttgggtttggggtggacacatgcagcagttgagctctgaagactcagacaaagacctagaaattgggactttgagacacacaagaagtgttagaaacactgtcacggaaaatgtcccagagcttgtcctgacccctgtcctgaccctaacctggagcatctggaagggaggaggcctcagtggcctctcttgacccccagggggctgaggagcagcagggggttgttttcctccttcctctcttctcccacaccagttctcaagggaaggcttccttccccattctttctctcttttttttgagatggagtttcgctcttgttgcccaggctggagtgcaatggtgcgatcttggctcactgcaacttccgcctcctgggttcaagagattctcctgcctcagcctcccaagtagctgggattacaggaatgcaccaccacgccaggctaactttttttttttttttgagacagagtcttgctctgtcacccaggctggagtacaatggcgcaatctccgctcaccgcaacctctgcctcctgggttcaagtgattctcctgcctcagcctcctgagtagctgggattacaggcatgagccaccacgcctggcttttttttttttttttttttttttttttgtatttttagtagagacaggatttcaccatgttggccaggctggtctcaaactgctgacctcatgatccgcctgcctcagcctcccaaagtgctgggattacaggcgtgagccaccacgcccagccctaattttgtatttttactagagacagggtttcaccatgttggcctggctggttttgaactcctgacttcaggtgatccacccacctcggcctcccaaagtgctgggattacaggcatgagccactgtgcctggccttttatttttatttttatttatttttttagacagagtctcactccatcacccaggctggggggcagtggcacgatcttggctcactgcaacctccgcctctcaggctcaagtgattctcatgcctcagcctcccaagtagctggcattacaggcgcccaccaccaaggctaattttttttctttttgtatttttagtagagacggggttccgccatgttggccaggctggtctcaaactcccaacctcaagagatccacccacctcagcctcccaaactactgggattacaggcgtgagccaccacgcctggccctttccccattctttcttcattttcctgaaactattttgtgaaatgctgccatcttgggcccctttcctcccttctctatcccacttcccaatccccccattagctttttaggtctgtacagcacccaggcatcagttggctctgaaagctatagcaatgtgactgcaagaagaattcttctctacatgtgtgtgcacacagagataatagatacagggattcatccccacagatacataaagacatacaagaagacacacgtagctagcagacttgtgtgttgattccctcaggcacacacactaacacacccactcatgagtgcaacccctcccagagaagacacaccacagaaataccagctcacatacagctcactccctgcttgcagatccacaaccacacacatgcccacggacacctgcacatgcagacacatacggggatgtgcatgccatgcacaggggagctgatggggcaacaagttggtgctgggaaggcagctggcaggaaaggtgcagacagagagtagagagggaataaaaggcaacctagaggcccagccagggctatctcttccagatttctccctccaaggtggggaggggtgcggatggggaggggagggctggagaagccggccagctgggggcggggctgagggcggggccaagagcccgggcttacccagatgttagtcactaacgtccttccgttctctcgtctctcttcccccacccttcccttcccttctcccctctcccagtgcccccactcccaactcccgccccaagccgcccaccagcccccttcccctccggccggagcctgaaccgagcccggctggctgtgctgcgcggtgccgccgggaaagatggtcgtggcgctgcggtacgtgtggcctctcctcctctgcagcccctgcctgcttatccagatccccgaggaatgtgagtagctgaagggagcctgggcgcctaccttcgccgctatgttgggcccctctttatcttctacctcctcaccttctccctgttccggaccctgactcctctccctggcctttcctgggcacagggtgggcaggagatagccaggacgttgggtacccccggagagaagggcagggtagaaggtgcggggcgtgtcaggaccatggacagggacaggcgcggccgccggggcgatttcagcaccagggacagcgaacctggagcagggccccgaggtcttgggcctcctccatgctctccttagcccgccccatctctgcccgccccactccgactcctccgcttccatcccccaccacaggggtgtggcagcaggagaatggggtcgtccccagccctcagctggcttgtgcaaaggcctgtgttcaagtcttgtccccatttctctttcccctcctgggcccttggtcaccctgtctctgaactgagacaggaaaaggtggcttgaaaaaccctggtcccagcccagcagccttctggacccttttttgtgtgtagttatttggtgggggtgggggcagggctgctggagcatgtgtctatggttgtaacatttgttgggggcacaagcaggtgagtggatgttggggagtgtggccgtagggttgtgattaagcatggatacactgtgtatgtctgtgtgttcttgtgattgactgagcgtagatattcgtgaatgtgattttgacttccttacatgggtgactgtgtgagtcactctgttacttactggccaggcttgtggaggtcgggaggtatttgaccacgacatttgattgcattgggtcatgtgtatgtgtgagtggggctgaatgtaagtacacacttgcgtgtggggggtgttaccgtgatggtgttttctcctgt

SEQ ID NO: 12567 - DNA, 6000 bp, Homo sapiens
cagtcacaaaaagacaaatactgtaggatttcacttttttttgagacggagtcttattgtcgcccaggctggagtgcagtggtgcgatcttggcttgatcttcacagagcaagactctgtctcaaaaacaatttttttttttggagacagagtctcactctgtcacccaggctggagtgcagtggtatgatctcgggaggtcactgggaggctggtgctgggcagcagctagtgccactttctctgttccatatttcagcgcttccagagccagaactgagcccagtgagagcgcaccctggagcagcctggattcctggggtgtccccggcagccacacacagccatgcactacccaactgcactcctcttcctcatcctggccaatggggcccaggcctttcgcatctgcgccttcaatgcccagcggctgacactggccaaggtggccagggagcaggtgatggacaccttagttcgggtaagttcatcacttcagggaagccgtgcccctaaccaccatgagccaaagcccccatccctgcctgaccaggggtatgttctagagaagaggggagaagaagaggtgtggcacggagatgcagcgcaggcgcttgcctgctgctggcctcagtctcctcctctgtgaaacaggtgacatgtgggtgggatgagtcttttcctggggcatttccagtcccactgctttctgtgggctgcagccagtgagccttaacactctgggccacaacagtgccagtcccctgggcccactgcctcctctcagggcagttggcactgagtcaggctggccttcctgatgtcccacagatactggctcgctgtgacatcatggtgctgcaggaggtggtggactcttccggcagcgccatccccctcctgcttcgagaactcaatcggtgaggaagattctgtgggtctaatcaggggcacacccagaggcttgaggccctgaccccgcctccccttttcttggcagatttgatggctctgggccctacagcaccctgagcagcccccagctggggcgcagcacctacatggagacgtatgtgtacttctatcggtgagcacggagctggcagcgcagcagggtggggggcggtccttggccctaatgtgaggtaggctcattagtccccggggccacaggccccccatcctgggacagcctcacctgctttgcatgctttctcttctcaacaccttttattctgggctcttcccatcctcgacccccgccagagtgtccatagagcaggaggccttccttctataagcacaaatgtggggtccctcctcctctctcctgtgggagctgctggggctcagggtgtggctggccccctctatgaaagtggccagcaagggctgcagctcctgggaagaggctccgtggggaccacttatgggccttgggtagacccgatcttctaagtccctgggaggacaggctggcagggagccctttggagtcaggatccagagggcaagggaggctgcagggaaggagaactgattctctatataaataaaatgatatgacatctggtatgcgctccaaaattactgggtaggcagggtacagtggctcatgcctgtaatcccaacgctttgggaggctgaagcagcaggatcacttgaacccaagagttcaaggctgcagtgagctatgattgtgccagtgcactgcagcctgagcaacagagtgagaccatgtctcaaaaaaaaaaaaaaaaaaaaaaagaatgacatcaaagtgtccaaatgtcaaaatgtactatacccagtccgtggaatattattcagccagaaagaggaatgaagcacagacgtgccacagcatatggacgaacgcagaaaacattgatgagctgatttcattcatatgaaatatccagaataggcaaatgtacaagatagagaacagattaatggttgcaggggctggggggaggggagaatggagagtaactggtaatggatgttatgtttttattaggagtaatggataccaatgttttaaaattgattgtagcaatagttgcacagccttatgaatgtacaaaagaaccgtgttgtatacttgaagcaggtgaattttatggcatatgaattatgcctgatttttgaaagttctagagacaggttgggagggctgtgcccacattgccgctgttagtggagggcccctccctgagcgccgtttggcacttgcaagccaaaatcaaagacgtggggccactgctgcccatccctttgtcctcccaggtcacacaaaacacaggtcctgagttcctacgtgtacaacgatgaggatgacgtctttgcccgggagccatttgtggcccagttctctttgcccagcaatggtaggaagggaagggtgggcttggtatgtgggagcagaaggggagttctggctggctccactgggggcttcctcacccagacgggctagggggagaaggtccaggagtggatggcagccctcggtccctgggccttgcagtccttcccagcctggtgttggtcccgctgcacaccactcctaaggccgtagagaaggagctgaacgccctctacgatgtgtttctggaggtctcccagcactggcagagcaaggtaggcctgggcagtttgtacaggagggacaaggatagggtggcccagcggccagcctgatggctgctgtgtctctaggacgtgatcctgcttggggacttcaatgctgactgcgcttcactgaccaaaaagcgcctggacaagctggagctgcggactgagccaggcttccactgggtgattgccgatggggaggacaccacagtgcgggccagcacccactgcacctatgaccgcgtcgtgctgcacggggagcgctgccggagtctgctgcacactgcggctgcctttgacttccccacgagcttccagctcaccgaggaggaggtgaagggatggggctggcatgaggagggagggcagcagcagggtcacagggaagcccctcggccccgggcactgacactgccccaccacccattcccaggccctcaacatcagtgaccactaccccgtggaggtggagctgaagctgagccaggcgcacagcgtccagcctctcagcctcactgttctgttgctgctatcactcctgtcccctcagctgtgccctgctgcctgagcgtccccctacccccccagggcctgctgccttttgggacttaaaccccagcctcccccgtccatccagccctggggctggggggcttcaactatagttgccctgtgactgtagtccacccctgcctgccttgtttgatttggctcttgttctttggttgggcttgtgcctagattaggagaggaagccaggggccctgcactcatgccacctgccaggtagtgtagtatcaggagtggagacaaagtgggctctgggttggggtaggggaagggagggttcagaaagaggaatgaagatgttgtatgacaagaaggaaagttactgagaacaaaaacccagattggtgagataggacacttgtgcagcagatatgccaatgggccatgtttattgtggattggtaagaatcaccaggaaaccattaagccccaatagctacaaggagggtggttaatctgctatatcaaactccttccctgaaaccagcaaacaccgggaaacattttggctcattataatccggtgaacaatgcagtcaggcctgttataaccgctgagcagccacactcgcacctcctgggtgctgtagtctgtgttggtacaggcttctgcatgcctggtaaagtccagccaaggctggtcaaggcaacatctccacacagaaaatctgcaccagttatgtaagctaaaaagctgtgtgaacccaggtgtcccggaaaggggctgcaggacacagcaaaatgccagcagcgtgccggacccctcccttccatcctcctctccaaagaacagaggtcaggaaaaacactggctgggacgctagaagggtcatgtgttaactataatcacatttatggtttggaaccatcaccccaaggtaaaaaaaaaataaaaggtattcccaggtatgtttggcaaaataaaataaaggtaattaaaaacctaagaaatggctgtaaactgagattacaaaaaaccagaggccttttgggagccacaggctgggggctggggccaacataccccagctctgggaccaaaagcctttggagtcctgtccctggatacagatgctcaggccacccacctagcactcctctcatttttgctgctcccccaaaagccagcgctgttctacaatagttcaggtcagacatctaagatccccaggccaaaccatgccacacacgtgtctgttccgaggtcttgttacaaatgaccaaaggttagcctagacctttggtcaggtggtgaaggccctgggaatgcaggttctagaaggggtgggggcatggggcccaggaggttgctagagataggaaatggggcaaatcgcaggtgacctcagcagtacctggatgattcccaccaaggaggaatggccaaaccagatgggtgagaacaagcccaatgtgatgcacacctacccttgctaaataaacgctgctggtcagcctctagcccacaagcccctcttggtccgcatgtgttgtaataagcaacacaactgtaggctgaccccagcctgggattgcaaggctttgctgcagctgtgcttcatgaaaagcacttcagtgtttttcaacctactgcctaggacctggggaggtccaagtcaagctccagagtagacaactgacataaggccaccagtcccagccctttgcagggtttgctgcctcatgagcagggctgagttgtcaacctgtttctgaagtgaaagggcaatgacccaaaggttcccagaggaagttccttccccgtcaagaatgtagatacaaagacataggtggacaggaagtagaatttattggtgagtattaagaggggggcagcacattggaagccctcatgagtgcagggcccgccacttgtccagagggccacgattggggatgtacttgaccccacagccatctgggatgagccgcttttcagccaccatgtcttcaaattcatcagcattgaacttggtgaagccccacttctttgagatgtggatctaaggagcaatggaaagaactgagtcaggaggcctggggcaaaggtgggagaagggggctgcagcactacataccttctggcggccaggaaacttgaacttggccctgcgcagggcctcaatcacatgctccttgttctgcagcttggtgcggatggacatgataacttggccaatgtgaaccctggccacagtgccctggggctttccaaaggcacctcgcatgcctgtttggagcctacattggggtagtgcaaggtcagaaacatgaacatccacctgaaaggcctgtctccaaggtcccttagagcaacccatacaaccaacaggctgcgtacactaccaaggaagctgctgtgtgcagccatcgcacactgggtccccatgaggaaaggaactcagtcggcttaattggctgcggagcatcccaagaaccactgaaaaggcgccactgggctcctctgccagcttcagctacctgctggcaagatggttgtcattcagctaaaagcaagaagagctactcccatcaccagtgtttcccctaacctgtggggaagagcttgctaagacttactcatgctttgtttgtatctgcaggaaggggtcctgagtgaccactgaaagtcacttgccagcctggcttttctagtagccatagtggctgagtcactggggccacctctatgctctgataaaataatgcaagcctaataatgtagagactccaactgccttaaaaggcccagaccaagctcacctgtcagccccagcacaggacaacatc

SEQ ID NO: 12568 - DNA, 6000 bp, Homo sapiens
caccaggagaatcagcacaagctacaaatcaagcctccctccccatgccccacccttggagagctgggttatttaacgatgactgacatgccactgtgcatatgcctactggaggagacaggcctactgaattgccttggcaacatctgagtctcctggcactcacagagaaaaaggagacagtggcagctccacagttcttattgtcagagaggaaaagcaccatatggtttttttaagggatggcaacacttctcttaggccttagagctacacgggctcttttctcaggcttcccagcacagacaatgtccttgacaacaactccactccactgcaaaagcagagggatttcaaagctgttgtttgtcacgtcagtcaaggctgtcactttggatcgatgtcagggcaatggggtctgagtttgcagcttttggatgtctgctgagatctgtgaacacagcccagaatgcctagaaaaggctggattgcatattcttatatcccatgtcacttacttattccccaaatcttttaggatgctggccatgtgcatagcccccagctaggtatggaagcaactcattcattcattcattcattcattggagatggtgtattcaggtgtaaaggagttcaggatacaaagatagatgaaatagggtcttcacctccaggttttataagatcccccatttatagaataatttaccagatactcagggctggaatttggaggaggtgagggaggcacttaccttgggtgcaaaacgtaagagggcaccacaaaaatcagtaatcaagataatatactggccaggcacggtgactcacgcctgtaatcccaccactttgggaggctgaggtgggtggatcacctgaggtcgggagtttgagaccagcctggccaacatggcaaaaccccgtctctactaaaaatacaaaaattagccaggtgtggtggtaggcacctgtaatcccagctactcaggaggctgaggcaggagaattgtttgaacctgggagatggaggttgcagtgaggcaagatcatgccactgcactccagcctgggcgacgagagcaaaaccccatctcaaaaaaaaaaaaaaaaatatatatatatgtatatacacacacacatatatatgtatatatatacacacacacatatatatgtacatatatatgtacatatataatttataaaatcaaaattagtgcagaaaattacaatgtacaagatatgaacattttaaataaggacaggctgttgtggtttgtttcactccccttcagtgttgggcaagggagcatagtcaattccaatcagcgaggggttacttggccaggaggtatctgaaggggaggtttatgtgggtgcaaataaattgggccacggggagcattatacatagtttctgtgcgtgtgtgtttcggttgtagggtctttactgacttttttcacttggttcaaaatacaagagggtatcttgatcactgtatttaggggtacacaacttttcttgtgtctcaaattctaataataaggcactgcttgtgctctttccagatctctcacttacgtctcactcagctacaagtggtggatactattactcttcctccttctccttgttttacagaagggaaaagtggggcttgcagaagcttggcaaaatagcacaggcagtaatactgcaatacagccatgtaatacttcaagatggtgtatgattaaagcggttggctgagaacatttgggaaaattttagttctggtgtaacaaactgtatcccagagacagtgctatatgctgggctttcaaagagcaggtaaatgcagctcccctctgtccttccaggagctcaggagctcaggagctcaggggttaatgcgagtaaataatttgggtctaagctggtgagtgctgtccagagggtcccaggaagctgtggctccaagaagggtggaggggatggtcagaggcgcctggggaagaagctggggtcctggccagagaagacctagcctgaccccagggtgctccagcctccatcagaacaggaggctgatgtcagggctgtctctgagcctgtctgcaaaatgggtgcacagcagatctgccctactcctgttaaccagctgctgcgagaatcagatgacatgctgcagaggaaggcactctctacagggtgcatgtgctgaggcgggcggatcagttgagatcaggagttcgagaccatcctgggcaacatagtgaaaccccatctctactaaaaatacaaaaattagccaggtgtggtggtgggcgcctgtaatcccacctactcaggagactgaggcacaagaaacgcttgaacccgggaggcggaggttgtagtgagttgagattgcaccactgtagcctgggcgacaaagcaagactgtctaaaaaaaaaaatatatatatatatatatatataaaatatatatgtataatatataatatatatacaaacacacacacatatatatgggggcttggacacaaagaggcaatagggtcctcacctctaggttttgtaaaacccaccatttatagaataattgaatagtgagttttaacaatttagtggtgggaaaatgtctgttttaaaaatatacagtgcatccaaatctatgaaaatttcccatccacctctgtgccaagccacacagttttcctccctagagataacacccttagcagttcccgatgtctcttttcagaggtggtttgtggtgcacacacaggtgggcaatgacacgtcccacatgctgggagtactacctttaagggatttataatgaagagagcttccagcacatcatacaatggggaactcttgaaaatggctgggaaatggaacatcttgggcatcaaattatactccatcagtaattcaaaccagggtttctcgacttcagcactattgtactgatattttgggccgaaatgttcattgtcccgggaggtaggagtggagagggagctgtcctgtgcactgtaggatgttcagcagcagccctggcctctacccactcaatgccaggagcacacggctcctcccacttcagttgtggctgccaaaaatgtcccctgggggaaagggagcaacatcaccccattaagaaccgctgttctaaaccttgtatgacatctgtagaaaactggcagataagagaaaaaatgtagaagattcaaagggataggaaagagaaatctgtgaagacaatggaaagagcctgtagtcccagttacttgggaggctgaggcaggaggattgcttgagcccaggaatttgaggttgcagtgagccatgatcgtgccactgcactccagcctgggagacagggtgagaccctgtctcgaatgaacaaaaaactcaaaggttattattccgtaactattgaaagaatcttttcatgaaggatggtaataaccagctttctatctccacacagagcaaagtaaaaagaagtaggtttaaatggaagagaaattaaaactggacatacagatggttaaatattaacaacggcccctgaatggcactttctttcctaaagatcttcatgagcagaataatctaggatggctagggattgttccctcgggactttgtggttaagaattcaggatcttcaagtaatgaaatctgcattaaaaaattagccaaaactgtttgtttattccataatcatgtctatatggtgcttttaagaaaacaatttttttgttgctataaaagcaatacatattcactgtggaaaaattagacgatatctctaagcttaaaagaagaaaaatttaaaacacccttaatcccactaaccagtgagataccatgtttgatactttagtgaattcatttcctaatagttttctgtgttcgcaaaggtatatgtgtagatataaatatattacacctacatagaaacgacggatcactcagcacataatgctttgaagcttccattttttttcccatttaatccgctgcacatgtctttttccatccgtgtgtaccaccgtattagttttaattcttccactgcacagatggcttataatttaaaacatcccctgtttttggagatttaacttgtttccagtgctttgagatcataagtaatattgcagcaaactttccctagtcaggggtttgcacaccgttcttccccccacccccactccccacaccccaggacaaattcttggacatcaagttgctggagcacatgataccaacagctgtagggcccggagtaattggcgaaactgtgtatctgtaaggcatttggtaggaaaaatgctaaacagaccaccagaaagattgctcaacttacattcccatgggtggtattggtttttgctttttttggttttgttttttaatcttggctaaaatgacaatttgaaaggcgagggtggagggtgttcagacagctctctcattctgttgagaattgcttggcccagttctgggccttgtctgaattgccggtttgctgcaatgttttttacaattgagcaatcacctagaaaaaagagaaggtgaaactaacctactgcaaaaaaactgctccaggatgaagaaggttgcctgtatttcgtcatttcagccaagccggaatacggagcaaggctgtctgcaccgtgctaccatcctcttcaggctgcagggcattttgtatacccaccacctcccattgatgctggaaaatccggtcacagaattccgtgcagcccagcccctgagggtggggcgtcctgtctccgggacgccgggttttctctggacacgaatgctccgggggtaggaggcgaatgacactggcacggcggggctccggagccaagaggtgaccaggctggctgggcagggctgagtggctgggccgagcacgtgatgctcccagccggcctccggggccctccgggctgaaatcgacatttgcctctggcaggaaaatgagcttgtcagtttctgcctccattagaccctcaacccaaaggagcaggagatttcggtagcgttttaactttatctcagaatctgaaagcggaaggtaagctgcttatcactcagaaaaacaaatttgagaggagtgacctagtaaagtacactgcgactttgttgatttttaaaatctggtgttgaaaataattgatcgctgtgagagtcaagggctgtatttatccccaaattagagattaaccttctgaacagaaatttggttaatttggagggaatcacggtataagggccagggttaaatatagaaggacacgaaagctgatggaataaactgcaagtaaacttaactctagcctgcttgtaaaacaatctatttcatgtctccttcagggctgtgagcaaagggaatgttaaaattgtgatttttaactcaagtgaaagtaaatgaatctatttgcaattggaatacaaataaaagcagtctttgcttttgtccttttacatttcaaaaacgcttgtgtattttggcaaaagaaaagtttatatgtgcactgcttaagtttgaaatacgctatttcaaatttacaaaattatcacagttgtaattttctaaagtctttctaggcaaggctgtttcagttgtgaatgagaaatgttgacattgtacatattttctgtgatagtaaaatgactcacttcttcagaatgtgataaagattagaaaatgtgaaataatgagttattgtgaattaagtcatgtctcagagattaaatgccttgccagaagatgtaagaaaacagagacacaaatacaaccatgctcacgtagcagtgctttattttaaatcatcacatatttaagtaagtagtagaaatacgtggtgtcaccattttttcctttggcaaatacaaattaatattggaatgcagctattcagagtaattaaagcattattcatccgtgcaattagtataatgttccataatgaattgctttg

SEQ ID NO: 12569 - DNA, 6000 bp, Homo sapiens
atatattttctaaatgatggttgctggtttatgggaaatatatatgacttttttccattaatattgaatttactcttataaattctgataatttacctgggatttttttatgtacataataaccaccttgaaatattgattgttttctttctaactttccaattcttaaatctttcaatacttttcctttactacattggctggaacttttataacactgttgaatagaaccagtgataatagcctacttatcttattcctaatgatagaaagatagctctgaacatgtcaccattaagtatgatctttgtatataccctttatcaaagtgaagacattttcttccacttttggtttgctagtttgggttttttgtttgttttgtttagttcccatcatgattgatgattgagttttaccaaatgcagtttcttcatctgttgcacacatttattatatttgatgacattttgatttggtttttctcctttactgtgttaatatggtagattacattgattaggtttttaaaataaattgctaaattctgtttactaatagtttaagaattttacatttgtattcttgaattggcctataattttcctttctagtgtttttcttgtgcaatattgacatcaagattatctaagcttcagagtgagtgttacctcttttctattccctataagatatattgattgtttagcacaacctaattccccaaattcaccactcccccaatttgttattgttgttttatatatcagtgtttgtttatctaccatatatttactactattttgatttaccctttcttcctgagtttcagatcttgtatcctgggtcattattgtttcatctaaagtataacctttagatttctcctggtgggatctgttggtagtaaactttcttggtcttgaaaatagctttattttgtccttttttttttttaattaagcaattagctttgaggaatgccttcattttgttaggctgaaggagacaaagtggttagagaagtaggagaaccaggaaactttattattgtagataacaaaaaaaggagaatttcaaggacaggaagataagcagtaaatggaaaaaactcctgtagggtaaagggaacatataacagggattgtccttattgattactctttcttgaaaggaaaatgacatttaaaatgtaactatactactggagagtttgcctatgtgtctagactatgaaccactcagggaccagctcaggctccactcatctttgcatctgcaatacctggctcttttaggctagcatgtggcaggtgatcagagattagtgctcataggtaatgagttattattatttccaagtgaggaagcctttaaaagattgataaataaacagacacacttggatttgcttaaattctactccatcattaacattctcaagatcaacctttttaaagttgtcatcatcagaataagaggaaaagatcttaagaggttatcagatgaatggataaagaaaatgtggtatatatgcaactataaaaaatgatgagttcatatcctttgtagggacatggatgaagctggaaaccatcattctgagcaaactatggcaaggacagaaaaccaaacaccgcatgttctcactcataggtgggaattgaacaatgagaacacttggacacagggtggggaacatcacacaccagggcctggcatggggtgggggaaggggggagggatagcattaggagatatacctaatgtaaatgacgagttaatgggtgcagcataataaaaaagaaaagaaagaaaatgtggtatatatatacagtggaatactattcagccttttaaaaagaaggaaagcctatcatttgtagcaatttgggtgaacttggaggacatggtaagtgaaataagtgaaataaaccaggcccagaaagacaaataccacatgatctcacataaatgttaatgttttagatttttaacattgaactcacgcaagtagtgaatagaatgtcagttaccaggggctggaggggtgagggttgaggcgggagattcaagagatatgagtcaaaggaaacaaaatttcaatcagacaggaggaataagttccagagatacattgtacaacatggagactatagtaaatacaatgtattacatacttgaaaattgctaagagtgtagattttaagtgttctcagtacaaaaataagtatgtgaagtaatgcatgtcagttagcttgattttgctattccacagtatataaacatcatgttgtataccataaatataatttttgtcaattaaattaattttttaaaaagttaccaatttttgtccttattacatatctaaaaatatcaagactgctttggagaatatcagattgtaacttcacattggagaccaaatttggtaaacctatttatttttgaatgtttcttttcagtaatgactttttgcaatgcctgatgaatgttcttgtttttttctttttcttttttttttttttactcatctctttaagttgtttatacctgttcttcatatatcctcattctgaatggttagggaaatgtgcagctctaaagaatctgttactaggtgctgggcgctgtggctcacgcctggaatcccagcactttgggaggccaaggcgggtggatcacaaggtcagaagttcaagaccagcctggccaagatggtgaaaccccatctctactaaaaatacaaaaattagccggtcgtggtggtgggtgcctgtaatcccagcaactcgggaggctgaggcagaggattgcttgaacccgggaggcggaggttgcagtgagccaagatcgtgccactgaactccagcctgggcaacagagtgagactccatctcgaaaaaaaaaaagagtctgttactagaatactgtcatttctaagatgtgaatttgtttttagtcattgtcatttggaaagcttgcatgagaggagtggtctgtttaccaaatctactgtgtgctcttgatagtagtactctatcatatgaatgtttttcattactgaaaatttaccctctaacaagaattttggtttgataagatctctaggagattgagtagtgctcacagaaattcctaaaggattttttcttcctgtagccattttgcaaggaataggaggacaaaaatttgctacatttcaatcaaaactagtttaagctgaacttgtagtgactataaagatttggcatatatgtgtagaattttctttgatattagatactagtacttactagctgggccatgatttgcagaagcttttctttacccattatactgctatatattcacaactgacataggacattcacagactattttaaagtttttctacaagtacttactctatacccagatcattggaggaagaaaacagataaaaatgtgtaaggaaaaataaaaggcatgagaaacacaatatacatttaatcaaacttccagaaggaaaaaaagagtgatattagaagaaataatcattgacagttacccagaatttataaaagatatcaaatcctcagattaaagaaccataagaaaatctgagcatcatagggaaaaagaaattaatctcaatgcttattttagtgaaaccaaaaaacaccaaggacagagaaaatctaacaacccaaagagaaatgacacatccacaaagaaacaaaaatcagactgatacttgatttctcatcagtaacagtattgccaggaaacagtgaaataattttctgaaagtgctgagggaaataactgctcacttagaacatttattcaaaagtgaaggtaaaactttttaggcatgcaaagattgaccattgctggaaaaaaaaaaactacttgtctacttcactaataagtaaatagtacaccaaaggaagcagagggatgcaagaagtaatgaaaagcaaagaaatgggtaggcaaattagtaaataaaaaatctaactgtggatagtaagaaaaaacaaataataataagagtagaagaaatggaggtaaagtattacaaggaactttcagaatgaggatagagatactaactgcagattttgttgttttcagtgtgaatacttaaaataagggtaatcattgaaagatagaaataaaatgtttgacttccacaccagtggaggaatgaaaaggggaatggaggaaaagtcctctccaggaagaagcagaaaaggagaaaaaaagcagcttggttaccagaaaacacagaggaagacagcagaaagaattccaactttatcaatagttactataaatataaactgatttctgcatattagatatcagattagatttttaaagatcttaactgcatgcagtctaaaagagactaacctaaaataaattaatgtagaaaggttgaaaatagatggaaaaagatatacaaaacaaatattaaccaaaagtaatgttgtttcagcagtactttaggtaaaatgttacttagggtgaaagacattaatacatataaaaagggatactatttgtgataaaaggaaccgtaaaagggtataacacctaggaactaacaacataaaaaactacctaaccatataaccttaaaatactcaaagcaaaaagcacccagaatcataaggggaactcaagaaatctacaaacatgttgaatgattttaacaaccctctttcagaaatagaactagcaggcaagaaatatttaagatttagaagattttaacactacaatgagcaaatttgattatacatatatatgtatgtgtgtatgtatatgagtatatagactctcctgcccaactagtacagaatatatactttttgaatatatatttgtactttcagagcttttgcaaacattcaccacatactaagtcataaagggggtctcagaaaattccaaagaagctacatcatacagaccatgcccatacattattaagcaactacatcagaagtcacaataataggtacttaaaaacatgtcatatgataggaaactagaataacacacctctaaataatccatggattaccaacttctcagcaatggtgtaaattcttctgctaaataacccgtgggttaaagaggacatcacattggaaattccagagtacttaaagttaagtgtatcttctaaaaacctacagcaaatgtgatgtttaattggggaactttagaataattcctataaagtcaggaaaaagacaatgatttctgctattatttcaataactctacattatataggataacttagttatgaacgtggcaggaaaatatgaggtataaagtttgccaatcttgtcataggcttatgataacaacacaaaatcctctaaactgcctaatctagcaaagaaatgtaaggcttttatgggaagattaagggtaacttcagctttatctatgacattctagtccttttattaaaaaaaaaactgaagcgaataacttaatatttgttaattttgggttacagctacataaatatttgttaacattattttctattctataattttttaacttttcaaaagggaaggaaataaaacagtttattagtgaagttctgggtcctcaatgaactcaagatctactaggggatagacttgtacatggctaatcattcagtaacaaagatttagcatgtacttactgtgtattgggcagagttggagggagcagggtgtgacttttcaaagtccctgacttcatggagcttattagaggagacagcatcagtccgactcctctcatgccatcccctatttgaggagctcctctcaaaatgactgactcttactattatcctattagttttgatgaaattgggtttacattctcccatttgaccaaaatgagccaagggaatgattgtagatagtgtgcttatgcgaagaccttgaggcagagtctgtaatatacaggaatagaccaaggtccattatatct

SEQ ID NO: 12570 - DNA, 6000 bp, Homo sapiens
gctactcgttcccctaatggccattttaggatgaaaataaaccttagtaagtctgtttcagagcattttggataccccttggcatattgccaaacctatctgtaagttttctttgagtataattttaaagtaatatgtatcatcacacagaagccttttcagttctgatctaacttttctgatgccatgattatagctttactctgtctcatcaccaagcctaaattaatagtagctagtggtactttgctacccataaaatttgagctgtgttgtaagcacacagaaaatgagatgccaggaataagcaagaaagggagagcctcagcctggttacttctgatggaaggctgggcctgccatcctggcttgtggttgatttgggagcatataaggtggtgctggtccttcaccaggccagtcatgtagtttatccacggtctcctatctctctcctccccgaaccacagcgttggctgcttgctggtcaattcttctgagaaagaagcaaaacctccatgagaaaggtaacatatgctgatgattgatttagggatttgaggtctctgaggagctcagacacacaattgctttggtgaactccgaacttactcattgcacctcacagcaggagagagatgttttaaaaaaaaaagtcccttgcttttcagttcgaaagtcatgtttgagacatgactttcctgtgggtgcttgcaaaagtacatgtgtggagtgaatgtgtgttgatgagagccaagaaaaaatttatacatatgatagtggcttttgtcttgggcttatctttgtatggtttttatccttagtgagaaacatttttatagcaagaagaatgtgataaaatgccagttagagtgttttatggatctttagccctttgcttgtaggtgagttttttccttcaactacctggcaatttctttgaacacccgccgcacgtccaccaccaaccactactaccaccacatatggtcttagtcacctaagggtatgccgcagcctaaccattttctcccttgtctgtttaatcttttcttctttgtctttagccttgttatttccccagattactggccctttctggtccagagtggcattcttatcatttctgatagttcttcacagaggttcagagggtatagcaaatagatggctaacatgaaacttcttctcctttcttaactctacaattggttgcttattcatttgttaaatggacaggtacagaacattgactgtgtgcaaggtacacagctcccaccctcaagaggttgtgctcctggatatgcacaggaggatgggtagggtacagaaggaccatggtatactgcagagtgactttgaggaggctgagaggagtgagtacagtgtgtaccataagaatttaggatatagagtgataggatggataggtaagaagataggatggatagaattctaggtaagaggatcatcatgaacaaaggttgggaactgcccagagaatagctgttttcctggaaccatatagagtggagttcaagcttctgaacagagctggttcatcaggagtgtttgagtatgacaatagcaatattggagaaggccttcctcttctggttattcttagattcctagcacatgagtgctggaaggggcgtgtctaacccagtttccacgttattgagaggaacatgagtccctctaaggcttaaccttgacttggtcaaggttagaatgttggatgttttctctcccatgcaatatggtgttcatagtattgtgtttgtttgcacccactggcaaacttataaagaccaccaaggtctttataaggagtctttctctgagaagtcattatacaaaaaagaaacacgtttatagcagcacgattcgcaattgcaaaaatatagaaccagtccaaatgcccatcaatcaatgagtggataaagaaaatgtggtgtatacacacacacacacacacacacacacacagacacacacacacacacaccatggaatgctactaagccataaaaaggaatgaagtaatggcatttgcagcaacctggatggaattggagaccattattctaagtgaagtaactcagaaatggaaaaccaaacatcgtatgttctcactcataagtgggagctaatctgtgagaatgcaaaaagcataggaatgatacaatgcactttggggactggggagaaaggatgggagcaggatgagtgataaaagactacacattgggtacagtgtacactgctcaggtgatgagtgcaccaaaatctcagaaatcaccgctaaagaatttattcatctaaccaaacaccacttgttccccaaaaacctattgaaattaaaaagtctttttctgaaaatggagtatttgtgtaatttacattttatgaccattttaacaaactggtataggttttgcacttacatgaggagagggttcatatacaaagcaatgattgcattaggataaattatgttatgaaagaaaaggcattaaaatgatcttggtactgtttgccttaaaatcaggatttgtgttaactttgacatactgcatgtaagatttgtttctggtagtaactgaacttcatgaaatcactggtcacagaaatgtaagttatcagactctcatacttgattagcagtatacattttcattaaagcaatcacattccaataaggaccagcaatagcagttcacggaatgcagctgctcagtttgtatttgaagtgttcgtgtatctttgggagcaataccatgaagtcacaagtttccgaatgaggcatatattcagcctaaacaccgactagcttaactgaatttttgcttttgttcaatacatttacattgtgatgtttacagcttaggctgataatgctacagtggaaagtatgggggaaatttctctttggtcccattttaaatcacctcgcagtatttaccagatgtagaagttgtgtacgtatgtggtatctgataagctctgttttataaaatacaggttctaagacccagagaaatgaaaaaaatatattttttttctcaatggaatagtaagcatttactctgtgcctggcactgtgctaggcattagtaaaagatggcacaggcactgtccttttctacatagtgtccattgcatttttacccctaatgacttgacagttgattcttaaaatttgattttagcaggtaaaaggcattttatgtttccgtgttggggagtatggcagaagaggctgctcaaggaaagtacttttttaaacaaccaccgggtgtcagcagaggacttagaactcttggcaacatctgtgttcttggttttcttggatttaatttgctaggccatctccattggaatttttgaaaggcagtcaacctccacggggccactttctcccaaatattagtgtcaaacactttcaccgcaacactgcatcacgattgtttatctttgcctaataaaactagcactagttcctcaatctttttctgatttaaaacctttaattctgtctttcatggtgaaggttctacaaagtagacaggctgccagggtggggaagtgtcaccaaactctagttgtttttactgacctctccccccatacaggtaaagctcacacttaccttatgcagtgaaaagtacagggaccattcttcgtcctgcacacacacacaaaaatctgataatggagcttgatggttccaaattacagaaagtattttcagagtataaaggagagaggtctaagcatcttcactggcccagccatttggttcatggtatagcatatatttggtggtggtcacagatattaggaactgtgtattgattgacaagggaaaccttggcaaggtgggtatggatttgtatcatgccaattctctccagttttctcaccttgactcctcacttgagtgagcaaactagacagggatccaaggcatttggtatgagacattaggctctagggtggggccaaactggagatggtctttcttggacacccaggtttctttcaagcttcatgcggtatcagaagtggtagcagttacaaggctgtcagtttgagttgctaagctattggtgacctgaaagaccagcttgggagatggttagagacataaagcaaccccagtggctttagcagctaaagctgccagggcgtgtggcctgcagggggtggggtgttaggcatagtatgcaccctggaatctatcccataaagtaaaggcctgattgatgcagggttctagtttagacatgctatagggatttcctttggactgatcagtgggatttggcaaatcgcattacagctaattccaggaactatgcagattcttctgttgttttatattgaataaaatattaagacaacacatcaatagggattcaaaaatatttggaatattttgtttttgtggaaatttctgcaataatagtcaaagggaatcactgtgttcctgaaaacattgtgcaggatgtccataaaatatactgtgtacacacatgccatcaaagagggcagctgtcattcttcatggggttatacccagcttggtgtcaggcagcagctgggggaaggctctcagacctgtcgtatgatgtgctttgtaaactgctttttaaaaaagaagttctttattgttggcttgacttctaattaacacaataattgcatatgggattgtgtaaggggcacgtttattggggaaaataaatgaagtgtctttatgatgattttagttaacactctctgacatttctcgttgctcagggaatcctacagcaagtaccgtcttattcacggaaacttgagtcttcaaatttggccacattgctctgtgctgattctcacctctcttggcaatagcttcacactctcctctccctctttcagatcactggggtgatcctgctggctgttggagtctggggcaaacttactctgggcacctatatctcccttattgccgagaactccacaaatgctccctatgtgctcatcggaactggcaccactattgttgtctttggcctgtttggatgctttgctacatgtcgtggtagcccatggatgctgaaactggtgagtatgtcacaacataatactgctttctcaactatatttttgtaaaaatataaattacatggaggtgaagtggttcgtcttgaggtcacagacaagaccttaacaatttcagtccagactctttcctaatccatcctttaatcccctagaggtaaaaacaaccccaaacacagcctggcacactaaatctagtcccagtccctctgggtagatgatgacaaagcagtggccagtgattgcagtagtccatttgtatcctcatgacaagatgccctgtttcttttcttttttttttttttcttttgagatggagtctcgctctgttgcccaggctggagttcaatggcgcaatctctgctcactgcaagctccaccccctgggttcatgccattctcctgcctcagcctcccaagtagctgggactacaggcgcccgccaccacgcccagctaattttttttgtatttttagtagagacggggtttcaccatgttggccaggatggtcttgatctcctgacctcgtgatccacctgcctcggcctcccaaagtgctgggattacaggcttgagccatcgtgcccggcctcgccctgtttcaattttgaactatatcttagaagtctccttaagcatgtgatatgcagctttggtggcaaggcagcatcctgaacataagcagactttcacctccaagttcctattggagaaatactttccacctccttgagcctggccatgcatggatgcatgtgtgtggtcttctctgaacctgtactccctgtctcagtgctatgagagttgagctaagccagagcctgccacccagaggacttatgcagtgtcaagtgttggctaccaggaccagtgcagggtg

SEQ ID NO: 12571 - DNA, 6000 bp, Homo sapiens
atcattgttggacatttgggttggttccaagtctttgctattgtgaatagtgccgcaataaacatacgtgtgcatgtgtctttatagcagcatgttttatagtcctttgggtatatacccagtaatgggatggctgggtcaaatggtatttctagttctagatccctgaggaattgccacactgacttccacaatggttgaactagtttacagtcccaccaacagtgtaaaagtgttcctatttctccacatcctctccagcacctgttgtttcctgactttttaatgattgccattctaactggtgtgagatggtacctcattgtggttttgatttgcatttctctgatggccggtgatggtgagcattttttcatgtgtcttttggctgcatgatgtcttcttttgagaagtgtctgttcatatcctttgcctactttttgatgggattgtttgtttttttcttgtaaatttgtttgagttcattgtagattctggatattagccctttgtcagatgagtaggttgcaaaaattttctcccattctgtaggttgcctgttcactctgatataaccacataaatttaaatattatgcatatctaaaatgtcataaacagcactaaaatacaaattggagtaaactctcttcagtgaaaatagcaagcaaggggttactatcttttataaagcactttcagaaatcaactgcagaaaggcatgaagtgatcattcacaacagaagagatggaaatggctataatacatttttgaaagatgtatttcaccagtaagcaaataaatgctaatttaaatagcaacgccatgctgatttttcacctttcaagttaagaaaggttaaaagtgaacttgtttattgtcggagtgggtatagtaagaagatagccattcttaggcattactaatgaagtataaatttgtataatcttttggggaagtaatttggtaacttcaatcaaagagcttaaaaatgctcctactttcttacctcataatcctgttttaggattctatctcaaggaaattgtaaaaactacatacaatattttatgcacaaaatgttcgtctccatgttatgtattatattaaaaattggaaagtactaaacgcttaatgttagagggtaatgattaagtagactagagtaggcaattgaacatagagagtgaatatatatatatatatatatatatggcatgaatatataatgtagttttttaaaaattaaaatgtgaatatgtattgagtaattcttacatgtctggtactaccctaaatgttttaatgcatttgctcacttaaccctcgcttcagctgtgctagatatcttcattttgcttctccgggtgctactaccacacttctctactctgttctggcccctgaaggctgacctgtgtcaactaagggaaaaaaatgaagcttttaaagaattacagttaattttatacagaagtcttactggagactatagaccaaggcttatagctcgggagcagttccatcagacggctcgggcacagtatttcagcccattgcttatagacaagcgtgggagttcagtacctgcaaaattgcatcaaacctgcttggaagttacaatgaagcagaatcacatctagatttgggtgtaagagtacatctggcaacagattacggaagcataatcaccaaccccatcagacgttaccttatgtgtagggaaaggcaaggactagggtcatttatcttctaaggaatatagtgactcagacaagaaacatggggggccgtgtgctctaccctgttgtgtcttcaaagcatccttctggtgagctgcatatcttcacagagtcagaggctttgtgaaattatgctggcaagcagaaatgagcaaacatggcttcttggcacttgctattttgtctcacacctgtatggactgcatcaccaagagtctcccttgttttctagcttctggttgggttaggtctatgcagaggaccagcaggagactggagggagggagattacgtatttattctcccagcttcctacctgcgggtttcctgtgggctggctgtctccctgaactaaaggccacaccttgtgtcaggcagccctttcctaacagcattgtcactaaatttctggtgactgctttctccccctacctgttcagagtgataccttcttgctgttaccaacccagggtactgcacgattccttacggcttctctccatcttgcccacatctttgaaaatagttcattgatgatacgctcttgaaattacttaatttgagtttgctgtttcctgctagaaccctgactgattcaacaacttataggattctacgattctacggctgggacaacacgcagagagaagtctagtaatttgcctaaggtcacacaagggaggaaataatacttatggaatgtttcacagtcattcttttatttgtttatttaaaatgaacttttattgttttcatacaacacaaataaaatgaagagagaaaatactcatatttctactcatcgatttccatcctttatttaatgaaacttccacattttcatctccatccaaactcttgctttgagtctcaggctttatgttccgttgcctactctataacattcatctggatgtctcaaaggtacttgaaactcatcatgtccaaaaacatgctcatggtcttccaaattctagctacaaccaagtcctgtcaaccttatatgtaaatgtctctaagatagccacatgtctccagctccactgccaccacctacctcagtctaagacactttcacctcattctttaaagaattcctaactttggtctaccggtacctatctactcttgcccgattatgcacatggcaggcagatagacctctccaagttgcaatctaggtatattgcgacttgcctaaagtcttgcagtggcttttgttgctcttaggatcgaggccaaggatgctaccttggcccagtcggcctcagcagcgttgtctcccccttgcccagagctccacagagtaacttttagttgccttaatgaactatgctttttttctaccacagggcctttgcacacattgtttcttctttctaaaacatttttacactctctgtcccaaagttaatctccagaggggtcaggactcaggacaccctaacactttcttatccatgtggatctttctaatataacatttgtcagagtttgtatttacacatcagatagacagttgtctatgtcctctattaactcatccactagactgtgtgttcgatgatgatggtctctgtcttgtgttgcctgtgtatcccagtaccatgccctgtgcctagcacatactgtgaaatcaagtatttgaacgaaaataaatgaaaacaatgagaataaggagaaaggtggacagaatcacattagaaagagctgatttcttcatatctagtttttcttctctctatgctcaaagtctaccaagataaaaatgatttcaatttagtcataagtctcaagtccttttctaggaagtaaaagttattgaaacaggatgaagaaaagactaaatccatatttctttacagtttattcaacaagatgtttgatacagaatggggcgaggggcaacaggaggaatgtttataggtgggagcagacatcattagcttcctcgagttctcatcactttctctaaatttacgtcacgatttcacctatttttttttttttttttgagacggagtttcgctcttgttgcccaggctggagtgcaatggcgcgatcttggctcatcataacctccacctcctgggttcaaacaattttcctgcctcagcctcccgagtagctgggattacaggcatgaaccaccacacccggctaattttgtatttttagtagagacgcggtttctccatgttggtcaggctggtcgtgaactcccaacctcagttggtccgcccgcctcggcctcccaaagtgccgggattacaggcgtgagccaccgcgcccggccagatttcacctatctttgagagttccagtaatgacaaattcagcttttgatgacaaattcaggataacaaaaagtggaaaattaagaaagggataaaactagcaaacagaaggctggctgcacagtaaaatatgtgcactaaatagcactcttttcagtaggatggggaaacacatgttttcttatttcatttgtttctgcaccttagccatccctttgaccttttaaaatgcagtcccacttaatacatgataggtgagttatttttcttgcctacttgcttcgatttgggttaagcgcctcagcttgaaaaaccccacagagaaccaacaattgcctggtctcccccaagtgacggttctcgccccgccccgtcccgtctcgcctcgccccgcccctccccgctcctccccgcccctccccgctcctccccgcccctccccgctcctccccgcccctccccgcccctccccgcccctccccgcccctccccgccccgccctcaacctagtgagggctggaggctgcgcagacctcgacgggccctacatgacgtcacaaaggggccagaccaagtggggcagcaccctgcgaccctgcgatcctgcctggctcagccgccttcatatatctgcttccttaagtccactcttgcccagatagctttcagttaaaactaaagaatgaaagcactaggttgagagcccacgcggctacacccacgtctactcccccactctcgccaggcaaccgcgccccccgcctgcagtggcatcgtccggccacgcccagtggcagggtttccagcgcgagcctgcaggcaggccgggaaggcggagccaggccggcctagagtcacttctccccgcccctgactgggccgggagcccggggctggtctctaagagtgggtaccgagaacagcctgaccgtggagaagggctgcgggaagcagaacaccgcccccagcgcccagcgtgctccagaaacatgagcacaaacgcctcagcctccttccccggcggcaccggcaccggcaccagtacccgcaccagtaccggcaccggcaccagtacccgcaccagtaccggcaccggcaccagtacccgcaccagtaccggcaccggcaccgagcgcaaggcggagggcccgcccgaagccgggggcacaactgcccaggtcccgaacccggactccagcttggacgacacctcctacagcctgtccgaatggagcgtccgttctgagtggcggtccgtctcggatccgctagccagttcccagtggagcacgtcctcaactgccgaggccgcctcctggagctccagcatacactccccaatcagcactaccggtcttagcgagagtactgactccgactccaagagtggcctccggggtttcagcgcttacaacccgagcagtcggatccccaagtctaccaccagctcgaactcctccgatggggccgtcacagcctccaatcaggacaccggcattccctgggtattagtaacaggacctaccccgcccgtaaactcccccgtagagtcattgcaagggtctgccttctcctcagggttcagcaccccacggggtttggtaaaaggaccgaccctgcccccggattccaacctgacctcagtgtccgactacacttggatatttgtacggggacctcctatacccaatgacctttcgcaagtgtcaatacaagcacctcctacacccagtaacacccccgagtgtcagtacaagggtctgccgcatcctcagtgtccagcttcccctggggtttggtaccaggaccacctctacccaataacatttccccagtgtcgccacaagcacctcctgcaccccataacatccccccagtgtcaaggcaggcgtctacccccacctcagtgcctgacactccgcggggttcaatacaagaacctcctgcacccagtaatcctt

SEQ ID NO: 12572 - DNA, 6000 bp, Homo sapiens
ttaaaagtcccagctactcaggaggccgaggcaggaggatcacttgagcccaggagttgtaggctgcagtgagttatgattgagccactgccctccagcctgggcaacacagtgagaccctaacaatcaatcagtcaatcaacaaaataagaatctggccaggcacggtggctcatgcctgtaatcccagcactttgggaggctgaggcgggtggatcacctaaggtcaggagttcgagaccagcctggccaacgtggcaaaacccgtctctactaaaaatacaaaaattagccaggtgtggtggcgggtgcctgtaatcccagctactcgggaggctgaggcaggagaatccattgaacccaggaggtggaggttgcagtgagtggagatcacaccactgcgctccagcctaggtgacagaacgagactccgtttcaataaataaataaataaatataaaaaataaaataaaataagaatcttatgagtcccagagagagagagagagagagacaaagctcttcctcacagtaaaatcccaggtatatgtgtaaaagaaaaatcattatttggccaccatcagagtagttattgcttcaggcaagaatcaccaatgaatgctaaagtagtgagtaaaagtttgatttaaaaaaaattgcagagttacagtctcaaagtatctcccgaaaagctacttattaattacaaaaggggatcatgcctgtaatcccagcactttgggaggccaatgcaggaggattgcttaagcccaggaatccgagaccagcctgggcaacatagtgagactgtttctacaaaaaatttaaaaattagccgggcatggtgactcacacctgtagtccttgaagattacatgagcccaggagttcaaagatgcagtgaaccatgattgtgtcaatgccctcaagcttgcgtaatagggcaagaccctgtctccaaaaaaaaagaaaaaaaattacaaagggaaaaatagtaaatttatactggtgaaaactagaagaccactttaagcaaaagatcaatgctaatactaacaatttcgagactaactgaaccctcctgcctcctgataacgctgagaacacagcgtcacttctgtggaattcctgccaaaaatgcagaattcaaatctaatcatgaggagacatcagataaacccaaattgaaggacattcttccaaagaactggtctgtgctctcccaaaacatcaagatcatgaaagttaagtgaagatggagacattgttccacattggaggagactaaaaaaacctgataacagaatgtatcttgtgaccctatgattcccttttcctatacaaggacactattgacatgcccaccagggtggctagaaccaaaaagtcagataacaagtatttgtgaggatgtggagcaatggaaacctcatactatgctggtagcaatgtaaaaaaagaaaaaaaagtccttgctcttaggatattcatactgaagtatttagttaaaagggtgtcatatccgcaaccactaacaaataattcagaaaaatcactgtatatcattcagaaaaattatatatatgtaaattacatatgtatatacatggggagaaagaaacggacagagacagagagagagcaaatatgttatcattataaggcttggcatttttgtcagtcccataagtgaaaaatagtatatcattgtttttaatttgtatctctttaattatggagagctcatctaaaacaccccagaaaccacaacctagaatgaccacagacatttattgagtgtccaccctctactaagctccagtgataaaaatatgaagcacaacatctggtagatgtaaaatggtattatatctcactgttgttttaattttacatttccctgagcagtaaagagattgggttatcttttcatatattatacatattgaccattttaggtttcttctgctgtgaattacctatttgtacccaatgtctattgccaagtgtattgtttgtcctcttcggatttgtagatgttcgttatatatcctaaaacctagatcctacttctttgtgacacaggtcaaaagcctagatggaaacaatcaagtccgcaaagcccaggagcacatgtggtaagaatcttccagttttaaatgccaagtcttgcaattgagggaagtatttctggtaggtgctgtgggtcattgttgactcaacttgagtgggtttgacaactgagaaaaaaattaaaatgaaatttaattcataaaatgtatgtcctgtattctgctgttaaggaaaagaattgatatttgtgcatctggtctaagctattattccttatatatacatattcttaccgtattaaatgttttttgtttgtaatacatgaatactaatttatgagctagaactccatttaacttcatgttaaaatagagagaaaatatacatttctcttcaattaccattggtgtttcccagcaaaaacctgccaagcccactcttttgtttaacagaaaaggacaatggagacgggtgagtgaacatgacttgcccagctccatacaggccattgttaatctgattaaaatctgtttcagttggctgcccaggtcagggtggcgtccagtttgacctgggcttccttctcccttccacgtcacagctaagcatgtagtgcagtaagcgcccagtaagtgctcttttggaaaaataggcccttcatcagcctaggtacaaaggggaatgcctagaaactgcagcagtagggtaggtagaaggcgggtgctacataaatctttagtgttggtgcagatagaggtgcggatggggccagtgtaagcgctttcttttttattttatttatttatttatttagagaaggagtttcgctcttgtttatttatttatttattttggagaaggagttttgctcttgtcacccaggctggagtgcaatggcgtgatctcggctcactgcaacctccgtctcctgggctcaagtgattctcctgcctcagcctccggagtagctgggattacaggcgcccagctaaattttttgtatttttagtagagacagggtttcgccatattggccagcctggtctcaaactcatgacctcaggtgatccatccgcctcggccttccaaagtgctgggttacaggtgtgagccaccacgcccagtctttatttatttattttgagacggagtttcgctcttgtagcccacaatgacgcgatcttggctcactgcaacctctgcctcctgattctcctgctttaacctcccgagtagctgggattacaagcgtgcgccaccacgcctggctaatttttgtatttttagtagagacggggtttcgccatgttggccaggctggtctcgaactcctgacctcaagctatcctcctacccttggcctcccgaagtgctgggtttataggcgtgagccaccgagcctggcccttaagagctttataaatgccccccttttaagtgctcggtactagcctccctctagttcacagagaacatttactagtcgctggggtcaccttcgaagcaaagagtctgctggggaattaagcatgcaaatcacttctcaacgacgacacgccaagtgctcacagctcgtccccaggggaagcacaggcgcctaatttgtgttcctaggtgacacagtcattacttataaatgttcctggccggtcccaggaggtgggagggttgggagttacttcggttctctcaaaggttggggaaggagagatctcggtttgttttcccatctgtgaaacggggacaccacggtatttagaggacgtgcgcgggtgactatttgggggtgcagcggcttccctcctccctcccccatctttcccttctcacttccaaggcttggaaatttggagattcggaagtttgttcttggatggccagaaatcctccggaggcagacggtctggggctgaaaccgccacaggccggaaaggtgcgggcgtgaacgtcctgcgcgccgacgtccccccgcgccggtctcccctcaatcctcctgctcccctcctccgcgtccccgtccccgcccccctcctgctctcccattggccgagccggcggccgggccgccccgggatttaaagggcccgctcgccgcgccgctctgggagccgctgctggtcccggccttgcggcctgcgggggaggctgcccggaggaggcagcggcggcggcagcgcgtcctcggtccccaggaccacggcttctttcctgccaggtaggtcgccagtagtgcgcacgcggctccccagctcccatccctgggccggcctccccaggcggatctgtagcgcgagtgctaggaccccctccccatcacctttccgactctccctcaggctatgtctcctaccaccacctccttgcagcccccggacctgggcaggactttgttggcggcctctcgccgggtggggatgagatggggggcgcggaggatacaggacaccccccctccccgtgccgccgcatccatacaaggagagatgcacacggcccccaagtgtcacagaatccccctctctgccctccactcagagcgactctaccttggaaaccagggattccccttcccgtcgcccgccccatttgatatatgggcctgaaatgtatgccatcccatcaccatcggactggactgttcacagcactggagagacagaggtccttcattcactccaggtcacaggctgtgcgtgtgcatgccgaacacccacatgcacacagttggtggctcagtctgatgtacctgacttctcacgccttcccccagtcctccagtaccgtgcctctacatgggctgggcagccccaaactgaaatgtgagtgccagagtgcatcctttaagcgaggtctgccccacggacacccgctccctctgtgtccctgctttgacagatctatccatctggccatccatccgtgggggtctgcaatggccacctttagccgccaggaatttttccagcagctactgcaaggctgtctcctgcctactgcccagcagggccttgaccagatctggctgctccttgccatctgcctcgcctgccgcctcctctggaggctcggtaagtgcctgccataccgtgtgccaccatgccaggccatatcagacctcccacattcatccatatcgagccacaccttaccctgtcacatcctgccaggccctagcatgtccaagctggaccccaacatgttcagccccaccacatcccaccaggccaaaccccattccaccataccacatcctactatgccagccaccccatgccatgccacaccgagccacatcctgccatgccaagccatgcccttcagtattcctgagttctgggattccagaaagctgagattcttggatcttgggattctgaaatgtctacatcccaaggttataagacattggcatgctgatgtcacagggttatggaatcccaaagtaccatgattacagcgtttggagattctgacaatttgaaattctcacattctagacttctaaaatgttggcattgtggatttctataatcagggcatgatgcgatttctggattctaggattctgaaatgtttccacagtcatagcaggcctgtatcttaatgaaagattccaagtccccaagattcctataggaggcggagatttctggaaatctgagatccgaaggttctacactttcttttttctttctttcttttttaattttaaatggatgttctattttttcccaggtttattattttgaaatttttcaaagctactgaaatgttgaaaaaatagtacagtgagcacccacgtatgcatcaccagattctctgtcaacatcttgccacgttagctggctctatctgtctatctatctatctatctgtatatctatccatctatctatctatctatctatccatctatctatctatcat

SEQ ID NO: 12573 - DNA, 6000 bp, Homo sapiens
ggaaataaaagaggatacaaacaaatggaagaacattccatgctcatgggtaggaagaatcaatatcgtgaaaatggccatactgccccaggtaatttacagattcaatgccatccccatcaagctaccaatgactttcttcacagaattggaaaaaactactttcaagttcatatggaaccaaaaaagagcccgcatcgccaagtcaatcctaagccaaaagaacaaagctggaggcatcacactacctgacttcaaactatactacaaggctacagtaaccaaaacagcatggtactggtaccaaaacagagatatagatcaatggaacagaacagagccctcagaaataacgccgcttacctacaactatctgatctttgacaaacctgacaaaaacaagcaatggggaaaggattccctatttaataaatggtgctgggaaaactggctagccatatgtagaaagctgaaactggatcccttccttatgccttatacaaaaattaattcaagatggattaaagatttaaacattagacctaaaaccataaaaaccctagaagaaaacctaggcattaccattcaggacataggcatgggcaaggacttcatgtccaaaacaccaaaagcaatggcaacaaaagccaaaattgacaaatgggatctaattaaactaaagagcttccgcacagcaaaagaaactaccatcagagtgaacaggcaacctacaacatgggagaaaattttcgcaacctactcatctgacaaagggctaatagccagaatctacaatgaactcaaacaaatttacaagaaaaaaacaaacaaccccatcaaaaagtgggcgaaggacatgaacagacacttctcaaaagaagacatttatgcagccaaaaaacacatgaagaaatgctcatcatcactggccatcagagaaatgcaaatcaaaaccactatgagatatcatctcacaccagttagaatggcaatcatgaaaaagtcaggaaacaacaggtgctggagaggatgtggagaaataggaacacttttacactgttggtgggactgtaaactagttcaaccattgtggaagtcagtgtggcgattcctcagggatctagaactagaaataccatttgacccagccatcccattactgggtatatacccaaaggactataaatcatgctgctataaagatacatgcacacgtatgttcattgcggcattattcacaatagcaaagacttggaaccaagccaaatgtccaacaatgatagactggattaagaaaatgtggcacatatacaccatggaatactatgcagccataaaaaatgatgagttcatgtcctttgtagggacatggatgaaattggaaaccatcattctcagtaaactatcgcaacaacaaaaaaccaaacaccgcatattctcactcataggtgggaattgaacaatgagatcacatggacacaggaaggggaatatcacactctggggactgtggtggggaggggggagggggaagggatagcattgggagatatacctaatgctagatgatgagttagtgggtgcagcgcaccagcatggcacatgtatacacatgtaactaacctgcacattgtgcacatgtaccctaaaacttaaagtataattaaaaaaaaaaaaaaagaaagaaagagaaattccagagcaaaaaaaaaaaaaagacagtcacagttgggccacaaatggcttttgctttttcagcaatgtagctcatggccacttaatacagtcagttgccacttcattttcaatcctcctccttaatgctagattagttcatcaagtgagtgagataatataacaatgatgaactgaaagcatacaggtcccatgcagtgcctcacatttcataaggttttgttgtattaacatttcagggtgtatcgaaccttaagaattgatgcaagtaatactatttcaaagctctacacatagggtccagttattacagcacactgtgactgggttaatgtttaacagtggctgtcctttgggttcccttagggaatcctcccaatttagggagttgggagatagcaattttatttttctttaccggactgaccttattgcacaattaattaagacctgctttaaaatagccttcacaaccctttaaaaccatggaaacatcatagtgaatttattgtcaggctaaaatagctactttcatccaggttggattaatgagtaccagagttgttgttgctttctgcgtagagcattactactcagaaacaactcattttcttgactatactctgggttttcaaagtgatgaggtgctgttaaagaactgaccttgtatagtaagttcatatgaagtttagtttttcacgttttcctttaattatgatttgtacataagcataaaacatgtgtacagtttaaagaataattattaagtgaacactcaggtaaaccacctcccagatcaagaaaaatgaccagcattccagaagccctgcccttgccatgtgcccctcccacatggcagccctctactctgggtagcttctgtctttacttttgccatttccttgcttctctttgaaatgtaatcacttacatttgtattctaaaatgatataacttgcttgcctgtttttgaacttagaggcatagaatcgtaatgaatgttttgtgcatttttgtgtctggtatctttcactcagcattaggtttgtgagactacccacgttgctgctatctagtgtattttttaaaaaaccttttttatatttgcctttctcccttttatacttaggacccctgtaactctaaattcttttggatatttctactttgccttcttggactttctgctaaatgaagactaagacttgtctggacccaggtttcctgagctgacccgactgcccgcagtttgatggcatttgtttagatgagactacatctttaaggcttctgtgcccggttaaaaatcttcctttctcccaggctggtccaaaggtctggtcacgtgactccaacagtgacatcacattctgaccgccagggaacactggtagttctttaggtggcgtttgttgctgtgaaaggcagagaatgcagcaagtgcccttctaaagcacttcagactggggcttcttttgtaaaagctccccaacctgaatgaccaaatgcgggctgccaaggttatttcttccttgaggcagaaaaaaagaaaactgtgattgaaggtaagcagacttgagcctgaccaaggactgaagcatgccccccgggagcaggggatctggagaattgcaagcagtctgttgtaggattctaatcactgcctgctctttgagaggggcctgacaattgcgtttctaaggaaaccagactacaaaggaggatgatgcggtgctcatgttacctagtgatgtaataggattctttctttcctgctagaagctgttgcagatcttcattttgccttaatatccttaaaggtgggggcctcatttgatatatagtgtatcattagatagctatcagatgatttttaaaatcagtttcacaaaatcctatttttccccttctgaaaggagaactcttaaaccagagcaaattcaactggagcattaacctgccttaaaaagtaaatatctggttgtttggtgtcatgtgttcatgtcagcattggacttgagaattgaaacagcttgccctcccccacctccacacacacatactttatcctctttctgccctcatttcctagctggctttttccctctaagctctcaagaaacacatcagctttcatctttatcagtatgacactgacatgataggaaatgctgggctggtgattcagcagccatccattttacagtcaggtacgaatgaagatatggaaaggactttggttggggtttaagattaacttgttcaccttttccactccacccccaccccgcccccaccctacagatgatttggactctgcagagctttttctttcaaatgtgcaccttgcctgtgaaaggcatgctgacttaggtattcagaagacttacaattggtaaaccaattgtaagtacagcttggggtgttccttcaaactttccccatgacattgctaaagttgtctgtttggagtttacagtgaagatggggatgcagatgggaggagagggagtcagctcaggcccactttggcctcctctgcagagggattcattaccaaacagtctggaggaagccttgtccctgccaaggttggtgctgcaaatgtgagctttggctgggtgaattaaatgatggcattactctgcacttttccccagtgtgcatttgcatagattcctcagtactgttttgtattttgtgtttaatagcaaaatcttattccatcagatgatgttgctgaaatattttgaatcaagtttaagccttgtgtgagtatagcttgtgagtttaaaactttctcccccattcccaccgttcatcaaacaaattttggttcagctgatatatactgattcttggatatgtgctagacactgtagagaagggaacgatgaatcagacatcaggctaccagcaaagagcttgtagtctagaaaggaagataaagcatgcacaaaagtaattgtaatagaagtacccaaagcaaagtagataagggactatgatgggtgggcaggtggatatgtttcttgcagttgaaggatcagggagggacatttcatcactgaatcatacactgttctttaaatctctgcttgtaaatcttagactgtgctgacatacttagagttcctacaagcctgttacatcagagatcaagtcttatacctattgaagggaaatttgtacattccagccaacttaactcgtgaagaggcccacatgctttatttggagtccccagccaggcaaaaaccacttcataggattgaattattgccttataaatgtaaaatggttcttgatgtgatatggctgcaagtgcctttgacccttttgtctcccttccataaactgaaatacctaagctgctccaacctcctttttgtcttttgtttcataaatcctttcccattgcacatcaactcctgtctctctttgtactgtcactctcatctgttgctttccattcacactgcctttagccactcatcattttgtgcctacaccacagaaacctctgaatgtaatggatgttcctaccaggtgactgtatttctttatcaaccccaactgtagtcatctgatagtttaagggcccgccttttggaaccaaaaagaatgtattaaaaatgttaagaatttctgaagtactaatgtctatttcttgttcaatacagaggacaagtcgtacaatggtggaggaataggttcttcaaataggatcatggacttcttggaggagccaatccctggtgtagggacctatgatgatttcaatacaattgattgggtgagagagaagtctcgagaccgggataggcaccgagaggtaagacaaaagatggcacatgggtaagtgttaggaaatacaggggaagaaattgaagatacatattctttctattctttcctttcttcagccctggatgtgactgaatctggtttctgttggcaatatagagtttcatttttaaatttatttttgaagacatcttgcacataatttttttattatactttaagttctagggtacatgtgcacaacgtgcaggtttgttacatatgtatacatgtgccatgttggtgcttgcacataatttttatcctaaatttaaaaaattgtatttagtgatttatcttactatagtaaatagtcgcaaaggatcctcacagctaaaagggatataaatgcctctgaagagaggtgaaaacaaacttggaggaaggtggcaaaataaatgtcaaagatcttcctttcccatataatctctcttttatggttttttccttaatgcagga

SEQ ID NO: 12574 - DNA, 6000 bp, Homo sapiens
acatatcaatgaaatggttgtagagagtgagagagaagagagtaatctcagatgacattcaagtctctggcttggtatataggaatgagaatgctaattatgtcatgcagtcgttcaggaggcttattctgaatgatattcacccattgaaaatatcctctccctactctaaaatgttatatcacattgtagagacctctattctcttacttactatgtctatttatagtaatgaaacattttatttgtacattgttttagccttcttacatgctatgtactccttagtagtgtggctggaagtaggcaggtatgaggaaaatagaggaagaaaaaaaaagactaacatttactgatcatttactatgtaacaggtgttacacagggccatttttcagacattgcattttattttcacagcctgattttacaaataacaaaatggaggctcagagcactcaagtgacttccccaagatcatacattttagggagagacagagctaagattcaaaccaagtttgtccatgcccagggcccaccatcaggaagccaaatgagaaagtatagaagagttgggaggaacagctgatgccatgtatagagctgctccaggcaggcaacagagaggaaagcatgttaattgcacagggagaggagaggaagcttcacccaggcaagcagaaagattcttgggcaaagggagtggggaaataggtgttgggaggactctcagggagacgccacatgaatgaggtaccaggaagctgaataaaatatatttttgacctagggccaaagagtgaatactcaaagaccaggtgagtctggagctaaagaatcagtctgcagatgcaagtaagctggtggtggtgggaggttggggggtgagcttcagagcaagcatcccttacagcagtggtcctcaaaccagcagtggtcctcaaaccagcagcagcagcatcccctgggaacttgccagaaatgcaagttcctgggcctcacccaagacttactgaagcaaaaactcaatgccttaacaaatcctataagggattctggtacatgttcaagtttgaggcctacagccttggaggactagggaaagcagcaagtggagttcaagagccagagtacaagaaccaaacagtgtacccagagcaagcctagggctgtcacacatcacagcaatgcagagcaacctttccaaagcataacagagtctgctggtcagaagtggtggtggggagtggcttcagagatgtggtttctgggggacaaccccctcttccctgcacccctccacctttccccagaggtcttctttttaagaaactgctaagggcaagctcatcagaggatcctgaggtaaaggggttagactgtctgtgccaaggcactgcccatggcttttaattttctcctggtacctgatactgtcacaaaatttaactgtggaaaatataggaaggaaaacaacatttactgggggtctgaacatgctgagcactgtgctaagggttcacacaaatgccagctgatttaatcctcacaatatttcagtcatggaagtgttattattcctgttctgcagatgagggaccagaggctcgaaaaagttaagtgatttgcccgaggtcacatagctcagaaaaaggcagccaagatacaatccttagtctttctgactccaaatgccatgcttctcaccctagaccatgttgactctaatgtgaaggtccctggggtcctctcctctttgtagccaccccagggccatgtgttattgatggcccatagatgagtaacctggaaatattggttgaatgaataaacgaaaagatgttctagtgacagagtttaacacatgaaggacccttaaggatattctggtcttacggttttccaatctgtttttagtgtcctagacatttcttactggtgctccagacacaatcacattgtctaggaaaccagtcatacccagtggacaggttcctctgtctcttcacccttgcccatttctatctccttccctgccttacctagaacaaatcactttcatcttccataagtagtgggtgtttactaagattctgtttggggaaagggttctgctgccaaaattaattttgagaaacccaaatctagaccacctttttcatgttataggtgaagaaactgagtgatagaaaggcaaaaagacttgtccagggtcactgtgtgctctttagtagcataactagaatgtgaagccaggattcttgaaacattcttcttttttgacacaagttaatacagtttgtgtcctaacgaggaaataattatttagatttcaacaattatttagaattgaaaaattaaaaattataactctaatttttgcctttactatgttccagttattgtgctaaatagttaatacgtatagccttatttaagttcttataacagtcttataaaataggtaatattattatctccatttgaaaactgaggtttagggggattaaattactttaatcatagaatcaggaaatggcagagttgggatttcagttcagaatatctgatttcagttttcatgctcttaacagtgatgccatattgcaaatgtctatattgaaaaaaaagtctatttagcctgctgcttgttttgtaaattaatttttattggcacaatgatataccttgagagctacaaagacaaatttgtgtagttatggcaaacagaaactgtatgctctggaaataaatgatttagtagctagccctttatagaaaaaatctgccaacctctggtctgtagacaccaactttaaaatgtttttcaagtgacctccaggagaaggaaccagaaatgtaccccggatttgcagaaaaggtgggtgctgtttgtactctcagtgaaattggtgaatgaataatacaaacctggaaacctggcctacctggcctcctgcagtcttcactgtgttgattcaagtctattatgacctgttcttgttgtctttcatgagtcagagcagaggccttatcccttcccctccctgtcataaatgccttagagcttggacttggatctcagcttaatcagttttgtctccacttcccctttcttgcttcaaggttcacatgtgtgcgaggcagataattctaggggctgccatggcttggctaagcttcccttgaccactgagcatttctaagggagttgaggctggtggctcctccttccttcctactggtgcttccacctgccttggtctgagttgcagtccatggggcagcgcctaagtgtctgagcacacttaagaatctctagtggtttatgacccagactttgccctaccacctcagtcttctgaatgttctcttccctggaccctgctccagacactttaaattcagaagaggaaaatgtgcccagcctgcctggagaaaagtgtctgctcctagccaagatctcctcatcacaaagtaagaatatcaggtggtggaacccccatcatacctgtccccttcctatacctgggtctgttgggtagatgcagtcctttttagagaggcatagtattctcagacctgtcgccacaaattgctccccactcattctttccctatactttgtgtctttgaaacctctttatcttctatgtttaatatctagactatactttcttcatggaattctagatgtgtaaatttacagggctgggagggtccatatctagtttaagaccctcattgtagaaatagaaagaggcccagagaagagaagggagtgggccaaatccacaaaatccacatagctgattactcctagagcaagtggggcgagaaccttggtcacttgactcaggacagtgacttttcactcttctctctttccaccaggaatgggaatgacctttgactttaaacaaatccagactccagttttaccctgaattgttgggggaacattttgttttttttttctttttagtattttcaattcttccatgtcttagtttttagggtgttgacctgtgttaatccaggctatcttctagctatatctggtttcctcaggtggaaaatgttaaatatagttaatataaaatttcactctagaatctgctagaaatgacggaggcaaagttaatgtatatataaaaaaatccaccagtgactggtggccagtaggctttcaataattgtgaagtcccttctacccccttgaaagtactgtgtttctcccctaagcagcacattgtgtgtggtggtttcatggttaaaagtttagacagacccagcaaatctctcttctcttttacttcctaagtgtgtgaccttggacaagttaccttccctctcagagctgaattttcctcagttgtaaaatagagagaattagagtattcatctcacaggataattgtgagacttaaataagagaatgcatgtaaaatggttaacatagggcttagaatgtagaaaaaaagtcctttgttttattgccaattttatttttacttatgactaagcagccatgacctcagaataatagtcagggctgacaattgtgcttcagagcaagaaggggaagaggtggtgagatggaggctctttcaatttctacctcatttcttaaatggagctgttgaaatctacccatgagctttggctggccacactgacagtgttctcctctcagcaaagaccaattagcaagtcctgataacagaagtacaacccacccccttgtaattcctcctgagatcctaaccaggatttgtaaaacacccggatatgggtaaagaaccatcccgggttttgtatcaaaccaggccccagaggaacaggacattccagtagttttgtttctggaaaagagggcacccagcccttccccctccctcatcctcccatcccagtaaaccctgccaaattggaatcctggacttaatttaggagaaaggccctgtaaccaagatactgactgaacatggctggcggactcaggctggggtctgcagtgcagcattaatgggccgctgacatgaatatggagtagttttctctagcaaaggtaagctttcttttctctcttttcaaactctacctcacctgccttcctgtgcaaaaacgtttatttagctgggtttaagggagtcctggccactaggagaaaaagtcagtggccaaaaagttggaggaggtttggctgatgtgcaggaaagttaaaggagacaataggctccttttgttcctctcgccaaaatagccaggactacactggcttgtctgtttcagggccaatcctggagccatacagaatagttcattttcctgtcgaaatagcttgctcatcttctgtttcacaggttgaggaatttattgaggtgatggatctgaggattatgtaagtgggaactcagttacttaaaaataaccatgtttggtttcatattttgagaccagattggcacagagtaagccaataaatgatagcttaactaagctaaacatctgaatttgagtagtcttagtttctacatagcaaaaatcttttagaaatcattggttcaaattctggctatttttaacaactggctgcgtgactttgagcaaatccttgcacctctctggtatcagttttttatacatcaaatgagggtgattgaaaaagatggtttctaaaggtttcatgcatgtgtgaatctataacacgttcagtttttcattactcagcatctattatatgacaagcaatccttttgctagggactcaaatatccatggttttatttgggcctcaagacaatcctgtgaaaaaaatatcatcccattttttggatgagatgactaaggctaaaataatttattgaaaggtcacatagctatcacagacaagagataggatttgaatcaaggtctttaacttcaaatcggtatgttttctatcacagagttaagaaagcagaggaccaaaaggtgaattttgatggagggttta

SEQ ID NO: 12575 - DNA, 6000 bp, Homo sapiens
gaacccgggaggcggaggttgcagtgagccgagatcgcgccactgcacttcagcctgggctacagagtgagaccctgtctcaaaagaaaaaaaaagtgtgtggccaggcacggtggctcacgcctgtaattccagcactttcggaggccgaggcgggcggatcacgaggtcaggagatcaagaccatcctggctaacacggtgaaaccccatctctactaaaaatacaaaaaaattagccgggcgtggttgcgggggcgcctgtagtcccagctactcaagagtctgaggcagaagaatggcgtgaacccagggggcggagcttgcagtgagccgagatcgcgccactgcactccagcctgggtgactgagctagactccgtctcaaaaaaaaaaaaaaagtgtgtgttctggagtcagcttgacctggttcaaatcccagctctatcacttactgactatgtgactcttagataagtcctttcacctttctttgcctctgtttgctcatctgtgatatgaggataaagcaacacttacctcaaaaagttcttttaaggattaaatgacagtgcatgtgcaggggcctggcatataacaggtactcagtaaatttttttttaataaaaatgctacaatgttgaggtggtcttattattattattattattattattattattattattttctgagacaggctggagtgcagttggcgcaattgaagctcactgcagcctcgacctcttggactcaagagatctgcctgccacagcctcttaagtagctaggactatgggtgaatggcaccagccaccatgcctggataatttttgtgtttctttttttgtagagatggggtctcactatgttgcctatggctggtcttgaactcctagactcaagcgatactcctacctctgcctccttttaattttttttttaagagacgggggtctccatatgttgcctaagaataacctggccaggggccaggcgcggtggctcacgcctataatcccagcacttagggaggctgaggcaggtggatcacgaggtcaggagatcgagaccatcctggctaacgtggtgaaaccccgtctctactaaaaatacaaaaaaaaattagccaggcgtggtggcgggcgcctgtagtcccagctactcgggaggctgaggcaggagaatggcgtgaacctgggaggcggagcttgcagtgagctgagatcgcgccactgcagtccagcctgggcgacagagcgagactccctctcaaaaaaaaaaaaaaaaaaaaaagaataacctggccaggttattcttttattattattattatttcttttattcttttttttttttaagaggcagagtctcgttctgtcgcccagcctggagtgcagtggtgggatctcagctcactacaacatctgcctcccgggttcaagcgattctcctgcctcagcctcctgagtagctggaactacaggcatgcgccaccacgcccagctaattgttgtatttttagtagagacatggtttcaccacgttggtcaggctggtctcgaactcctgacctcaggtaatccaccagcctctgcctcccaaagtgctgggattacaggcgtgagccactgtgcctggccttttttttttttttttttttttgagacagccggctaatttgagacacctggctaattttttgtatatttagtagagacggggtttcaccatgttagccaggatggtctcgatctcctgacctcgtgatccacctgcctctgcctcccaaagtgctgggattacaggcgtgagccactgtgcccggcctttttttttttttttaaatataatagagacgagggtcatgctatgttgcccatgatggtctcaaactcctgggctcaagcaatccacccacctcagcctcccaaagtgctgggattcgaggcgtgagccactgcgcctggcctaggttttgtttgtttgtttgtttgtttgtttgtttgtttgttcgtcttttccgagacggagtctcactctttcccccaggctggagtgcagtgacgggatctccactcactgcaacctctgcctcctgggttctaacaattctcctgcctcagcctcctgagtagctgggattacgggtgcccgccaccacacccagctaatttttgtatttttagtacagacggggtttcaccatgttggtcaggctggacttgaacccctcagtgatctgcccgcctaagcctcccaaagtgctgggattgcaggcgtgagcccctgcacccagccggttattcttaataattctctggccacctgttctagagtgtaacacatctcaccacctgaagcatttcttttctttctttgtttctttcctttttttttttttttttttttttttgagacagagtctcgctctgtcaccaggctggagtgcagtggcgcaatctcggctcactgcaatctccgcctcctgggttcaagcaattctcctgcctcagcctcccaagtagctgggattacaggtgcatgccactacacccagctaatttttgtaattttagtagagacgaggtttcaccatgttggcctcgatctgctgacctcgtgatccgcccgccttggcctcccaaagtgttgggattacaggcgtgagccaccttgcccagcccctgaagcatttctttatggctaactgtggtgcctagtgcagcagctttgcatatagaatcccaggcttgggagaaagggcacccatagccctgcttccccatgctggttggcacatgacatgaactcactaaggctttttatttatttatttatttatttatttatttatttatttatttagctaaatgaagaaaccttgttctgagaagtaacctatgtcctgtggactgtccttctttccccagattctttcatcccatttcccaacttttgcagttgctgttaccccacccctttcctctacagcatagaggaccacccagggctgaatatgaggcttcttccacaaccagttgctctgctgtggagcatgcactggggtcaggaaatgactccagggatcactgcacctcctatggtccagggctgcatgtcctcctcacattcagtttcctgctgctagtatgatctccttgcaacttaatggcagaagtggcaagaggtgggagaagccttcttagcctgcctaagggatagaggagaatttcctccctagagcaactggcaagctcctgaaaccacgaggttgcaatatgcacttggggttgggggctgggcagcaatggggtctcagacagaccctataggtcaacaacagcattggggactgctcaaggtggctcacacctgtaaacccaacactttgggaggcaaaagtgggaagatcgcttgagcccaggagttcaagaccagcctgggcaacatagcaagccccccatctctacaaaaaaaaaaaattgaaaaattagctgggcatggtgacacatacctgtggtcccagctaattgagaggctgaggtgggaggatcgctggagcccaggaggtcaaggctgcagtgagcagtgattgtgccactgcactctagccttagtgatatagccagaccttgtccccaccctctaataaaaaacaacccacagcattagggagaaaaaggagagatcttgggtttgacagaccatttattcccccaaagcaactttgttatcttttcctgagaagatttttttttttttttgagacggagtcttgctctgtcgcccggactggagtgcagtggtgcaatcttggcccactgcaacctctgcctcctgggttccagtgattctcccacccagcagctgggattacaggcatgcgccaccacacacggctaattttttgtatttttagtagagatggggtttcacattgttagccaggatggtcttgatctcctgacctcaagtgatctgcccacttcagcctcctaaagtgctgggattacaggcgtgagcaacggcgcccagcctttttttttttttttttttaatggttagcctttgctttctacagacactatctgcagaagcacagggagcctgctgtagaaagacttctgtctcagatacattgtttcatcctacctatcctaccgctttggaacggtgtgaccttgaggagttacttatctgagcttcagcttcttcatctggaaaatgggataacaggcttcctaaatgggtcgaaagaaaaaatgtatggaacaacgctcagcacagtttgtggcttcataaatgagctctctttcctgtcctctttcctctccatattccggagaggatctaagcctcagggaaaatcctggtgaccttaagcttctgacggggccatgggggagggcctcagcccagagcctctgggtcccctggggtcccctcttcacatccacctgcctgtgttttatctccctccccccgcccccccgtggccattcttctggtggggctatggggcgggtgcggcgatggaccgggcgggcacagaacaggtgggtgcaggctgggtgtccggcgctgggacacaagtgctctgtgtgtagggtgggcggaagtcagggcgtttgatctgaattctaaagggcgttgttcagagccccacaaaggtctcattgtgcagacactgggtataaagcagcatatgactccccagcaccgggcggtgatgaattgggacgcaggcgcggagcccagggaccactccccctgcacagacatgagaccataggggacctgtctgggtggcctcagggataggcgctccccaaggtaagagggctttgttgagtttgccccaggtctggagttaaggagctaggggacagggagccataggggatggctgatatcggaacaagatgggcttggcaaagaaaggggctggcgggaaaagaatgttggatgaaagcgaagaagggggatggggctcagggaggtcaagtcaagtgagtgaggaggaggagaagctggcaagggagatggggtgacgaggaaagacatgaccatccttcctttcctgctactggctcttggaagagttgagggggggtgcgcaggcagtgctatggcgcccgactttccaccccagctttctgacagcttgcttcatggctggtgttttgcaggtgtgaatgaggcaggatgaactggacaggtttgtacaccttgctcagtggcgtgaaccggcattctactgccattggccgagtatggctctcggtcatcttcatcttcagaatcatggtgctggtggtggctgcagagagtgtgtggggtgatgagaaatcttccttcatctgcaacacactccagcctggctgcaacagcgtttgctatgaccaattcttccccatctcccatgtgcggctgtggtccctgcagctcatcctagtttccaccccagctctcctcgtggccatgcacgtggctcaccagcaacacatagagaagaaaatgctacggcttgagggccatggggaccccctacacctggaggaggtgaagaggcacaaggtccacatctcagggacactgtggtggacctatgtcatcagcgtggtgttccggctgttgtttgaggccgtcttcatgtatgtcttttatctgctctaccctggctatgccatggtgcggctggtcaagtgcgacgtctacccctgccccaacacagtggactgcttcgtgtcccgccccaccgagaaaaccgtcttcaccgtcttcatgctagctgcctctggcatctgcatcatcctcaatgtggccgaggtggtgtacctcatcatccgggcctgtgcccgccgagcccagcgccgctccaatccaccttcccgcaagggctcgggcttcggccaccgcctctcacctgaatacaagcagaatgagatcaacaagctgctgagtgagcaggatggctccctgaaagacatactgcgcc

SEQ ID NO: 12576 - DNA, 6000 bp, Homo sapiens
acacgagggacctttggttaccttcttaaaatgtgatcatctagagaatttacagaatgtgaaattaatgcctatttgataaaaaatatttaatatataaagcaatgcctacagatatgtatatatatcacatagttgttatacagattaaatgaaataactgatttgaaatcacatagagcaattcaaatactacaccaagtggaaattatcctttgaactttgatgaatttaggacttatttattatgataatctggtacttgttgacaaagtacagtaaaataattattagatactgaaacaagcaatattacattcaccctgaggcaatagaagaatgtgtgatgatagacaaacgttatatttttgccatgaagaatgagtctcttgcttgattattctgtaaagccatgtttcaaatgttccctaaatcatatatcaaaaatccagaaaaattaatatagaagagcaacctttagaatttgtcttattaagtgctatttgagcttgattattatcagattttgaaaccctgttagagaacaccacactaactgttgttggaatgctagaatgaatcagcaaacaataaacaatttggagaaggaagcagcattgatggaatccacttctcagagaagtttagacccaaatgtgaaaaattagacatgtacaataagcacagtaagcaagctgtttgtggaataaaatttaacaaaccagtcttataattactgtgccttattaaattttttattttgacatctcaagtttcagaatacacaggaaataattacataaaattggacagccaatgcccttgcccgcctctgcttgctgtggtcagttcctctgaaaatactaggtttatcggttgctccaatttgtctttctcccaatgtggttacttttattgcaatgttctagattcctgtcaacctcaagaactaccttattgtttacccaggctgtgaaagaagctttgcttgtatttgagaccaagaacacaacagtagtgaccacctaatatattatggctgttaaatggtgtatttttgacttaatgaatcattgaaataattggaatgatgagatttaagtggagttaggataatgggcagcagatagatatttcttatcttcatgtaatacttaaatttgtactattgtagaaattgtacaaaaattgtagcatataaaccattcactcatgtgtttgttgttctagcatatgattcagtaattcacatagaattcatttaaatatattacaaatgaaaccagcactataatgaagaaaaaatttaaaaaatatcaaggaaattatgccttgaaattcttctgacaaagcatttgaacattaattgtgtggtttgaaatttctagaattgcatatagtagatgcctagctcccttacctactcagagatgataaaatgaacttccatttttgctttatacatctttaaattttcagagatgcttattttatttctgcttttgctttctctaattgtcattattgtgtccctctaaatacaactattgcttacccaactgtgatgtcttgctgataaagggcatcacttaaatagcatgggcactactggaacttgtcaaaaattttagttctttatatcttcttttgtgttgtttcctttatcaatttccaaactaacattaatctatagtaggagtgggttgtaggagaagggcaaagaaatttaaggttaccttgtcacatttttcatgagacagaaaaattagaatgtaatttacatacattaagatacgtatgtaggcatattttccctggatatctgagttaaatgtgccatgcttccataagactaagcagtgattatttatatccgtatttagtagctaaatttctgtactgttcattcaaagaattaaactcagcattttcaaagaaaacttaataaattttaaagataataaattttcaagtggcaaatgtgagagttgaaatcaaaatctggagattgaggttacttaaacatgcatgttcacatcctggtagaagcagagatgagttcattatacagtaattgaacactgaattaaagacatactagaatatattatcaaatataaactctgttttgttcactgatgtaccttcagtgtctagaactgtgcttgacatataaaaattgcttaataagtatttgttgaataagtggctaaacctccatgagttcatttcatctcaaactctttattaactagagggtgaatattccttctaggttggcaacatatatattcacttaagctttagaaatggtattttttctcaatatttcttccccgtttttaaaaccactgaatgaatttccagttatgaaacacattttaaaatgttttatatgatgatggtattgtggaagacagtgtggcaattcctcaaggatctagaactagaaataccatttgacccagccatcccattactgggtatatacccaaaggattataaatcatgctgctataaagacacacgcacatgtatgtttattgtggcactattcacaatagcaaagacttggaaccaacccaaatgtccatcaatgatagactggattaagaaaatgtggcacatatacaccatggaatactatgcagccataaaaaaggatgagttcatgtcctttttaaggacaaggatgaagctggaaaccatcattctcagcaaactattgcaaggacagaaaaccaaacaccacatattctcactcataggtgggaattgaacaatgagaacacttggacacagggtggggaacatcacacatcggggcctgttgtggggtggggggaggggggaagggtagcattaggagatatacctaatgttaaatgacgagttaatgggtgcagcacaccaacatggcacatgtatacatatgtaacaaacctgcatgttgtgcacatgtaccctagaacttaaagtataattaaaaaaattaaaaataaagatagagtagaacagatttagaatggattgagggagggtgacttcttggaactagatcgctctattaattatgttgtgtagagatattgcgacatgcatgcaatgcttttatttctttagtttgctttattttgtttttcattttggggggttatcccaggaattcaaggttgttttatcttatttttttttaatttaacttttattctgagttcaggggtacaagtgtaggtttatgtaagtaaacctgtgtcatgggggtttgttgtacagattatttcgtcacccaggtattaagcctagtacccattaatttttcctgatcctctccctcctcccatcttccaacctccaataggccccagtgtgtgttgttcccctgtatatgtccatgagttctcatcatttagctcccacttataagtcagaatatcctgcaatgtttttaaaaacagtctgtagtattcttctgccagttgtaataatgtgtaatacctaagggtaagataagaatagagcgataattttaattccaattgtcactgccccatttttatttctgcttatgtttgcatgacatttataaaatcacataaacatccaaaacttcttagatatgctagattcacagcatatagaatacatatatgtgtgcatattagctggtagtatcaatggggtatttttaatctcaccttcataacagagtataaaaccaaaaattcacaagactgaattttgagcgagtttttatattatgtaatcccaatgcacatcattgtacaaatgatgctaaaaatactataccacaggcaacagtgtttttgtgttgtttactaggataaataatgtcttcagctctagcattactcactatcataactaacatattttatgtatgataccaactgcttaacataggaaagtcattgaattcatagtatatatttttaaaatgttgtgataaaaattaatgagatattttaagtctactcctgacctaaactatcttgattgttgcaacagatgcatttatttgattattgattgtaaataggaagatttctttttttccaattttgtgtattccaacattggcatatgcatagtttaaaaaatgcggatgtgcagctatgcaatgggacagttatttcatataacacattgcttggcataaccagagcacaatatccataacaagttatttatatcatatgtagtcctcctgtttttagaacaattactaaaacttgttgatgttatcgattaccaataaatattgagaaattccttaactggatacctatatgcattaatacatttctggaatggaattttaaataaccatctgaccactgagttttcaaaactgctaaataccttaatagttgcattaaccttcatttaattataaaagtatgacatctgataggctttagctcagtgtgatacaaatttaattttgtttatataatatatcatctacaaatactatccagaagaagcacattagaatgtttaattatactagagattaaaagatatttaatatataaacttgagaataaataaaatagagaataagaattgagaattacgaaaggaaactgaagataaaatttgcagattttaagaaaatcaaaattcctcattgaattttgtcagaagagttcaagaactgaaataattttaaagctttcagtgagtgaaaaataatagggagaagtagcaagagagattgatttttgactcactttcaactcggtactgtttttaaatgcctttcttattttcaagcccttctcaagctgttccttgaagttgtataattcctgttagtctatagatgtgaaaacccatttttatatgaactaccttctgcgttctataaacataaattctcagggttgggatgtcttctagtctaactctcccattgaatgtttggacgtcatctaccaaatccatatatctaaagcaaatatagtagatctaatctggtggtccagtacctccaaagatatggaatacactcctgaaatatcctgaaaacttttttttttcagaatcctttaataagcagttatgtcaatctgaaagttgcttacttgtactttatattaatagctattcttgtttttcttatccaaagaaaaatcctctaatccccttttcacatgatagttgttaccatgtttaggcattagtcacatcaacccctctcctctcccaaacttctcttcttcaaatcaaactttattagtccctcctttataatgattccttgcctcgttttatccagatcaattttttttcactttgatgcccagagctgaagaaatggactactgtataaattattcattgccaagagaataattgcattttaaacccatattataacaaagaataatgattatattttgtgatttgtaacaaataccctttattttcccttaactattgaattaaatattttaattatttgtattctctttaactatcttggtatattaaagtattatcttttatatatttatcaatggtggacacttttataggtactctgtgtcatttttgatactgtaggtatcttatttcatttatctttattcttaatgtacgaattcataatatttgattcagaacaaatttatcactaattaacagagtgtcaattatgctaacatctcatttactgattttaatttaaaacagtttttgttaacatgcatgtttagggttggcttcttaataatttcttcttcctcttctctctctcctcttcttttggtcagtgttgtgcgggttaatacaacaaactgtaacaagtgtacctggtatggacttgttgtccgggacgtacattttcgcggtcctgctagcatgcgtggtgttccactctggcgcccaggagaaaaactacaccatccgagaagaaatgccagaaaacgtcctgataggcgacttgttgaaagaccttaacttgtcgctgat

SEQ ID NO: 12577 - DNA, 6000 bp, Homo sapiens
agtgactatcagtcaaaccttgcttaggtagagaaggagcactaaatagctactccagatataaaagctgtacatttgtgggagttgaatagaatgggagggatgtttagtatatccagtatgattggtaaatgggaaatataattgattctgatcactcttggtcagcttctctttctttatctttctttctccttttttaagaaaacgagttaagtttaacagttttgcattacaggcttgtgattcatgcttactgtaaagtggaagttgagattattttaaaacttcaagctcagtaattttgaacactgaaacattcatctaggacataataacaaagttcagtattgaccataactgttaaaacaatttttagctttcctcaagttagttatgttgtaggagtgtacctaagcagtaagcgtatttaggttaatgcagtttcacttatgttaaatgttgctcttataccacaaatacattgaaaacttcggatgcatgttgagaaacatgcctttctgtaaaactcaaatataggagctgtgtctacgattcaaagtgaaaacatttggcatgtttgttaattctagctttttggtttaatatcctgtaaggcacgtgagtgtacactttttttttttttaaggatacgggacaattttaagatgtaataccaatactttagaagtttggtcgtgtcgtttgtatgaaaatctgaggctttggtttaaatctttccttgtattgtgatttccatttagatgtattgtactaagtgaaacttgttaaataaatcttccttttaaaaactggaaaaaatcttgaactgattgatttttattatgttctgtcatatgggcacactgattgactttacaattccctcaaagttaagatttttaattttaaaattataaatgatatttagcatctttatatgttcattgttgcatatatcattaattatttctaagatatatccctagaaatgggattgctgagtcaaagatatactcatttttaaggcttctgatttgtgttaccagaaagattctggtactttatctttctacttggagtgtgtgttttattttcccccttataccctccttattgatgcacattattctttttgaactttgccagttttttagttgagaaatgatatctcattgctattttaatttgtatttttttgattaatattaaagttgtacattcttttttaaaaaaaacttaccatgtctacaggactattgagctacttttggagactgtacttaccaagatagtattctctaaaatccaaagaagtgaaagcaaataaataatcctttttatttcaccacaaactagaaggcacgtttgtatgtttaaaaagaagtaggcttacaattatgtgttaaaaacaaaacataaaaaagaagcaggtttatgttatggaaataaattgtctcctccatgaattcattagtagattctctataaacactctcaggtgtattttagggcatctaaagcttatcttaaaccagcggttctcaaacattcatgtgcatcagaatcatctgcaggggttgtttaaacattcatttctaggccccatccctagagtttccaattcagtagttttgggatgttgcttgagaatgtgctgatgctgctggtctcaagaccacgttttgagacccatcacagttccccaaacagcaactttaaggagcagcttcctttatgatccctgattgcctcccctttgttcccataacaagtagtttaaattttctgttaaagtccaaaccacatatttacaatacctcgcacctcttaatgaggattttgagctgctgtggcattgtgtgctgatatcttagatttctgtctggatcacagtggtcattaacaattccacccctcaataactttaaggccctgatgtccctcttatcagtaccaactgtaccgtgaactacagatctctgtagtttcactgaccccttggggactggattgctatacttgggctgttcagggcttggggcccagagaaatgagatgggaggcaaataccaagttggtattacctgactccgtttcattcaggaaatgaaaatcaattctagaaaatcattcaagctgaagatgcagtgagacgtgattgagattctttgatgacttctaatttttatcacagctttcaggagagcaagaaatccattttgactcctatcatgttgagccagtccttgcccttcaggaagcctttctcagagggtaaacaagtaggtgtttttgccttcccaggctacttagttaattttccagaagtttctctaagtctgagcaaagattctcaagttagccactagatggcaccaaatcccaggagacaatagagggttctttgtgatcttagatgttcacttactcttcttcgctggctaagaagactcagaagggctctggggagcaaaggagagagaacctggagaaggtcagcggtcagcactagaggtgtgcaaagggacagcagtacagctggtgtgcacacgcgtgcacacccaccaccattcgtgctccaacactcacatctaacactactacccaggaaagtgatgggaggtcgagtgggcagtccacccacaacaccccccaaacactgagtcagaggatttattttcaactgcgtgtgtgagctatttggcaggatcaggcagaaaatttgcagccacagttatcgtggtctaagtatccgatggcttgtgccagtggttctctgggtgtggtacctgatcagtaacagcatgaacctccaccttgtgagatatgcagattctttttgcccccccgccccccgcctcgtccctttcccccaaggactgaatcagaaactgggtgtggagcccaacaagttgtgttttgttttttgtgtttttctgagacagggtctcgctcttgcccaggctggagtgcggtggtgcgatctcagctcactgcagccttgaattccaggctcaagtgatactcccacctcagcctctcgagtagctgggactacaggcgagtgccaccaagcccagttattttttaaaatgatttttatagagacgggatctcactatgttgcctaggctggtctcgaactcctaggctcaagagatcctcctgccttggcctctcaaagtgctgggattacaggtgtgaacctctgtccagccaataagctgtgttttaacaagtgctcagggtggttctgctgcaggaaactactggctgatggatacatggattccattatccacccattcattgattcctgcattcactcatccaaccctaaaggaggtaaccaaaacagagacaatcccatgtgtaagcatgacatatcttctctgccttctctacccagcaaaatgatacgaaaatgcattgcgaatatgtttataaatcaagctccttttccatcaggtagaattcctagtgctgtcagctaaaatgaagatttctccaagatgggcctccagggctattgcaaaacagctgctgatggaaggaaattccacttgctgtgccttataccaggctgggagtgtcacaagaaccctttacaagctgctcccacaatgaccaaaactgtcttctcatgagtgcaaagcaggcatgcccaaggggcccaggttagcatggtgcaggactccgctgggaaggtgaggggttatcgtcgcgggggagtgtcgactaactgggctggtggtgcaggggtaaaataatttaccaagacagttggaggtaaaggcagatttattagagaaagtaggaaaatacgtttcgagaaggcaacgggcagcctgcaagagaggagccgactgaaaagaaacaaaggcttgctggagattttataggatggtttttgggctgattgagaaaaccaaggcagtagggagctagcttgcattcttctgttagctggggtgtttgataaattgaggcgtttgatagtgagcaggaagtttgtgagttatgtatgttatctgcgcaagaagccacatgtcctgggccataaagaaaagcagacctatagcttatctgattcctctttttgtttatatgttctggaccatgaagaaagacaaacttatagcttatttgctttctccctttgccttcccctgctccagccagcctaactccttttttctaattaggattccacagttatgttgtccctgtgcctgcagcctgtgaatggacgccccaccacctccgtcacagcagtggtcagcacagataaatgcacacaacacacatcgatctggccctctgagaagagaatgttaggcttctgaaagaagagataaatagtgagagataacatctaagaatcaaaataatatattcagtaattattttctgaacctatcctaatgctctgaccgatacattctttagaacatctacccgtacattccaaggaccctttttccacggccctttttctccctgtatccctcttcctgctccccttcttttgcacagggcatgtttcacatatacaagatgttcttacgtgtcatcccactttagagatgaggaaattgagtctcagggaaggcaaacatcaactttgtcttggggaaagggcaggaagctggaagggaggaggaaatgagctctggcgaaggaaagaggacatggctgggatccttatggggtggtgtacgagtacccgtgccccccccgatctgtgggctgagggtggcggtgactagcgctgggaccagctccttctctctcgctcccaagcccacaagaattcggggagaaagggtgaggtagggggctccgggagagcggagagagtttggaaagaatccatccctccttctccccggcggctttctcgagaccctcacacagcgccccgccccgccccagtacatttcctttcagggaaagggacagggaagaggctgtcgggaaatggcggccgcggccgggctggggcttcagcgggaggcagcagaggggaagtggtcagcgtggcgaatgacggaaggtggcgagggagaggaagaggggtcgggtgtccgcggagctccaagagggaagacaatcgctttgccaaacacggcagggcatctggaaaggcctgggaacctcacccgccctcccaggcccttcgggctcttttcggtcccattaggaggagggggagggcggcaggtgggaccgggcacaggcctagtcgtgcgacaggagaagggaaggaagggccggccccagctgggtcctccttgcgtctggcctgtgccggacgcccccgactccgagtgatctcgggccggtccccgggggagtccagcttctcgcgccaggggagttctcagccccagggcagtccagggattaggcggaagggggcacgcagccacctggccggggcagggggagctgcgaggagccttttttttttttttttttcctgcgcagagccccttgcgtgacacacagtaggcgctcaatacatgtttattttcagttgagtgttgcttcagcttttatggcttgtgataaatccttatccttctgttctagaaactcgcattgtctactggatcaaggacagacagctcaccaaccgtgacagcaccatactggaacttcaaaaagttctgaaaacatgttggttcgtttgttggagtatttttcaacttaaattccttttccttttttttttttttgctcactttttcctctgcagaaaaaccttaaaatgttctaccttttccttgaaacctcctcccactccttagttcacattgacttgtctttaaatgtttttgagaaaataatcagaaatgcacaattagtgcttggtggttctcaaattatttcacgcgtggtagttttgatttttgcttttccagtgaggctgtacctttcatccttaggcaaatatgatggctttcaaaagcagctatggggtgggaactggga

SEQ ID NO: 12578 - DNA, 6000 bp, Homo sapiens
aactggacaagagtctaaaatgctgctcatgtgattgagacttgggcacctgatctgagagggaggatggataataaaaattaaataattaactccaaggtgaaatttacaatgttctgggatcctgcacagttcgaggtcccagagggaattggagtagatctgcatgttgaatgttttattgcctgagggttatccatgctttgagtgaggtgcacatttgttttcagtctctggagttaaagatcctttggcggctgaacatgtgtgggttccagcaatgtctttttgtggccagcagttagcttagaaaggttttgtatctgaaattttaatctcctattggctttgttcaatggctagggaacaaaaatgttcctatggcaaggaacatgttctaagctcagcctaaggcacaaaatggcacgactttctttcaagatctgttttgatttctttacaccttatctgcccaaaaacatcctctgaagcctctctaacccagggatcctcctcactcttcccctacccattccccccaccctccgttatactggggccagttatctagtagatactgccaattacccttggcagaggtgccctgctcactaatttcatttgaaggagagccctggaacctggttttaatgtctggcacacgccactccaggatctcccagtttgtgtttctacatctgcaggctgatgctgatttctaaccaccccatgtcaatcattttagtttgtgggcatcacctatgccctgaccgttgtgtggctcctggtgtttgcctgctctgctgtgcctgtgtacatttacttcaacacctggaccacctgccagtctattgccttccccagcaagacctctgccagtataggcagtctctgtgctgatgccagaatgtatggtgagttagggtacgggtgctttggctctcctacccactatggaagcactatatatttggttattttcttagtgtaaggagggtggtgattatgagaaaaatataagatgatgaatgattgggtcttagtttattaatccttccctactgaaaccagagaggtttcttccccgggaagggaacttggaagtggtgggagttttcttggccattcacattggcctactctagttgactgctgttcacaaccccaaagcagcacatttcaataacaaacacaaggtttcaccactgttcaataccaccttctcttttttgtaaacctgtagaaaagaggatcctgattgttggtagaatccaactttacagccaggataattagagatggaagaagggctctgggggaaagtctccatgtggccccgtaactccataaagcttaccctgcttgctttttgtgtcttacttaggtgttctcccatggaatgctttccctggcaaggtttgtggctccaaccttctgtccatctgcaaaacagctgaggtgagtgggttatttgggttattttacaagggagtagctaataccatacaaattacacccatggccttcaattttaaggactgaaagtttccctttgctggattttgaattagccgattgccttctacaacatgttggctaagtgtgcctgagccaatgagcatagaaggtaaaacacctgttttctctagagttgcatagaaagacttcctttccaacccttcccctcttaaaagagaagtttgtagctttaggtaaagatagagcctaatggcaaaatcccccacatgaaaattttcattcctttagttaaaaaccatatcaagaaaatgggctgtgcacagaggcattcataggttttatgaaaacattttcaatttggaacttctttatctcaaatgagaggtaaaataagtacatttgaaagggaaagcactgtattgagaacagatattatatacaaatgaggcaggggaataaaagtaaatccgggggagacaggcagtaaattatttctttgacagcaaaatgttgactttaaattttgggcccctgggcacaactgtagggaaccagttaattattttggagtactgtactatttcatgactattctgtgatctgggtgttaatgggccaggtgctatggtgtacactgaagactgggaggcccacatttagggaagtgaaaacttagttagagatgtggaattagcacacaagaaagatatcaacacattcagaaagctgtattcatgatttacagtggagcatattactgctgttgcaagaaacagttcttcctctttcattttcctgcagttccaaatgaccttccacctgtttattgctgcatttgtgggggctgcagctacactggtttccctggtgagttgactttgaatgatcttggcaagtaaataggcctgagatagtgtgggtacagctattctgaaaggcaagaaggtagactgcttccatccttgaaatgctggagggaagcttctgggaagatagcaaagggtggaggctccgtacttctacttgcattggcaaggcagaaagacatcacaaattagatgggaacaagaaaagtggtatgaggaaagaggtaagagattcatagacacgaatgataatatttagtatttatagaacatgtaatgttgccaagtactttgcagtcataaattacggttaattctcaatacattttgatcagatcagtgacaaaacactgaaacatcacgaaacatgacttgctatagcctggaattctatatactatcaatatgaatccactttggatactctccagtggatttagttactcatatggaaatactgggaggacctcctaacattattagaattgttatgattataatacaatgctatgtcccaggtcttgctgatagtgctacagtgccctgtgaatgtagtgtgctcattgtgcagattaaaaacctaaggcactgaagggtgaagtgatttatctgaagttattttataagcagtgatcagacaagatgagctcacagaactcctggcccctactgctgaggtttccatacagagtcaagtaatttctcaccttgtaaaacgaattgattcattaaccaggggagagctctactgcatgatgtggctgtgtgtctacagcaagcaccctatgactctaagtcactcggacatattgatgtggcaaagccaaatattgttcacttccctgaggaaaactcagtgctagatcaaacagaggtgtggaataaatctttatgatttgattctctgggcctgggccatgagacccatgatgcctcagagacatcggacttccagtcaagtgtatatggagaaagccaagcctgggatgtactgctttttgcagagcatgggtttttcccttatttagttatgattttatttctacccttcctcattcccaaagggatttgaggagggagtgctttcttttctactctcattcacattctctcttctgttccctacagctcaccttcatgattgctgccacttacaactttgccgtccttaaactcatgggccgaggcaccaagttctgatcccccgtagaaatccccctttctctaatagcgaggctctaaccacacagcctacaatgctgcgtctcccatcttaactctttgcctttgccaccaactggccctcttcttacttgatgagtgtaacaagaaaggagagtcttgcagtgattaaggtctctctttggactctcccctcttatgtacctcttttagtcattttgcttcatagctggttcctgctagaaatgggaaatgcctaagaagatgacttcccaactgcaagtcacaaaggaatggaggctctaattgaattttcaagcatctcctgaggatcagaaagtaatttcttctcaaagggtacttccactgatggaaacaaagtggaaggaaagatgctcaggtacagagaaggaatgtctttggtcctcttgccatctataggggccaaatatattctctttggtgtacaaaatggaattcattctggtctctctattaccactgaagatagaagaaaaaagaatgtcagaaaaacaataagagcgtttgcccaaatctgcctattgcagctgggagaagggggtcaaagcaaggatctttcacccacagaaagagagcactgaccccgatggcgatggactactgaagccctaactcagccaaccttacttacagcataagggagcgtagaatctgtgtagacgaagggggcatctggccttacacctcgttagggaagagaaacagggtgttgtcagcatcttctcactcccttctccttgataacagctaccatgacaaccctgtggtttccaaggagctgagaatagaaggaaactagcttacatgagaacagactggcctgaggagcagcagttgctggtggctaatggtgtaacctgagatggccctctggtagacacaggatagataactctttggatagcatgtctttttttctgttaattagttgtgtactctggcctctgtcatatcttcacaatggtgctcatttcatgggggtattatccattcagtcatcgtaggtgatttgaaggtcttgatttgttttagaatgatgcacatttcatgtattccagtttgtttattacttatttggggttgcatcagaaatgtctggagaataattctttgattatgactgttttttaaactaggaaaattggacattaagcatcacaaatgatattaaaaattggctagttgaatctattgggattttctacaagtattctgcctttgcagaaacagatttggtgaatttgaatctcaatttgagtaatctgatcgttctttctagctaatggaaaatgattttacttagcaatgttatcttggtgtgttaagagttaggtttaacataaaggttattttctcctgatatagatcacataacagaatgcaccagtcatcagctattcagttggtaagcttccaggaaaaaggacaggcagaaagagtttgagacctgaatagctcccagatttcagtcttttcctgtttttgttaactttgggttaaaaaaaaaaaaagtctgattggttttaattgaaggaaagatttgtactacagttcttttgttgtaaagagttgtgttgttcttttcccccaaagtggtttcagcaatatttaaggagatgtaagagctttacaaaaagacacttgatacttgttttcaaaccagtatacaagataagcttccaggctgcatagaaggaggagagggaaaatgttttgtaagaaaccaatcaagataaaggacagtgaagtaatccgtaccttgtgttttgttttgatttaataacataacaaataaccaacccttccctgaaaacctcacatgcatacatacacatatatacacacacaaagagagttaatcaactgaaagtgtttccttcatttctgatatagaattgcaattttaacacacataaaggataaacttttagaaacttatcttacaaagtgtattttataaaattaaagaaaataaaattaagaatgttctcaatcaaacatcgtgtcctttgagtgaattgttctatttgacttcacaatagaaacttaataatcgtaccttgttcaaggagatcattcatttttcagctcatccaagtcattctcataacatttctctgaaataaatagtatatgaatagattacttctacttttatagttgaagacactaagaaatagaagcaaagtaatttgcccaaagaaatccagtaagtacatgtctgagcttgtgttaaaacgcagatattgaaaccaatttattgcctacttaaaggtttcttttctcttcgaagttgggtttcagaatgttcagagtcaactatggttactttttcaataccttagtggtgccccagtccccggtgcatttagatttaagttattgttaccttctctttaaattgtttggatattccagtaatgatccctta

SEQ ID NO: 12579 - DNA, 6000 bp, Homo sapiens
aataccaactattcaaagaataagtccggaattacaagtagtcttttaaattgaataagctttaaataatttacaaatcttgctacattggccttagttttctcctattggtgatcctctaccactcccttcctttcttcttaagtctgtgcattagtgcttaggaagcccttgctcaacatttctcctcctagatctgcttatccattgcctctcaaacctttattctctctttcctcccagacatgtcttcatgagcccttctcctgcctcccctcccagaacttctcttcttcacccacctttctcttacataatcattttgtctctccttcctcttctcctggacccctttcttcccagacccatctagtgtttcccttcttaccacaatctcttctcagtctgattccatcaattcaatggtgcacctactatgtattagactagaatagtgatgaaaataacaattgaaagccaaacccaatgtgcacaacaaacccccatgacatgtttacctatataacaaacctgcacatatacccctgaacctgaaataaaagttgaattaagaaaaaaaaaaaaaagccaaacccttcaggcattcacagtcctatgcaggagtagcaacaacaaatacaacccaagacaattggtggggggataacaagatgctttgggagcatagaggaggaatatccaaccaagagaccccaggaatcagggaagcaaccgttaagctgagccctaaaggataaggagttttccagacaaaaccagctgaaggtggagtagggccagggtccacaaagagttccaggcagaaggaacaggacttgtaaaggcctagagggaagggagagcattgtaggcttgagaaactgaaaggaagccagtcgggagagtggggagtgaggagagtagtacaaaaccagtttggagagctaggtaggggccaaatcatactactatgtggagaatggactgtagaaagccaaaaggagaaataggaaaatcagaagggtattgcatcccggtgagagatgatgctaaggggagtggaagtcgaaaccagcagatggacaaaaaagctaaattttggaggtagaatgggaaagatttacaggtctgatacaatgagggtcagagaaagtggaattaaggctaactctgaggtttctggcttaaacaattggctttctcaaagggagaagactgaaggaggactgatttcagttcaaagggaaatcaaggatacaattttgaggctgggcatagtggctcacacctgtaatcccagcgctttgaggggctgaagcaggaggctggcttgagcctaggagtttgagactaacctgtgcaatatagtgagaccccatctctacaaaaaaattataaaaattagctgggcgtggcggcacatgcttgtagtctcagctacttggaaggctaaggcaggaggatcccttcagtccaggagttcaaggttattgtgagctgtgatcatgccacttgcattccagtccaggcaacagagcaagaccctggacatgttgcatttgagacaactttcagctatccaaatggagatgccagtatataaaggtctgaagcccagagaagtctgggctgaaaatgatgatttggaagtcgtcagatgatagaggataactgaaaccacagaggataaatgagacttcccagaatgggaatgcagagtgaggaacgaggacttaggtcaggctcctgagaagtgcccatatttaagggtctggcagaggcagaggtaccaatgaagaagtacccagaaagataagagggaaaccagaggagtgttgttatcacagaggccaagaggagaaagtatttcaaggaagacaaggttatcaagggcattgaatgttgcatagaggtcatggaaattaaggactaaaaagtggccattggatttggtgacatgcggtcattggtaactgtgacaagaacttcttttggtggaacagtgagggtgaaatgtctctaagtctctctctgccctagaccctaactccttctcccagagtccatccctacaccctcttccttagagtctcttacttctccttctagactcctcttttcatagcatcatttcctccctgcccttcaagaccttgctttctacagagctctctttgattttcttcctcaaagaccctttttctctcttctccttttctcttcccccaaaccacctcttcccatactcttatttccctccctttattctctccctactcacttgtctcctgaactaaatgctgcttttctcagactgctattctttcctgttctttcagccccctctccattcccgcacccatctaagctctttggatctcagcaggggtcttggcagaaggattactaaagaacctcctaggctcaacactgaggagtcatagtatttggcatgattccaccaggatctgacaatgccgacctgaaggaaacacagtgttagaacccagtccttgaatgattgccaatctggaaaccacatcctgccaacacagtctcctcatccgccctggcacctgcccctaagattctgccttttcctatcctcaattgcacagtcactatgaactgataaggtgcccctctactacattctgcattcaatcagcattttctacttgtcaaaatgcattcacattcattcacccagccttgggaattcggctgggtgaagcctgggaaaagaaaatggagaggcttgcctgaggtcacatagttggttagaggattagcctggtatccctcccaccccttcagccttgcttgctttcatgcccaaagactccccaggcctgagctcaggcatggctgcccttttagcgtgtcccagcctgccaagagggagtgccctggagagacccttgctcaggagcactgccaggggatcagtgccccatttgtacctgcaaggtagggatgggccgccttgggaaggaggatgatttctggtttgcttcactgagttcaccctaggcaacaaatccgactgtttgctttgatatgacttgaaaaatagagtcaagcataatgactatgaggcaagctctagaggtggccaggtttggtacccaggccttgctctgtactagcacagtgagaccatggataggaaacacctcagcacagtgcctggcacctagcaagtgttcaatgaaccgtggccttatcatttgtacatgggaatccttgggagggagttggtgttgtacactgcaaagtttgccaagctagatatctacagacctagattccaagtctaactattactgctcaacttgggatgttgggcaactcttttcatctcattgggccgaggtttcctcatctggaaatagtaatggctgtcttatttttgtaacatgttgtattggcctttaaaacatgcacactctttcacctagcaattctattcttaagactttgtcagtattatgtgcaaagatgctgggttatagtgaaaatgaaaataacaaaacgtctagtagtttacgattaaataaatcatattttatatgatagaatgcagtgcagccatgacagaatgatgtagttctgtgttttaattgacatggaaataggtccacgatatgttatttacaaatgatgtaaggttacataaactgtaggtatagtgtgattcaattttataaaacaaatcccatcgatatcttctacaatacatcaaaatgttagcaatgattatttctggctggtggcattatgaggacctctattttcttctttataattcattttctgaattcttttcaatagcatctagtatttttctacttagaaaaaactagaaagcttttttgcgttgggagagtaaagccagtcactgcgctctactactccacagcatgtttttttgtttgtttgttttggtttggttttatttctgttgttgtttgggtttttgtttgtttgctttgcttttttgagatggagtctcactctgtcacccaggctggagtgcagtggtatgatctcggctcattgcaacctccgcctcctgggtccaagtgattctcctgcctcagcttcccgtgtagctgggactacaggtgcgcaccaccacatccagctaatttttgtatttttagtagagacaaggtttaaccgcgttggccaggctgttttcgaactcctgacctcaggtgatccacccgcctcggcctcccaaagtgctgggattacaggcgtgagccactgcacacggccttcacagcacttttgagaggcttaaatgacatagtgcatggcactgccatgtgtggtaaaaaggagagccctgtccttatgctggcctactcagttccaccttgtaggacctgctctttgaactcagagtctgaacctacagtacccatgtttgcccttgagccttgggaccaaccttaggggtggggtagggctgagggcctgccagagaatcaagctgagtagaaaagtctatggagctgcaggccatgcagggctgcttgggcactggctcaccagggctgtgtttatgcagcttactccctgctgggcttcagggctgctagccagggacacctaattggtgggacagagccccctcctctcaccaccctcaaagctggaatgttctgaattccttcttgggccaaatccccctccccacaaggcctctcctgggttcacagaggtcaccacacaaaagcccagctggagtggagtttttgacagaaaaaaaaaaacacacacagaaaacccaccaaacctttttttttttttttctaaagtgcctcaatctttcccagcctccaggggtttaattctgatctgtaataagtctctgacccacggctcagatttgcagatggattttgcaaagctgtggttaacgattagaaatcctttatcacctcagcccgtggccccttgtacttcgctcccctccctcaggatccctttctccctctccaggggcatctccccctccaaggctctgcaaagaactgccctgtaagtatctccatcctgatatagttgctgccttttaaattcaccgaggtgggcactcttccttcctagtcactatccattcaccccatggtggagccaggctgggccaccttgggtttctgagtgaagggtatgggaggggaaactccggtggcatttgggttggtggtatttgttccctcaaagctatcacaaaggttcaaatctttaaaacttcaggaccagagaaagcactctccaaatcagatattttctggtttgggggcttaaaaggactgggataaaaattggaggaagggagccacagtttacccctctgcctaagtgtaggggactgaggagtggcagaaggggcactccctcacagccagctccagtgccctccttggcatgaaggctcagggaggtagcagaaggtgggttcctaagtgaagtcataaagtttccccatgaggtccttcaaggactctccctcactggtctgcaagtctgtcattagaaattccttctttcgactgaggtattactctcttcaagtgccctctttgaaaatgcagttggaaccaaaacattcacagcacttatggccggggagatcgtaggcgatttttgttttctaaattctgcctttctgtgttttccagtgttctaaagtgagaatgctttactttgatgatcaggacaaaaatcaacttctttttcaaacaataagaaaatctctcaatccagttgcaattctctgaactgccatcaatcaattgatgtagaaggaaagatgaactgctctaaggacaaactttcaagaaagtagggcctcaagggaatggctttgccacctactagtgcccttggcagctggaagtgagtttcagagaagggggcaagtgtctcagattcttatgaggggcagtgagatcaagggatatagaaatgaggctgactgacaga

SEQ ID NO: 12580 - DNA, 6000 bp, Homo sapiens
aacatcaggaaacagggtttgagagcagacaaccattctgactaaaatttactaggcagaaatttcctaatcctaataagcctgagggtgctgcaggagactagggcgtgtttcatctctatctatgactgcataaggcagacactcctagagcagccattttagaggcctcctcctgggaatgcattcttttcccagggctgttaattgctaatattccttactggggaaataattcagtgatatttctcgtacctgtttttggcaataagagaaatatgactgtcctgcccggctccaggcagtcagacctaatggttatctcccttgttccctgaacattgctgttatccttttcttttttcaaggtgcccagatttcatattgttcaaacacacatgctttatgaacaatttgtgcagttaatgcaatcatcacaggggcctgaggcgacatacatcctcagtttatgaagatgacgggattaagagattaaagtaaagataggcataggaagttataagagtattgattggggaagtgataaatgtctatgaaatcttcacaatttatgttcagagattgcagtaaagagaggcgtaagaaattataaaagtattaatttggagaactaataaatgtccatgaaatcttcacaatttatattcttctgtcatgacttcagcaggtccctccgttcggggtccctgacttcacgcaacactttcctatttatatttccaacttgtgtttttttatggtgatatttgggaatattcaaaaacgatgctgctaccaccatcttcttcgcagaatttttctgcaaactatagaccaaggggcaaattctgcctgccacttgtttttgtacagtctttaacctaagaatggtttttgtgcttctaaatagttgggaaaaaaatgtaagaatactatttcatggcacatgaaattaagatttcagtgtcatacagtttcgttggccaggcccattcatttatatattgtctgtggctgctttcatgctacaacagcagagttgttttataggcacagagactatatggcccccgaagctgaaaatacttcttatctagccattttcaggaaaagttagtcaaccctggtcccctataatatagtttttagtggctaaataatattccattgtgtgcacatattataatgtacttaacaaaattcctattggcatttggatgaatcctaaatttcattgtataggcatcatttcacagctaagtataagcatatgtattaatattttattactgtcttaggataaattgttacaagccaaattgcatgatcaagggggagggtatatgtattttaaactctttgactgatacaggctgagtattcctaatctgaaaatctaaaatccgaaatgctcccaaatctgaaactttctaacatgacgttcaaaggaaatgttcattgcaacatttggaatttcagatttttgcgttagtgatgctcagctggtaagtatatagtgcaaatattccaaaagctgaaacacttctggtcccaagcattttgcataagggatattctacctgtattgacaaattgtcatccagaaaggttgtacaaattaaattcccattaaggaaactggctaaataagttatggtgcattcatgcaatgaaatattatgtagaggttaaaatgaggtagatcacttttactgatgtataaaaatataacatacactgttaggtgaaacacccaggttacatatggagagtatgattcctttgtgttaaggaaactggggcattaaaatgcacaaacaaattttttcataagaagcatagattacaactaagttgtgccagttcatatacctaccagcagtatgttcgactggttgtttgaccatacttttgccaatatgatattacctaattttaaaattcttgccaagttaatagatgagaaaagagcgtcttaattttacagtcaggttttgtactttttcccaagtttattggcttgaattaattcttttgtgaaattcttgttccacgtccatttttccttgttgtattcatcttttggtggtttgtaaagctctttacgtattagatattaaccctctggcttcttatccatgttttcctttgtattgtatttagggtgattaatgatgtacaaaaggtttttccttttttatgcagtcaaatcttcctgtatttttaggtgtaaagagccctttccaccttagatttatatagttgttcctctacatatttttctagtacttatttgattttttttaacattgagatctttaatccatcagggatttattcatgtaggctatgaggtagggtttagcattgttttcaaatgcttatattacccacttgtcttagtgtcatttattaaataagccattttttcaaggttatataattttttcaaattgtttttattagaaatctatacatttcacatgttttaaaatcaagtttgaggtgtaatttacaataaaatttactcttttttgagtgttcagttagaagaatgttagcaaatatatgcaattttgtaaccactgctccattaaaaatatagaatatttccatcatctcctaaaagttatcttgtagtcctttgcagtcaaccccctctgttaatcgccttgcaaacactgatcagttttctgtccctaaagtcttacaagatgtcctataaatgaaatcacacagtacatagctttttgagtttggcttcttttactcagcataatgtgtttaagagacatccacactgtggtgtgtgtcagtagttcatttccttttattgctgagcagtattctataatatggttgtaaccacagtttatttaaccattcacttgttcaaggacatcagagttgtatctagtttttaatctattattagtgaaaatgctataaacattcatgtagaagtctttgtgtgacatgttttcatttctcttgggtaaatacctgggagtgggatttctgggtcatgtggtaagtgtatgtgttattttataaccaagtgtcagactgttttccataatgattgcactatcttatttttaccaacaatacatagagatctagtttctctgcgttcttatgagcgcttggaattgtcggtatttttaattttagccattctagtaggtgtgtcagggttatataatttgtttagaataatttgcatattttgagcagtgtttcccaactcatcccctcatctcttaacttgcccagtccatcttcagttgcacaacctgaggcagctcttgtttctgtttttcttctttccatttcttttctaagaacatctgtgcagaaaacgagcttagacataacctaatgcagggtttggtagacttttttctgtaaagggccagataataaatgattttgtttttgcaagccattcagtctctgtcacaactcaactctgccattataacatgaatgcaggtgaaggcaatatgaaacaaagaccagcattcagccggatttgacctgtggaccatagtttgctgacccctggtttagtataacaactttattttacagatgagaggaccgagctcatgtttcaccctttcctctgatttacaagtaaaagtaaaaaaaaggcaaggaccaggatattggcttttaccataagagacatgcttgaattgggttcaagataagtgtgctttatgtgtaatttcctgttctagcaaatgatgttagatgaagctcttaatatagggtctttcggcaatttcgattgcagtaagactttaggaacatcttatgttttaccattcatctcaatgctacttgactttttgaacctattatgtctctggagcaatgagcattaagaaaataaaggtaataaaggtctcagcaaaacagttggagtaagaacggcatgacatccttttattcttcttaatagattttatttccagtggtggaaatgtccaaatttgtttatttctggagatagtcattgtacatcatgtaactatctcatgattcccacctccatttaatattaattcctgattgttctgtttcattaatcattcagatagataaagattcttaggtcaaaaaaaaaaaaaaaacaggaaatcatacccctacggttccatccacacaaacctaaaaataagcattggcactaagtactcagggaaagaacactgtttagatatgtcattgtgtatgtgtttttttcctcccttctagcactggaagaagtacgacatctatgagaagcaaaccaaggaggaaaccgactctgtagtgctgatagaaaacctgaagaaagcctctcagtgatggagataatttatttttaccttcactgtgaccttgagaagattcttcccattctccatttgttatctgggaacttattaaatggaaactgaaactactgcaccatttaaaaacaggcagctcataagagccacaggtctttatgttgagtcgcgcaccgaaaaactaaaaataatgggcgctttggagaagagtgtggagtcattctcattgaattataaaagccagcaggcttcaaactaggggacaaagcaaaaagtgatgatagtggtggagttaatcttatcaagagttgtgacaacttcctgagggatctatacttgctttgtgttctttgtgtcaacatgaacaaattttatttgtaggggaactcatttggggtgcaaatgctaatgtcaaacttgagtcacaaagaacatgtagaaaacaaaatggataaaatctgatatgtattgtttgggatcctattgaaccatgtttgtggctattaaaactcttttaacagtctgggctgggtccggtggctcacgcctgtaatcccagcaatttgggagtccgaggcgggcggatcactcgaggtcaggagttccagaccagcctgaccaaaatggtgaaacctcctctctactaaaactacaaaaattaactgggtgtggtggcgcgtgcctgtaatcccagctactcgggaagctgaggcaggtgaattgtttgaacctgggaggtggaggttgcagtgagcagagatcacaccactgcactctagcctgggtgacagagcaagactctgtctaaaaaacaaaacaaaacaaaacaaaacaaaaaaacctcttaatattctggagtcatcattcccttcgacagcattttcctctgctttgaaagccccagaaatcagtgttggccatgatgacaactacagaaaaaccagaggcagcttctttgccaagacctttcaaagccattttaggctgttaggggcagtggaggtagaatgactccttgggtattagagtttcaaccatgaagtctctaacaatgtattttcttcacctctgctactcaagtagcatttactgtgtctttggtttgtgctaggcccccgggtgtgaagcacagaccccttccaggggtttacagtctatttgagactcctcagttcttgccacttttttttttaatctccaccagtcatttttcagaccttttaactcctcaattccaacactgatttccccttttgcattctccctccttcccttccttgtagccttttgactttcattggaaattaggatgtaaatctgctcaggagacctggaggagcagaggataattagcatctcaggttaagtgtgagtaatctgagaaacaatgactaattcttgcatattttgtaacttccatgtgagggttttcagcattgatatttgtgcattttctaaacagagatgaggtggtatcttcacgtagaacattggtattcgcttgagaaaaaaagaatagttgaacctatttctctttctttacaagatgggtccaggattcctcttttctctgccataaatgattaattaaatagcttttgtgtcttacattggtagccagccagccaaggctctgtttatgcttttggggggcata

SEQ ID NO: 12581 - DNA, 6000 bp, Homo sapiens
caggcttacgaagtaagttggttttatccaaaactaaattcttcagtaagttaaatttatctgctctgtggatgagtcactggttttattttattttggtttgtttttttgcctttgaggtataaattccatgaaagggaatttaagcatattttgctcaaccagaaaatacactgaaacctataaatataattcacagcctttgaaacagcatttgaaaacagatatagaatcgtgcctcatcttactgtgggtgattttagtaaatagttctatttccctgctggctttcatttctttgcagtatgtgtcctgagctcagcactaaatgtgtatgctttcctccacaaatgagggttgtctcagttacattttgaggattttaaaacaattttgacatccctaaagtgcaacagatggtctattatttcacacctcccaacctttggatgtttgggaaagctatctgcctctgttccacatttctgggacacatgagcatatctagatagaatctgaattccatattttttccttagctaccaaaatgtgattggtaatttgataaatattgctactaagaaaaaaataacagaaatcctagctgacctttgtttttaaatgtgcacgtttttatttttcaagttcttttttaaaaaccttccattctggccaggcgtggtggctcatgcctgtaatcccagcactttgggaggccgaggcggcagatcacctgaggtcaggagttcaagaccagactggtcaacatggcgaaacccagtctctaccaaaattacaaaaattagctgggcacagtggcgtgcacctgtaatcccaactactcgggaggctgaggcaggagaattgcttgaattggggaggtggaggttgtgagcagagatcatgccactgcactccagcctgggtgacagagtgagactctgtatcaaaagaaaaaaaaaagaaaaagaaaaagccttccattctaaacaaacctttcagaaataatctatgacatcatataggctcccctgttaacaaagcccaccagttttgactacttaggtgcaacacgcagaaccttgagaggggaagctgtagtgaagctgtgtagacatgcaccacacacacctccctccccgtgcccccattccctgtgagtgaacctcatgtgaaaccagattgtataagaaatggacaggagagagtaggcagagtaggggtggcatctgggccagggaggagcatcctacggctttgtgttatgtcgtgtcagtgcatgtttctgacagactgtgcctgtgagatggggcacacaccccatgttgcccctcctctcccttccacattgcccaggctcgcctctcaaacattgtctccatttccaccatgccctgttaacccacataactgtgcagagaagtcagccagctctgttggttcaggcagtgaagcttggctcttggattccagagacccactcgctgtcaccaaaagccagaagaggtccacaacaaacctgtgtccttggaatgtagcgaaacacaacaggctccctagagcagctgtaacaaagtaccaaaaccgaatggcttaaacaatagaaacttatcatctcttatttctggaggctaaaatccaaagtcaagttgttggccgggtcagttccttctaggctgtgagggagaatctgctccaggcctctcttctaactcctggtggcttcctggctatcttggaccttccttgacttacagatgcatcactatgtatctctactttcatcttcacatggggttctacctgtgtgcatgcctacttccgtgtccaaatttctcctattcataaggacaccagtcatattgaatcagggcctaccttatttccaaacaagaccctatttccaaacaaggttacattcacaggtgctgggggttaggacttcaacatcttttggtggggggttggggagggacacaatttaacccataacaaccatcacacttaattttttttttttttttagacagagtctcactctgtcacccaggctggagtgcagtggcgcgatcttggctcactgcaacctctacctctcaggttcaagcgattcttatgcctcagcctcccaagtagctgggattacaggtgtgcaccaccacacccagctcatttttctgtattttttagtagagacgaggtttcgccatgtcagccaggctggtcttgaactcctgacctcaagtgatccactcaccttggcctcccaaagtgttgggattacaggcatgagccactgcacctggcccaaacgtaattttttatattatctttgttaactgctttttttagttataacactagcaagctcatggccaaatatccatacagtatggaatgtacaaaatgaaaaatcaaagttgccttcctcctacctgcagtcctcgaggcagtctttattataggctcactgtggatacttcctgatatattttattgcaaataaatatgtgtatatatggctttgttattgttttacacaaatgggattataataggcatattgtcccattacttgctttttttttcaattactgacacatcatggatacctttatatgtgagtatgttagatgtcttaccttctcttttcatggctacgtcctattccatttcatagctgtagcaaaattcatgtattcagtctcttatggatagatgtttcagtcatttccttttttgctattataaacaatacttatagtgaatattcttttacatataaacttacctaactatgtaaaagtatatagaatagattttaaaggtaaaatcactgggtcaaaaggcatgtgcattttaaaatttgatagatattgccccaaacctcaaacttaataaagacactagaaggtgctgaagagcccctgtggacctgtgaaggagccacagagcttgtgagtattgctgaattaagtgatagatactggttagatagacttactgtcctaactagattagacaggaagggatttgggctggttggtggatatgagtttgtttgtttgtttttgagatgggttctggctgtgttgcccaggttggcctcaaacttctgggctcaagcagtcctcctgccttagcctccccagtagctaggacaatagacatgtgccacccatacccagccgtttatttttcagttcacactttttttggtctttgagtatttaggggaatttctagcaacagcagattaaattcctttttagattttgtctaatagtcttctcagtctatttgatggtcttagacaaattcaaaattttcaaacagacatgggatttagaaagctggagaatatacttccctcaaggagcatcaatgacagactgttttatgctagatcaatgtgaatatttagaatgatcctttctctttaaagtcatttagaaaaaatgacttgttctgttttttaaaagtaatatatactcattataataaaatttcagataatacagaaacataaagaagaaaagacttttctatacacacattttttatttgccaatatgggactatgtattcctgattcttttcccttttgtagaaccttatttaagtatactattttggtcgtaatatttccatgagaaccaaagcttatggagctgcagtgagggcttgatatgtttctctgtaccccaaactgtattaggtggttggactacgtagcattcaccctgtgtcttcaccacatgtgaatcggtctgctcctgccacacactagactctaagcctcttgagggcagattgatacacacacagttatagctcaagggtaagtgccactacagggagagggccaagtataggatgccacgaaagcacacaggaaggacagctaacctagtcctagaagctcaaggaagacttcagagcaaaagtgataaaaggatgttagtcatttgaagggaaagaggggtcatgtagaaggacctgaaggtaagagaaagcacgaggagtctgggcagctgtcacacttcagtctggttggcagacaatggggcctttggtgtgggaggggcagattgtagcaggagaggaactaaggatgccaagtcacgctgtattttaagccaaggtatggactttagactttatcctgagggcagtgggctaccacttaagggttttaatgggggatcctcgaaaatactcctattggaaatgtctcttgaacttctcaaaaattcttaaatcttactttatttgcatttagaaccaggaacagttgaaagatgatgattctgatcttattctcaatgatggtgacatcagtttgacatatggagattctactgtgaacactgaaccggccacatccagcgccccaaggagatttatgggaaacagttctgaagatgccttggatcgggagcttgcatttggggaccatgaactggtcattcgaggaacacgcctggttcttccaatggatgattctgaacccccgctaaatttgttagataatacgagacatggtccagcctaagcttactaatactcacttagtgatttgtaaaatttgcacatgtgattgtgaagaaatttgtactacctaaaagtcccagtgcatgtctctgaatgtgtaagctatataaatgctatttatatggcatagaaagaatataaatatcctgtacacggcagattgtgaacaaactatattcctttaagttttcctggttgcactctgtagactggatctgttttaggaagttactttcacagtgatgttgtgtgttctgttagttttatgtctcagttaaagtgtaaaaagtgacggattttctctttcttaaacttacctgacacttaaccagagtaccagttctcgtgatgtgaattaatttttttgtgtgctaggggagggagagtgaggagggagtgttatttccttgggaacctagggaggagaggttcctttgttgggaaacttttgttgatagctgctgcctttgtcctgatcgttttctttcccttttctctggtggcctgttgtggtgcaacgagctgatggcatttgatcttgccccattcaggttggggagtgaagtgtgaggacccttttcccccgcttgctgtgaaagcacagattcattgactacagtacactgttgttcagaaaagaaggctgcaaatgacttctgagactttatgtcttttcttccagaccaagaccgtagaaggagtcacatctagccggcttagccaaagtacaggtgtatatagttcagggcacttgatttagatttggaggggctggggtgggcagagagcaagaggcgagtaaagagaatggtggtttcagagatctctcttcccaaatgtgtaaatattctataccagataagtttaaataagaaatttaattgctgcttaatttttgattatgtactttatctgtatagcaggctttgtcgtcagaagtttttatatcgatttaaattgctgctctttagcagccaaacaggagcaaaatgtaaaatttttgaacttactgtgtctaatcatcatttgttagtctgtagttaatgtcaacagttaatttatgaacccacgatcgttccacactgcaccaaagtcagtcataagagaaatcgaatattctggagcactgattgcagcagggtggctcctttgtgtgcagcaggtgtagtagtcttcattttcatggtacgttttaatattaattacctaagctgccatgcatttttttttttacagttctcaaggaagagcacagaacaatttctcatttcatatttggagtatgaaagtagattctattttgtaatgctgataatacctaaagatgcattgaatgcttggaagaatgctttttgatgttgattttgacctgttcatgattcagaagaaaaacaaacttttttggattttttttccctcaggtctgagtagcattgccttaaatct

SEQ ID NO: 12582 - DNA, 6000 bp, Homo sapiens
aagaaagccaagaagagaggacaggagaagcacaaaagattcccacgggaaggacaagaaaaaggtggttgtcagtgctgtgagaacgagttgaaaggcatgggaaatatggaaacagacaaattccaatgcagatccactagctggagaggtaattttgcgtctaattttgcacctctctcctcgcctccccgtctgctctccaccatcacgcttttcgacagtaagaaggatttggggttttgcagactctagcgggcatgaaaaggatagggggtggcaacgacttgaattaatgacgttctcctacaggatggaggggaaaatgacttagtgtcatcaaatgaactccctactcctggcataaatttatcaaactgcaactttatctcgaatactctggaagagtagaggagaggccctagagaaagcaagtcttgaggggaaacgcaatgctcttggcaaaaaccgcacctccctcttgaactacactgactcttttcacagagcgccttcctttaatagaatcacaaccacctggactactaataagaggaagaagaaaggagaaaagggaagggaggatggcaaaaatcacgctctagaagatccaggcaacgtcgtcgtgaagaataaagggaatcaaaatgggcactggaacgctgctaagggcttgctttgttaacacacttgcacaactcaagttcagctctatcttatgttgaaagtccttgtttacgatcctcgtaggaggttcttaaatatctgcctgcgaactcccaaagactgggcgcttactagttaggggaggcagctgtcccggagggtgtccagctcggatggctgactgctctttcacttgtcgttaacttccacccagtagtcttagtctccccttggacatggtaccgaccgtgtgccattcttatttcacttgaccgagcccgagctgcagcccagggtggaagccgcaagggctgggcagagttccaggcaagagggaccgagaggcgtgagcagtgctccgcagcgcttgtcagagaaatggagcagcggctcctttgtgggctcttacatccccgtcctgggtgcacagcccggatatttgatctgtggggtgattgataagtgagggagaggggggacgcgatccctccctccctcctccctccctcctccctcctcactccctcctccctcctccctccctcctccctcctccctcccttcttcccctctcctccctcccgctttacttccctcctccctctcgcctccctccctccttcctgcaagaagcgttgcccgttggctagctgctcggtggggatctgcctgccctgggggcgccgcccgcgctccccgcggtgctctcgctcctgggctgcgccagtccgaggcggtgccggctcctttgcctccccgagtcgcagatgctgcgggcgcctccgggaaaagatctgggcggcgcgctcgctcggtaagttctgagcactcagggacgcggtggcgacgcggccagtgagccggctttcctcagtccgttgcctttcccggccacctctccttgcgaggggcaccagcgtggggaggctgggcgccatccgcggagggcagctcgctggcggccgccctctaccctcaatccccactggagattcctcaccccgggaccgtccgcgcgggcgtggtcgggctccgcgcctcgcgcagcggggtggcacaggcggccagggagggcccacgcacccggcgcgagctagaagcctccggtcggcctgcagtgcccaagtcccatggcgagggcagcccgagtggccgtcgcggctgtaggtccgcatgccgggcaccgcaccaggcgtctagcaggtaggggcagggaaggtagggctgcgctggcggccggtgcccagttaccggcgatcggggacgctcggagacacctggtctcccggaagcgcccttcggaaatgggattcgacccggcttgcgggcggcgggtgtttagaagaagaggctgcgggcaagcagtgccccctctctggttccccggactcctcttagccccctcgtggcctgatgggcggccgggacggaggtgggctgtaagcccgccggcacccaccgtgtcctgtggaaggcttggagacctgagccaggctctactcggttagatgcgagtgagacaggcgacggagttcgtctttaagcctcccttgcctcagcaaggagagggagcgttttccttattttaatgaccgcctttccctcccttggggtcccagttcaccctgaacctttccacagccttaaaagcccgctctccctagcggagtgctgcggcagttcttcagaagacacggggccaaatgaaacttacttaaagtggttatcgcgtttcaggctgatttgttcctagtaactacgttttggaaagcagctgtggactctcaaggacaggcaggaacgaagacctccttagggtccgagtgtcgcttcccacagttagattacccatgaatttccttgattctgtaggtctcaagaatctcatgagcccccaaccacctccacctttctctctgaatctctctcctgtctctgaaattcttcgcaaaaataatctgtcctcaaggaatattgaaagcgtcatcaatgtcttgaaggaaattactgtatctgagaaccgaaactagtatttgatgtttcactttcaaatacatttttttttaataaaaaggatacctttaagtaaaacactaccactgctatttacgtttaagtagatttttaattcatattaagcagtagtgtgctttttggaaagatgatggactgggactcataatccctgggttttgtttctatttgtagtttcttgagtaagtcagcactttccctggttaagaaatgacctcatctgtaaaatgaacctgacttctaaggtcttgttcggctctcacgtctttacttcagttaaatattgacataatacatgtttgttgaatgaatgactgaatgaataaatcttattgctctaggaactatgtgcttttaacctttggaaatacatagaaacaaatgcctcctttgctaggaaagggagcttaattgtgctcccactgcatcagactgcttccatctaatgatgcaattgcaatacagggtgggaggccatccacagggctgtccctctgcctcagagctcatctcaagtttgcccttctctatggagaaggaaaatttgagtctccagaaggaaagtattttgctaaacgccaagcaagaattagagggtaagggggcttctgatgcctggtccaaggctcttagaagaagaagaaggagaaagggagaaagctcaagaaaataatgcacagatcaccagctacaggtggccctagtgcctaagtttataaactacccccgcccttcccggagagaaaggagcttgtataaagggaacaatcctagaacctaggcttaacaaggaaggagaaggggagaagcaagggtcattctgttctcaagtggtttgttgtatctgtgtgtttatctattccacatttggccaggcagtgggactccgggaaagcaagctgaagtgttttgtgggacaggcacatcatttggtcaactccttttccctggttgattccctccttttcctgacccatctcccccttcctaccagaggcaaccaaggcctttccaggcaacagcagacattatttaccccttgcgaattgattccacaatggaagactcttgggtccaaggagctgtaagataattaaggagaaaacagataatgaaggcaaaaatccaacacctggccattagcaatgctctggaaaggctatttaaacccgcattggatatcagagctgggagggcccatacagtctacctacctgccttttgcagatggacacaggaagatccagaagctagtggcacatctagcaacagagccagatcagaacccaggtaagctcggtctcaggccaggattccttttccatctcctctctttctcaggagccagtcttcctgcaccagcttcctcttttctcctagctcccctgcccctgcagcctggagggctcaaccacccttcctttggctcccactcccagctgaggctcagcctggcagtgcttttctgacacccacttcttttctccttcctccaggcaagaagtgcacgtttaaacctcattatctggctaagtataaacctcagggagaaaaggggtttgtttttgtttttctcagtctataagctaacattgagctgactttcagagtccaggcaaatatgtttggtgggtcaccacccagaaaggaattctcttagcactgaatcagggctctgtatgtaaagtataaatcccctaagagaactcctcaccctcctacacagacacattggtgcatgcacacacaccccactctctgcacagagagcatctgagctaggagctggcaagtggggcaccagtcctgtagcaaagaggcacaccacacacacacacacacacacacacacacactctctctctctctctctctcactcacacacacacacacacacacacacacacgcttctcccttgcttgggaatctgggagaagaaccccccacccccacccctgccctccataggcattgtgtaggtgagagaaagagggaggagtgagagagaacacacagaggggcccaaggaggtgccaggccattagcagggcccctccttgagaaacccctctgcaggagcttctcctgccgccagccaggttggaggtggagtagttcagaatcaactgacgcagccgggaattgagctttgcaaagccacttgcaaggaagggaagcatctgcccaaccctcccccaccgcgcgccctggatcctctgcctgccccctcccccgtgacgtcaccctagtcctgtcccggggagcctgcaaagcctctcagattcaaactgctagacgcactgctgccaccgccaccgaattggaaacgcgcgcccaggctccgtcgtcgccttcgcccgccgaccgggccagccggctctccgacctccctacagaatcgcaccccagtccctccctggcagctcggcttccctcagctccaactcttctcttccgctcctgcctcctgtcggatttttaatttctgcgcacccccagtcaaattaaatcaaccaacaaaaagcagggcatcccccctggaagcagcgtcttattttaccttgttctcccacttcctgaagatgctaaactcctggtggactgcagaggagagggattcagtcttctcctgatgtgtgagtaacccccacctcgcactgtctttcccatctctatctctcctctacacctgccgccagccccctgattcctgattttcccaccccctttttgcgctttttttttttttcctaaagcgattgcgatttctgctgggagctcaagacgggcgagctgcccgagatctcttcgagataccccaggggaggaggagatgggcaggatttagtaggacaactcggttactaatgacttggcggctggctgcgaccccccgggaaatcaggtgcaagcatgtgtgttcccggggcgcgtgtgtgggtggcctcgggatgggggaatagggagcggagaaaagaaaccgctttggaaaatgcaatgatttcattctgccgtgttgctaaccccctcattctccctcgctcccactccgcctccttgctttaccatttttaatcgggcttccttgtttctttcttccctgcacccgcttcttccccctgcccccacctaaggtttgcctgtaggtacctgagttgacaccgaaggtgcctaaagatgctgagcggcgtttggttcctcagtgtgttaaccgtggccgggatcttacagacagagagtcgcaaaactgccaaagacatttgcaagatccgctgtctgtgcgaagaaaaggaaaacg

SEQ ID NO: 12583 - DNA, 6000 bp, Homo sapiens
ggagacccccagcacaggttctccccggtggcctgcgtgtcgtcacctgccttaggaggcgggaggtggcgggggtgggggaggtgggggaacacggggcagggcagagtggtttcagacacagcaggcccccgaagaatcaactgtccccacagcctccacggcgggctttcccccctacaaaggatgcaaatgtcctcgttccccagaaggaggagggctcctgagtccctttcccaggcggcccatggcacctgacgggacctcccctggggcagccgggaggaggcggtggggagaaaggcctctgcttcccggtgctctaggcgacctgctgccagccgacggcgtgctcatccaggccaatgacctcaagatcgacgagagctccctgacgggcgagtctgaccacgtgcgcaagtcagctgacaaagatcccatgctgctctcaggtgagggccaccctccgggccagcctggcaccaaggggcgtcagcagccgtgtggcccagcatcctgtccaggctgcctgctgggctcagcctccacctccaccagggccttccagcataaccttcaggttgggaatctgaagactccgcccgtcttgaggcctgatggtggcagctccagccacagggcgaggaagctggccctccaggcccgggagagtgctttgtgtcctgaatgggaagccccaagcggagaggcttgcaggggccagcacagcgctgtgcttctctcaatccagaccctcgacaatatccagtgggggtagtgttccctttccagaaggtttcagcatagtccggtgtttatcccagttggaaacgtagtgtgaaacgggacaggaaggctggaggccctaggtgggccctgtgggcctcggggtctcctccaagccagggaggaggcttcagcctagttttaaggtggacaccgcgtccctgcttccgggagaccctgggagacaggttgtgggcgctgaatgtgtctcccactgggtgatacaaattcctgtctcagtctctgtgttgctgttccaggcactcatgtcatggaaggttctggaagaatggtggtgaccgccgttggcgtgaattcccagacaggcatcatcttcacgctgcttggagctggcggagaggaggaagagaagaaagataagaaaggtagcgcagcagtgccgccagtccctggtgctggtggcggctccttccacgctgcccattctttctttgcgggccggtgccactgggggctcagggagagccagcccaagtgggtgggaggccgggccctctcttttgattctccgtggagactcctcttctgaggatatcccccctgagagccggcaggccaagggcccctccagtgccgtggacggggagtttccctgagaccaccatccccaaaggctccgggatcccatacctacctggacaggaatggcgttagagggacaggagctacggggagcctcatgcttaccctcagggcccgtgcccagtaaggtgccgaggatcccaggccagcgtgggaggcagccagggaggtgggggtcagaggtcagaggaggctgggacaggtgagggccgggcagcccaactgtgggtggtggccctgccctggggcttacaaagctaggcaagcccgagccaggagggcccattcctcgtcctgtggctggagctgccaccatcaggccctgcagcgggcggagtcctcagaccttctaacctgagtactattcagggaggccctgatggacaagattgaatggctgccacagccccttctggctgggcagccttgctctggcctggacttgccttctggcctctcctgcagccaaaacatggtagggagccacacccgcatgggaaagctctgcttcctgccagtgacctccagccagggccctggggccagtgcgcggggtgtgggggcgtgggggcgtggggcgggcagtcagggcccggggaaaaggtcagccctgagcccaaagctccctggaggcagcaaaggagtagctggatgaccctctgtggcctagaagcttcgacgagccctgcctcctggcagcctgggcctgtgtctccctgcaccggctcttctttgtggcaccaagtcctgtagggctcagtgcagtgtctcaccccagtgagtgccctgggggtgcgcaggcagatgggcagccctgggcctcgtctgggctgggctggagtccctaggcctctgtcctgggaagcccagctgcccctgcctgggctgcctcctcatgtcttgcacacaatggccctctcccatcgtccacgggaacccacgctcctctggagtctccagccgcccttctcaggctgctcaccttctctgtaccttaaatgagtgtgtccttcctaactgttccaggcctctcctttcttttttaaattgacaagaccattcagcccctcccaggccccacctggccctcctctccagcaccctcaggctgtcctacttaggagtcagagctagagggcttcctggaggaagagaaccctgagggggccctggagggagagcagcagctggccagctgggtagagggtaccagcaagaccagggggctccctgctcgccctccccgtctctcccgccccatccccattgtttggcgcagcctgccaggtacacgcttaggatacttgccttctacctgcacccaaccccctatttcttgtctcttgaccttgactcctatgcacctttctccaagtgtgcttctcctcctcaccttccccccactcctgtctcttctggcggggcccagccctcctcttccagcaatgctcatcccagacttccccctgcctccctcctccagaggcctcccagggcctgtgtgcaggctgggtccagagtccatgcttccttcgggcccccacggccccaaggctctgccatctcccctgctgtgctgtgcggtcatcgcactgccatcttgtgtccgtgggggtctcccctccctgcaagaagggccctctgtgcccacaggaaccctgggcggagagggcctgatcaatgccccacccctggctgagtagggtcggggggggggccctccctgctccctggggaccccggatcccaaccccaactgcctgggagtgcagatgtggcccccaggaagctcctctaactgcagctctcagaaggggtgactgtgcccaccacctgagcccctggatagggccacttggggcccagcctggccttgcagggctgctgtgtgccggggctcaggctggcactcctgtgctgcagccctgggttgaccaatgacctgaaagcgccccgcagagtcctagcgtctcattcctttgtccctttaaaacacacactggggccaggcacagtggctcatgcctgtaatcccaacactttgagaggtcaaggcaggtgaatcacttgaggtcaggagttggagaccagcctggccaacatggcgaaaccccgtctctattaaaagtacaaaaattaactgggcgtggtggtgtacacctgtagtcccagctacttgggaggctgaggcaggaggatcgcttaaacctgggaggtggaggttgcagtgctcaaacacacacacactgagctaactgctggacgtgactgcagggaaaaccaatccctaggcaagggcagctgggtgctgtctgcctggcttccaggggttaggagccatctaagtgaaccccttgagctggtttgcagggagcagacgtcccgacttggggaggttccagcttccgggaacctcccactgccagccatgtgtgacccagggcccttccaaggctggctttaggggttcactgtagggctgagcttaaggccgaaggggagccctgggcagaggtctggctcaggaatgccagtgttcatggtgaccgtgtgctgggaggtggtgacggggtgagcctggagaggacggggcatgaagaaggccaccagcaatcaggcccctcctccccaccccctctgccacgcggcccccaggctggtgtcctcaagccttcgtgtctgtcatccctcttccattgtaggcaagcagcaggatggggccatggagagtagccagaccaaaggtaacgggcgccgctgcttgggcacaacaagcttggagccctgggggtggggctggtggagggcacagtgttgggggaggttcacctgcctcggtggcaggagcaacacttggagaccaggtgagtgggctggctgcacagtcccgtcccagtgcagagggaggagagagcacacccctggggctgctcagggcatcctggccacagacactgctggcagctcagcccagccacctagaggagaccttagcccagcatgggcataaggatcacctgtgagtgggcgccccgagtccactctggccagatgagaaaactgaggcccagaagggctgactcacctgaagctctgggtcccagtcagtgtgtttcccaggccagcttcctttcagccaagcctgaggacctgggagacagagtggtcggctgagggccagaggcccggctctcctctcagccccggacagctggcaggtgccgacaccctggggccagcatgagcctggctgtgagacgcaggaagcaggagaaggggtgggaggagcggggaggaggccagccgtggcccacggaggacaggagatgtcggccaatgcagcagccagctctaggtgctggagtccatggggaacaaggcaggtcctgaccctcaggaaggtcacaggcagagatgacccaggcaacgccctgtgcggagctgggtttgggagggcagtggggggacagcccgatggctgcagccctgggttgaggaggtggcagcaggtggggcacaaagctggaggggcccagctgggtggggcaattgtgtcctgacgccactgggaagaggagccgtggcgaatggccttgggctggcaagtgaggaggagcaggaggaggcagaggtgatggcggtagtgccaagagccccagtggatcggggaccagagtagtgagggagaaagacgagtctgctctccccaggtcgctgcgtcggtcccggggcagaagagggaggtggggtggccaggattactctgggccgtggagtgggtgcggccagagcttggcagggagggagatgaggaagtgacagaagcagaggagtggggagaggagggagccggagtgggggacacaccaccaccatgtcgagggcagcaaggatgaggagcacaggacccaccagggaagaagggagaggagccgtctgctccaggggagaggcagggagggtgctggagggacagatggagcccgaacaggcgcagggctggctggtgggaggagagtgcatggggcttctgggcctccctaagggaggtaggaggtggctcggacaccagtaagcagatgagtcagctcagggttctggaagattcctcgggccacaggcctctgctctcaggtattatttggggcattccaggaccagtcaccctgtctgtgtgcccaaaagccttgtgctgtgtctgtcctcccttctcccgagagaaccatctctgtcccacctagaacagtgctggagccaccccacccaccccaagagggcctgggcttaggaggcgagagaagggaagctgatagacttggaaataggagagctccactgaatcccgtctcctctctatggtgtggcatgtctttcccccacaaaagccccttataacgccttctccccagccaggcactgaccttggccatggggttcctctgtgtgcagctaagaagcaggatggtgcagtggccatggagatgcagcccctgaagagcgcggagggtggggagatggaggagcgggagaagaagaaagccaacgcacccaaaaaggagaagtctgtccttcaggggaagctcacaaagctagccgtgcagatcgggaaag

SEQ ID NO: 12584 - DNA, 6000 bp, Homo sapiens
ttcgcttttgttgcccaggctggagtgcaatggctcgatcttggctcaccgcaacctcggcctcctgggttcaagcgagtctcctgcctcagcctcccaagtagctgggattacaagcatgggccaccatgctcggctaatttttttgtatttttagtagagacagagtttctccatgttggtcaggctggtctcgaactcctgacctcaggtgatccacccacctcggcctcccaaagtgctgggattacaggcgtgagccaccatgcccagcgcctcctatgctttcattcaaaggaagtaaaagcaagagaaagcaagtccaggggaagtaaagcaaggaaacgaaatcagccgggcacagtggctcacgcctgtaatcctagcactttgggaggccaaggcaggtggatcaggagttccagatcagcctggccaacatggtgaaaccctgtgtctggtaaagatacaaaaattagtcaggcgtggtggtgggtgcctgtagtcccagcttcttgggaggctgaggcaggagaactgcttgaaccagggaggcggaggttgcagtgagccaagattgtgccactatactccagcctgggtgacagagccagactctgcctcaaaaaaagaaatcaaagctaaaaagactggaatagaagaaacaaaatggtcattacttgcagatgataggattgtgtacgcagaaaatcaaaaagaatccacaaagagaacccaaacataattattagacttaatatgagagtttacaaggttacttgatacatagaaatccattgtttttctatgtaccagcaacacacagtctgaatgggaattcaaaagaaggtagccaggcgcagtggctcacaggctcacgggccagcactttgggaagccaaggcgggagggccgcttgagtccaggagtttgagaccagcctgggcaacatagcgagaccctgtctctacaaaaaaattacaaaattagccaggcactgtggcgcctgcctgtagtcccaggtgtttgggaggctaaggtgggaggatcacttgagcccaggaggcttcagtgagccatgattgcgccaatgcaccccagcctgcacgacagagcgagaccccgtctcaaaaaaagaaatcagattgataaatgctatgatattaaaattaagactttctgtttatcacatgatacatcagcaaactgagaagacaagtaacaggtaggccgaagacatacaccccagggattggtgtggaaaatacagaacacctgcaaagtgtaagccaagacatgcacgggcatttgacagaagaaatgaaaagtgctgcaatatggccggtggtcaaggaatgccgattcaaaacccagcagggcaccatttcacacccactgtatgcgcagaaactctcaagtctgctctctggtgtacgtgaagacgtggtgcagcagtggcagtgggggtgtccgctgggatgccagcatggagagctacgtcttcagcccagcaaacgtgaagcccacgtcccactgacccaacgagtccccttccagcattgagaagcctggcacacagcaaggagacgacaccagatcagttgacgctgccttcccatcccttggtgaggggacccggccattgcaggataaatccagcacgactcccctgacataagatgttccggttccccaaaccagcctagatcctttctggttacaccagcttcagaccaggggctgccatagccacgcctcttatctgctcagaaagcgtagaaggtgcatatgcaggccatatacacacatatttatgaaaatggtgctgcctgtggatggatttattttcttttttctttctttcttttcttttttttttaaagacagagtcttgcactgtcacccaggctagagtgcaatggcaccatcacggctcactgcaggcaccaactcccaggctcaggcgatcctcccacttcagcctcccaagtagctgggactacaggctcgcaccaccatgcctggctaatttttaaatttttttatagagatgggggtctcactatgttgcccatgctggtctagaactcctgggcccaagtgatcctgctgccttaggctcccaaagtgctgggattacaggcgggagccacgacgcccagcctgatttattttcttctgtggaaaggaaggagaaacccattccccatgccagattgcaggcgtctgtctcatccggggccagcaaggacatgtgtgtgtgtgttggggtaggcatggggggaaggacagggagagggagagaggccagctggctcccccaagcctcccctcctggagcttctaaatccctccctggctccttcaaggctgcctggccttcctgttggggagagacccctcgccggctgctcactcgctttttggtggtccttcccacgggcctgcctggtctgcctccacatcctcagcggctgcaggtgagaagctgtggatctggggcccagtggtccagagcgtggcccgtgccagaatgcccaggttcaaatcccatctctgtggaatgcactctgaagaaacgacgtcaggtcatggccctgggcaagttacccacctctgtgccccatttctctccatgcaggttggaaagaatgacacagctgctcagggaagcacccataccccgagtctgctgggcctttgagctccagggccaacacctggccctataccctggccgcccccagggctccagccacctgagccaagcttctcacccccaggcctccccagccccatcaccatttcctcctccctcatgggcccctcagtcttaccgtcctcccacttccgccagcccctctgtggatggccctgccacagggggaacagtgccccagcagaaaagccccagggtcgcctggattctcctgccttcgcctcctgccctgggtccaacgcacagtcttcagaatgctgcctccccagagcgcctctagaacgcgcccgcctctctccatgcccatgaccaccactggaccaggcctccccacattctctgccccagtgccaccagcttgcagttgcccatggcgagacaagttcaagttctcaagcctggccacaaagaccccacctgatttgctgacctccgccacaccctgggagacggcccttgaccaaccttgtgttccagtcggtgggaaacactggtttttcctcaacgccacgtgggcatgtcacgtccaggcctggcctggggtaggcctcagctccatctcctgcccaacgcctgccaaggttcatggttcaaggtcatgtagcctgacggttaagtgaaggggccctgtgattgactcagccttgccacatactagctgtgtgactttattcaagtttcctaacctcctgtgcctcagtttcccaacctgtgtttgtttctggatggtgccagtgccaagcccaagcctggcatccagtaggtgcttcgtgccaggttatggaatgcccacccaataggagggcgctgccgtctctcacctgccaggtgcccacggtcagtactccatcatgcccgctgcggccagcagagggcagcaacatcctgccctgtgccattgggcaaaggggcgggcggagagaggctgggctgcctggccgggcttgttgggatgagtcggactgggcacgattgcattgtggggagggaggctggggctctgtgagacgtgctcctggcaccgccagctgctacttggccctcgccggtggcccaccaggtaggcaagagctggggcaggcttgggcttgggcttggggtgcaggggctaccagcctcagggcaaggcatcagggtctcagggccaactggctggggtcaggcaagagcgctcgggtgtcggcccagcctgacgacggcactaggtgtctgggagcacggtgtcccccaagtggtagccctggggttaggaggtggggaaccatgtttcttccccgaaatgggaaagccaacgccagcctcgggcagggtacagggtagagaggctgcccgcctggctccccacccccacagccacccaactggcccagccaggtgacagcagcccactgccaccttgccctggagcctactgctgccgtgctgtgggggaggcagagaccccatccccagtgcacctgctcctgtgccactggccagggtggcctgtgagggtgacagggggtctagctgctaggtgcccctcccttccccatcccctgcatggatggcatctaggccagcaggacggtgcttcagagggtggggtggacagccccggcctgtggaccctctgcctcagcccatctcaagcagcctcctcccgtggtcctgctcgctgccaccatgctgtacctggcaccacttcaccagtccccaggggcagggctgggctgggggtgtggaggaagatcttttggacaaaggcaggcattgagggccaggactggcacttcacccaggccccaaggctaccagccggcatttgcaggggctccaaggtccaccccgtgcccttcacagggacccggggagccagggaggggcatgcttagtgacacaggggttgcagggccagagggggagggctggctggaggaaaccccggccctttgtccccggatcccgggggtggctccctgagggtgggaagtggcaaggagccccctgtccagaacagcccagtgggggtgacagcactagcgagtggggccctggcctggcctctggacagagggaacattgttgtggtggaggcagggctgccttggcctggccactattgacaaagctgccagctgtgagggagcccggtcgctaggccctgggcgccacccccaccgccgcccctccttccccaggccagctcgaatggggctgagcctcgactgtctccctcccactcaggacaatgcccccccgcagccatctcatgcccatcgccactgccctggggcagctgaactgagcgtatgtgccacgccgcccaggagacccctctgctgcaccacttcatggtaagtgcccaggcccggtgtccccagaaatgttcctgggaggggcagggtagggcaggatggctgtggccaggcccaggacatacaggctgcagcctccctcatggcagacactgccccagatagcccggggtccgcaggaagtgtccgtgctcttcctgcctgtgttcctgagataagcggctcctgggccttcctccaggcgctgctctgccctgagtcgcagcggccccactcctggtcggcatgtgaccacacacccagggcagcatctctctgtggagggcaggaggggccagagaaggggctgctcccacctctcaccctcgggggctcaccccggggtcccaccaggcacacccaggaaccatctccagtctggcacccctccctgccccttccctgacccctcccccagccagctctcctggtctgctcttctcctgggacactcctacactgaggccccctgtgccaggccctgagagacccaaactgctggggcccatggggcaggagcaggcctccccgcacccctgaagcctgtgttgtctcttgacacccctggcttctcccagcacccccgctgccttgccccagtgcttcctcgccctggagctgggcgccagcatggagctcacccctgcctcttcgctgacttgctccttgctcagcccgcggctgcctggctctttcccccagctgcggagggttcctccttgcagccggccctggctgcccaaggcaggttttctctccctgtctggtcccttggggcacacggtggcctcactcctctcacctgacttagatctctcttgtctgggtggtgggcgcaggggcgcgctgtgacacagcttccgccagccttccagctcccgcggcctccctccctcccctgccctctctccatccctgccccctctgtgactcacagtccctctg

SEQ ID NO: 12585 - DNA, 6000 bp, Homo sapiens
gcgtggacctccccctcagctggggtgcggaggctcagcctgggggcccagttgcccctggtccccaagcagcagccccctctgcctccagggtgggcctggagcaggaggggggcctctgcccgggggccgggctctctggggccgccgtcgcgccgccccctccccgcaccgcataccttgcccacagccgagcagctgggaggctatttataaaggcgggtgagatcagcggccggccaaggctataaattcgcaggccgcggccgggccccacaggagcagccgcccggggcaccggagctgcgggctgcgtggccgggatgagcgccagcacgggcggtggtggggacagcggcggcagcggcggcagtagcagcaggtagggctcggctggggcacccggagcccctggcgtctctcatgcccactgccactcaccccacccgcagctcacaggcctcctgcgggcccgagtcctcgggctccgaactagccctggccacaccggtgcctcagatgctgcagggccttctgggctccgacgacgaggaacaggaagaccccaaagactactgcaagggtgagacttggccttggggacatgcggcctcacggccactgcagggacccagggcagtcctgggcccacatgggccagatggtcaatggggccgaggtgttcgggggcccaggggagtgagaaccccctccaccccaatctacatctcccctgggcaggcggctaccaccctgtgaagatcggcgacgtgttcaatgggcggtaccacgtggtgcgcaaactgggctggggccacttctccaccgtctggctctgctgggacatccagtgagtgcctccttcgcctccggggcccagcactggctgggatcctgtccctgggcttgcttggggccaccctgatccccgccgtgggtcctgccagggccacagcctacaagggtctcggtattgcaggcgcaagcgctttgtggccctcaaagtggtgaagagtgcggggcattacacggagacagctgtggatgagatcaagctcctgaaatgtgtgaggcacctccctaccccactcccagctcccctggagctgcctggggcctggcaatgcgggtgcaaggcctgccggggctctgtggggcagggcggggctccctgaggggcagcctccagctggctgtgcccaagggggaggatctggaggaacaggcgagggacaggaggggttggcggcctttcttccagcagggcccagctggagcaggagaagggtacactgaagggagctgtgggcttcagggcagggtggaaccatctgtggccccttggcttttgctccaggtccgggacagcgaccccagtgaccccaaaagagagaccattgtccagctcattgatgacttcaggatctcaggagtcaatggagtccgtatcctttgcaggaagagcaaagcagtgtggcagccaagggccggcaaatgggggggccctcgctgctagagcctgtctgcagacccgcacaatgggcttgcatccctcccagtaacgggagcctctggcacgaccccgcccccaggtaactgtgtttacgtggaggcagtaacaagctagcgttgattgtccatggacgttgctattatccccaaacggcaggtgctgtctctgtggcactgccttccctttgggggactgccaagaggccctatggcataactagcatgggagtgggctggcccgagaggcctctgtgcctgctcctccagcgccacctctaggatgaccacaaaatgcaccatcccaactggcatacctgttgagactgacagggacactatcgatgatgacaccagcataatggtgaccaggactgcccaggggaggccctgcctccccacctccacacggcccaagccttgctgctcccctagctgagggtgggtggggcctgtgccgcagctggtgtccactggccgcccttcactcccagcccagatgtgtgcatggtgctggaggtgctgggccaccagctcctcaaatggatcatcaagtccaactaccagggcctgcccgtgccctgcgtgaagagcatcgtgaggcaggtgagtgccacccactgggctgcccagcctggcctgggcgggagttggaggaggtcaggtgcgactctctgcaggtgctgcacggcctggactacctccacaccaagtgcaagatcatccacacggacatcaagcccgagaacatcttgctgtgtgtgggggacgcttacatcaggcgcctggctgccgaggccacggagtggcaacaggcaggggcgccgcccccctcccgctccataggtaccaagggcccacatggggctgggtcggggcctctgggcctgaacccctgcctgagtctctgttcctccctgtccccccccaccgctccccacctgcactcccagtcagcactgccccccaggaggtcttggtaagttggggggcccctctctcccatgcctcctctcccatctgagccaactggaggccatctctggagccacagtggctccaccccccaccttcacgcactcccacggtggtaatcccgaaaggctgggtggctgggctgacggtaattcccggggggggtcaagtgccccaaactgctcttggtgaaaggatgctgtcttccccgaatggccacttccgcctgccttagcttgggctgagaggggacagagagcaccctgaggcgggccggccaggtcttcccactcctaatggagctgtggggagtggggccacaggcggggaggcagggagagtagtgagtagctggtgccaaggggcgctggcgccacattctggtgtccatgggagccctggggcccggagaggcctcttccctggcggctgtgcagggaaacctccacttcatgctgactggggcgggcgacaggaaccctggggtgaccctggctctgacagcagaccggtaagctgtccaaaaacaagaggaagaagatgaggcgcaaacggaaacagcagaagcggctgctggaggagcggctgcgggacctgcagaggctggaggccatggaggctgccacccaggctgagggtgaggggccacagagggtgatgggccgtggagcgcagcaaaggctgcaagacatctgctcagcagctgcctccaccccgtctccccagactctggcttgagactagacgggggcagcggctccacatcctcttcaggctgtcaccccgggggcgccagagcaggtccctccccagcctcttcctcccccgccccagggggcggccgtagcctcagcgcgggctcacagacctcaggcttctccggctccctcttctctcctgcctcctgctccatcctctccggctcgtccaatcagcgagagaccgggggcctcctgtcgcctagcagtaagttgggtggcaagtggtgggcaggcagggctggcagtagtcggaccacttcagtctccctgctctgccttccccagcaccattcggtgcctcgaacctcctggtgaaccccctggagccccaaaatgcagataagatcaagatcaagatcgcagacctgggcaacgcctgctgggtggtatgagcaagtgtgggagagcagagtggggggccctgctccaagggtggaggcacagggccgctcttggggagccctaccccagtctgcagtgcacgtgaaccgtcggctgggtgggcactggtcctgcccagtcaacagcactggggccatggccaagggcaggggccactaggaagggatcagcctcagcctcacatcactgggcctgtccctcttggaggacctggggaccccgaggctcacagcaaaccccactgagctcctcgggtaggcggatcggggtggggcaggagtccgtgggggcaggacagccttggccccagcccgtccccagggctccccttgcttccagcacaagcacttcacggaagacatccagactcggcagtaccgggccgtcgaggtgctgatcggcgccgaatacggccccccggcagacatctggagcacagcctgcatggtacgcccgcccgggctgccctgtgcccagggccagcagcccaccagccagcagcctcacctcctcccccttccaggccttcgagctggccactggtgactacctgttcgagccgcattctggagaagactacagtcgtgatgagggtaaggggtgagggctctgggctcagcctcccggcctcccggcctgcctgcccccaacctcctctttctgcccacagaccacatcgctcacatagtggagcttctgggggacatccccccagccttcgccctctcaggccgctattcccgggagttcttcaaccggagaggtgagggcccgggcagcctcaggccatgtggctgcagggagggtgggacggggaccttggattctgcaacagagggaacactgggtcccaggagccagggcctaagcagaaggcaggtccagagacagggacagagcctgacgcccgctggcctgcccgcaggagagctgcggcacatccacaatctcaagcactggggcctgtacgaggtactcatggaaaagtacgagtggcccctagagcaggccacacagttcagcgcctttctgctgcccatgatggagtacatccccgaaaagcgggccagtgccgctgactgcctccagcacccctggctcaacccctaggcccggctgtggctccacctccagctctccgtgccttaagggaaaagcgggacagctcccaccaccctgctgggcgccagttctccacaaccacagggcagagagacgctggagccaggcccggctctcagagcgtgttctgcctgagacccccgtgagggctctcggagaaagtgtgtgtattcctttcttaataaagtgtggactgaacatcggtgcctggagtgagggaggcccacgccaagtctagggagaaggtgctttattctgggatctgcgtaccaggctggctggggtgctggagtgggaaggggaatccaaggagcaaaccaagaaggtcctagggccagcctaggcctccacggcccggccgttgatgacgcggatgtggcggatgacgtcctggatggcttcagatgttgtgccctggcccccgatgtccggagtgtgcatctgtaggacacaggcaggctcggcacacaccaggccctgccaccccccgctgtctcctgtgacgtgcaggactgggattgccacaggagggaagtggcaccagctaagggccagaagatggggccagatccagtaccatcctcccctgggggctgtggtcagtgcatgaggcgggctacaggaggctgcagggggagactgggcggggcagcagggtagggtgcgaggggaacctcacattctcattgtccatggatgccaggacagccttacggatggaggtggcataggagtgcagcctagaggatgggacagccagccttcagtccctggggcccggagggctggccaggggcttgcggggcactgggagccactcacttgaggtggtccagcatcatgcagctggccagcagggtggccgtggggttggcgatgttcttattggcgatactcttgccggtgttcctcgtagcctggggaggcaagacgaaggagagtgggtggagggcagaaggatgccgggcagtgactctgctcctgtgacacgtccagaagaagccactccacagggacaaaagcccaccagcgggtgccaggggttgggggaaggtgtggggacagatagcttatggggacaggctttcctcgtggggtggtgaaaatgttctggaatgacctggtggtgacggcagtacaaccctggatatccaaaaaactactaaatcatgcattttgaacgggctaaccggatgggatgagtgtgcctcactaagtctgtgaacaggag

SEQ ID NO: 12586 - DNA, 6000 bp, Homo sapiens
tttcctttttaagtttgctggattctcctgggatacagtgaagctccagtgaaaacctctctcctcagctagttaaggcctggaaatggccacttgggggtttccctaagcacccgaaactcagtgagcccccaagtgacctcgtctcccagtccccaactcagagagacccaaaagctacaatcttctttgactgtattgtcagacccacttcctctctccagctcaactgccactatcctagtcctagtctgaatcacatgtgacaatcatgactacaatcttttttttttttttttttttgagatggactctcactctgtcgcccaggatggagtgcagtggcgcgatctcggcccactgcaacctccgcctcgcgggttcaagtgattctcctgcctcagcctcccgtgtaactgggactacaggtgtgcaccaccatgcccagctaatttttgtattttcagtagagatggggtttcaccatgttgtgcaggatggtctcgatctcttgacctcatgattcgcccgcctcgggctcccaaagtgctgggattacaggcgtgagccacagcgcccggcccgttagggtgtctttgatgccacgcttcgctctgggttttctccttcctctttgattgctccttgtccgatctcttttctggacccttctcctcctgcccaatgtaagtgctgggtgttcccctagatgctatcctgagcccgcttcactcctcgttctaagggattacagtctcctctcacctgtatcagggagggtccatctgcaggaaaaagacaccacttttgcaattttaaggaaaaggattaaaacagggattggccgggtgcggcgatgcgcgcctgtagtcccacttttccggaggctgaggcgggaggatcgcttgagcccggggactcgagaccagcctggccaacatagctagaccccgtctctaaagaaaaaaaaaagacaaaagaagagaacaacaacaaaaaaaccaaaataaaaataaaaataaaaacggacgggcgaacgcgtcgggtgggcgtagggttccgcgaagcctccctgtccctcttgtctcgtcctagtcggtctagctgggccccatcccctttcccactcggagcgtgagcgcctggagacacgtacagccaaccagtgagaaggagtggccgcgagtggcatgcacttggtccaattacctgcggccctgccggtcggcccgcgctggggccaatggaggtgcgaggcggggctcgggcgggggcaacggtcacctgatctgcggctgtcgaggccgctgaggcagtggaggctgaggctatgatggcggccatggcgacggctcgagtgcggatggggccgcgatgcgcccaggcgctctggcgcatgccgtggctgccggtgtttttgtcgttggcggcggcggcggcggcggcagcggcggagcagcaggtcccgctggtgctgtggtcgagtgaccggtgagcgggccggggtgggatgcgctgtggcggctgaggcgccctcgcccgactccggcgctgtcctaggcgaggggtggtgaggcccggaggtggactgttccttgctcgggggctcgcagcgaatctgccggcgacagagctccagtccacatgcgcccccgtctgacagcacctcttctgtgccctgccagggacttgtgggctcctgcggccgacactcatgaaggccacatcaccagcgacttgcagctctctacctacttagatcccgccctggagctgggtcccaggaatgtgctgctgttcctgcaggacaaggtgcgcccgccccagcccactctcccccggtcatcgggaggcagccaggccccctccccccatgacactgacgcccattccccaagggaagcttcagtgaccttgtcccaactgtagggaggtgtgggtcgtctcatgggaaggcctgtagtaaacgcttcagtgggcatggcgacagcctcggaaatggcaccaacttgattggaggaagcgacggaccagaggccaggtacctactgagtaccaagcactttggatatctgacttagtccaatatggtgggtggggattatcgtccctgtttgtttatagatgagaagactgaggctggaggttaagtgacttgtccaagctcatacagctaatgggtggcagagttgtaattctagctgtgatgatcataataatgataattggaaaatgctcacctgtttagtgctttgtaggcacttgctacactgatgtcattatcttggtttcactgccaaggaaagtaaggtttgtcgagatacaatgtttcactacagttgatagataccactttggttccagcctgagtctgccaatcctccctcccaattggagctcataacccgcatgctgttttccttcccatccaggatctttgccccaaaagcaggcgtggagaccatgagatgactctaagatagcaagtctctgctaggccctcccttgttggtggcctgtatggctcattgcccttgtagtctcccttggttgctgtgtgggcagatggtggtggcctgaagtcttttcaggaggtggtaaataatatagtcaaataggaactgagtcctagttctaccatgtaaccagccattggaggcatgaaataatctttgtgaatgacagtttctacatctgtaaaatgaagacaccacctatatcagagggctgtgagtgggaaatcttttttttttttttttttgagacggagtctcgctctgttgcccaggctggaatgcagtggtgcaatgtcagctcagctcactgcaccctccgcctcccgggttcaagcagttctctgcctcagcctcccgagtagctaggattacagggcgcccgccactacacccagctaatttttgtatttttttgtatttttagtagagatggggtttcaccatgttggccaggctggtcttgaactcctgacctcgtgatccacccacctcagcctcccaaactgctgggattacaggcgtgagccaccgcgcccggcctgtgagggggaattcttataatccacataaaacatctagccaggatcccccagtcttagggcattcacccattcattcatttgcccaatatggaaagcctactatgtgccaggtattgtgaagtgttggggatatggcagtgagcagaagaacccaagcccccaccctcaggaagctgacattcttgtgagggtggccagtaaatactaagtcggtataggatatgatgtcagtgttacggcctttagggaaggaagcaggctaaggggacagagtgactgggatgctattttagataagggtggtcaggccaggcctcattgaggaggtgatatatgagcagcgatcttaatggagggagggagccgtttggggaaggacattcctggaacagcaaattcgagggtcctgggcgaggtgtgctcttggccagctcaaggaagagctggtgtggctggagcacagtgagtgagagaaaggggtaggagatgtaggagatggtttgcaggtggctaggcgatgaagtaggaccttgtaggccatgagggggaaggtcagttgcagttcgaaatgtgtgagaaagccttgggtaacgtggagcagggagtggtgtgatttctcaattaaagaaagcccacaggacccaccagcagttcctgggctttccgactgagaaccccggtggccaaacagcagcaaggtcctgcccacaagggaggggaggctgggcgagtgtgtataccaaacaggttagggaagctgattaaaatctcctcagggcctaactgggaagggccagaggaagctggggatgggagtggagggtaggagcaaaaggacaaaggacatctgtaggttgtggagaaaaagggatggggtcggggccactgtggtcctaagagctcaaaagacttcaatgctcgatgcttcctccagcatgttctgagatcctcacctctccccttccgccaaaagcaggtggggggagggtcccgtccagactggacatagccgactctccttttctctggctgggaggcctgccacaaatgctcttggctgccccaccccctccccgcagcttccctgttccctccccagttcctcttgtctgtagggtgggcaaggcggctgactcctactcctgagttaccacaagtcagctgcctgcagatctccccaccccatgactgccttccatgtcttctcaccctgccctgagagtgctggagggaagaggtgagtctcccaccccacccccaccaacacacagttgcgctccaccatactgaacctgactctcagtgagactttgctggccctgagaatgcacggggaaggtggctgtcccctgccttggcccccatcacttgccaaacctcctcagatgtctcccctatttccctaatagctgagcattgaggatttcacagcatatggcggtgtgtttggaaacaagcaggacagcgccttttctaacctagaggtgagagtcctctcccagccaggggccatgggggacattctgtgctccttctcccagcataagaactgtactctgacctcatatcagggttacttgggtctgagtctcttctgggtcaaccatcccccccaaaaacaacaacaacaacaaaagccacctcatactcttagggagcagagacgctggctttggggtagaaaggcctggggcctgaatgtcaggggctggggtgtgggccattttcttggtgagcctttatgggtatggcttgccagaggagagctgccagagaggtgtggggggctgggccaggcccactggcccctggctaactcaccttttgcctctcccctgtccccagaatgccctggacctggccccctcctcactggtgcttcctgccgtcgactggtatgcagtcagcactctgaccacttacctgcaggagaagctcggggccagccccttgcatgtggacctggccaccctgcgggagctgaagctcaatgccagcctccctgctctgctgctcattcgcctgccctacacagccaggtactgcccgcatggcccagccaccagcctcggggcccagagagcagcaaggccctgggctatggcatgtggtggcaccgtttggctaaagatgccagtactccccaccccctcacagcccttccagaaggtgccctgtgtggccagaagaggaggggagggcctcttctgtgactcaggagttggtgcctagcactgagctgggcctccagagatgaggcagatgtgagccctgcgggtggggagccttctcacctagccaggcccttgtcacagagcaggtggccaggacttgagtgtgactgagaagcctcggggtgggatgggcttccaggagggggcactgaggtaagagtgtgcaggcttggtgcgtggggctagtggggaggagaagctggggtcggggaagggtagtgggcagtgcaggtccaggccgcctgaggactctggcgctctgtttgtcttccatagctctggtctgatggcacccagggaagtcctcacaggcaacggtgagtagaatcagggaggatgcacgtcctcatctagcccttgggtgggggccacagagagagctggcctgcagttcctcggcctcctcactcccagggtggcccgcctgcttctcggggcagctggcagtggagcagggaaatgctggctcccaggaccagccagggaccacctgacagaagaccctgtccagccagaccccacttggcagaggggggcggctctctgtgctggaggctgtggagccagtttctgtgcaggcagcgtgaatcctagagttatgggtttaataagactgcagacatttggaaaaacaattctggggactcatctatttgcaataaaggacagtcactccccatggaaaggcagtcgtgaacctttcatggg

SEQ ID NO: 12587 - DNA, 6000 bp, Homo sapiens
ccagttcttgtaccaaactcagcttatatatctttcttggaaccctacagttttatttcattttatgactcccccagctcccacatttcaccatactccacaattagatttaaaatggaagcatgaagaatgatactcttatctcttccaggaattgtggatctaaacctctgtagctcctctgtctgtgttgcaatctggtggcccagttgttaaaaattggtgttttgggtcctatcctggtctcctgtaagggattttggattagggaaaatgataatttcataacatcttatattcactttttcttacaatcatgattccacctgtctaagatgctttctgacttttttctttttttgagggagggtctcattctgcaacccaggctggagtacagtggcacgatcatggctcactgcagcctcgacctctctggctcaagtgaccttcccccttcagcctcctgcactaccactcccagctagtttttaatttttttatagaaacagggtctcactatgttgccctatttttcaaattattttaaaaaactctcaatggagtcattcagatagaagtgaaaatgtgcttgcctgctctcttccaggtcacatatctcagggaagagatctggtacccaaccaatccacccacaagctaagccaagcattcagattttgcccaaactctccttcccaatcttactttatcatgctgccttatttagaagtgatgtctccccacatcaacttctcttcccttcactacccttcccttcctttttcctcccttccctttctccttttctctttctctctctgtgtctctcattcaggacttcatttgttgcatccattcttgcaacaatcttacaaatattttcttttctttccacgttggccctcttcaacttgttctccatattgccatcacagtgattgtcctaaaatataaatctgatcatttcttcccctctccctgcagaaaatatgttactggctttcccactgcctactggataaattccaccttttcagtatggcactcaaaattcttcacaattaggtctttaatcctttccttaccaccttcttttcatactcaatgtcatggcattccaaaccctccctatttctagatctccacacatacagtattgctatgatgtctttatccatggcttctttctcaacttcttgacccaatcagtgtctgtgtaccatttcttccctactcagaaagttcttcctttgcaaacccttctttaatcattttcacctccatgggtccctatgaattcatatgtattccttgtgcacaccttcttgtaatcatattttttctcatgcttttggctatcttgtccactagactgtatgctttctcaaaaataaatggatgagtttcactcacagatgcatgtcagtgcttaggactgcaccagtgctaaaaaaaaaacaaccctgaatttatgaataagtcaatgaattaatacattcttggcaaaacccatgactttctggcctactataaattactgtgttcaaggtgagattctgctttagtttaggatatagatatctatatatatgtccatatatctgcagctatatatccatatccatgtatatcactgatttggggaataagctatacttattaacaatattactatgttaatgggtcttcaatatctatacaataacggaaaaagtacatgcatatttctaaatatctatccaataattggaacacacacgtatgtatggatggatatatttttttttattattgggtatagatatctattaatagataagtgtatatttatgtacctatcttgttggtaaaaggtgcttttatacatattatttcatttagtctccacaagaaatccacaggaaaggtaattttaatctcagtttaacagattcacagaacataactgactttacaacaaggcaaagtttgtgaggatagagtcttaacatgaaaccaggtccccaaattggtgtctatcaccttccccattattggtcaggctgcccaaatatccttcacatcaccatggcaggcttcatgctttggtttactgcctaaagccgaagcaattaggaggatatcctatgtgttgcggacactatctttttccttccataaatgaattaatgggccatgaaataattttaagaaaagctaacttttctggccaagcagaagaataaaagtaatcaccatgtaatattgttgtgaagactacctggccccacacattaactcagctaatcattacagtattacacggtgattatctgttccattttacagatacagaaatggaggcaaacgattaaaatacacacctaaggtcacatgcatcttgaacccaagcaatctcattttaaaatccgtgttcattgtcacaacactctattatgccctctgatctttgcattgccaatttaaatccaactttctccaactcaactttaagtacaggggtcatacccccgtcctcgccccccgcaacttgaaactccctgggaaagataacctcctggaccctggaaatgaagaggcgtatttaaaaacaaatgcctcatcctgggcacaattccaacattttatcaaaatcatgaaagtataagaatagaagtaaacaaaaagctttcatcgatcccctctcaaccataccctgagcataaaacaggtcctgtactttacagaactgtattccaaattttgctgctcttaaaaattttttttatatcattgcttcccaaatgaattacaataacgcagacatagagactgctggagatcgtgaccttaaacagttaaagatgtttgcatatactgcagcatgtttggtgtggagggtatctagagagtcctaaaaaagcaaagaggaagaaggtttgctgtacgcgtctggtgcggtggcaccgtttgccatgcccacctgctctatctcccgagtacccgggatctctccgttacagctggtttgcattgggattagcagctctttgcatgaggttgtagctgtggatgtggtttctgtagtgatggggccgactccggagatctattggctgctggctttgtaaatttcattcagtttggtccaatggcagagggagagccccggagacagcaggacctctctcctcaatctctctttttcttgcagaaccgtctctctcccttctctgtctcttagcacagagctcttattcagccactagcttggcccttcctgcttcaattgtaatgcttgttctgcccgtccacagactattggcggcagaaacaacgaatttcctccaaactaggcggtgttggtggctcttgcattcctctggatgaggaaatctagttggggggttccagaaggggaaggctcctgggctttcaatacatcctcctgaatcatacctcgtttcgggttccctagaaaaatctggacgtgtaaaaagaactcttaacggccgatgcagctcttccaaagctaaggtaggtgcagttttaagacctgtctctgggacattattctcattttaaaaagccgtttaaacattttgacttgcagcaaaggatggaaagcctcactgcagatacttgagcttcacttcatctgatctttattttttccttttatgattattaatattatttttggaaaatttggacaggactttctcccatctgtctcgctgcatttcttaggtgtgggtgggagtgtagaccttcatacggtttttacatgcaacctctccacagaaatatttggttttattttcacttaaagagaaaaatccagaccaccgttgtttggaagcgttttgctgcaatcagctatttgaacggctctggggccgtgtgtgatgtgtttacaaagtagcgctgccttccacacaaataaacagaagactgtggcggggagaggaggaaaaaaatatatatgtatctgcagtacagggagaagaaggagagaagcggccagggctggagatggtgaaggcaggaagacttctgcaaactgtgaggcatgggaggcttttcttttctttttctctccccccccaccccccccccttattctttaagaaaactgtcagctaccaccgcctggggtgcttttttgaggggttgggggggtgctgttaaccagaaagaaaaagggaaaaccggcttggttggggtcgcatttaagcgattttttttccctccttcatctccgggcctcggataagatgacggcttgggtgatgcacgaaataacgcacgtgattgattagacctggcttggcttggctagggaacgatccaggcgcgctggagaccccgcgtgaagatgaaatgacggtagctccgggctgcttctgtaaaccggggagcgggctccatgcacccctttcccgtgtgtgtgggtttcgaggcgggtgggaagggtgaggcaagccgcagaaggagggtagagctggtggttttgcttctttcggagcctttgagtgtagtctgaacctttgaggggggcgcgggggggcttgcagctgccgccctgggaaccatctctgaactgcccgcttttccgaaggagcggaaaagttggaagctgcgaggacagactaccggagccctggtctgggtctcgggggatctggagccctagtcggtgcccactgagaacaccccttctcggagcgagggtgtcggggggagtgttaagcctgcggggcgcacggtccgccagtccccgaggtggggacgggggaggaggctgaggagtcggttccaataggcgcaccacctctacagccctggaaaacgcaaccgccaccccctcttcccttccatcccatcccaagcctctctgctgtcccgggccgatttcatctcgtctcttcccccgcctccccgcttccccgcctcccaattcccgcgcggctcggctcagccccttcccactccagtgggcagaactgatggagaagatccgccaagcgcgcagccggcggcggaggagacagtgcggggtgggcgaggggcttcgagaccacgcagagagagagtgaacttcagtcctgacccctccccaaggccgcggctggggcgcccacagcccgcgctggcacccgcgtggcctgacctgcggaagcgcgagcggggatgaggtagggagagggaggtaggtgccgctcggctgcagatgatgcgtgggtggggggcttgctgtgggaggagaggcccaggtcccggcctgcgccctccactccgcggctgctccctccgcctctggttttccaagaggccggtcgctaccccggaggacactctcatccttcagtcagtctcctggacaccccttcctcctcctgtccctcaacctgacctggctctttcgcccctccgagaaccggtaggctggggtccctcggcggggttctcctgggccgcacccgaagctttgcgcccccggtatccgggcccagtgctccgtgcaaccctgggcccgagcgcacgattccggcgcctgctcgccgccagacacagcgccctttcttcccggagcggcgggggcgggagcaggggggtcaggccaacccttgcacccccgaggcctggcccgggccaccctgggaacggatgttctgcatggagagcgaggggcagccggaggacgtcctccgcatcatacccctccccttccccagaaggctttttttttttccggactgcgggtttctttttctctgccttcttcctctgaacctacggcaggtgtcagcctctttttgtgtatgtgctgctgctatctcggggatggcgggggagggggtgcaggaggcagcgtgaaggggtcctaggaggttccggcggggttttggcccctgcggtgcgccggggcttgcaactcgcccgggtgctgggcgcgcgcgtcacgaattcagcctagggcttgggcgagtctgcggggagtgaggacagaggatc

SEQ ID NO: 12588 - DNA, 6000 bp, Homo sapiens
tatcattccttggaatgctttccccggaaaaatatgtggctctgccctggagaacatctgcaacacaaacgaggtaaactcatcacagttcagaataacccttgagtattaggctgagaaaaaagggttctcccagctgtagaaagagcgagagagatggttaaaatgccattaaggaaagctccttgtttagaatctttaagatagagctatatgtaaccatcactattcagccatttttgacctacaaaaatggtcacttcatatggtccaacacatttggtgagaatccttaagaagtggagggcttttcctttgggcaataatttagaggtgatcccaaacctagaaatctaataatatatctagattcttctctcacctcttctacttctactctttctactttgaaagattttcaaagtagaacacctgtcacagaacggatgtaagttaattttcatagaggagtccctctatttcatagaggaatttgtgtatatacccaacttttaataaatgaggccacagttaatcatttatatttctggaatgacttgctacttctctaattctcattcgtccttactagggagtgtgtcctaacaatttggtttaaattgtctcagccctagaacattcttcagtcattggcttgtaactgtttataaaggaaaattcttaaatgcattcgtaggtgcttgtatatttaagaaaatcctggcaagcttttaagaagcagtgagttacagaaataatcagctcctaccctatctgacttgtcaatttgtatatccataatatgcagtggcttgaagcagggctccccaccgtggctgcatgttacagccatcaaggcagcactatgttatactgatggctgaggcccagcccttaggtattcagatttaatcgatttggggggcagtctgggcatcagaaagtttttaaagctcctcgggtgattccaccatgaggccagagcatgaagagaaggcaggcctgtgcccagtcttgcagagaagagctgcaaaggagacagatgaagcagcaccccacaatgagtgtaggccatttcatttaacatcaaatgcttatgttgatgccctgttcttttgtagttctacatgtcctatcacctgttcattgtggcctgtgcaggagctggtgccaccgtcattgccctggtgagtaatggccccaagaccaccctagtctagcctcctccctccagcttctaaatgacagatttcccttccagcttttaccagcctattgaagccaatgattctggcactcaaccttggttaactggcgcctgtgttaacttaccacatgtagtttacagaaagtattagttggttgccttggcactgattgtaggtgatgtaatttggactctggaaagaaaagagggtatcaacacctatcaactaggcctagcatattaccttgttgcactgagcacttagcttcatgacttcagtcgcagacagatgcaatgctcacgtgaggcattacccatttctttgccaagggatattaatttacaagtggagatatgcacatatacatacatttatatagtcactcatacagggtagctgtgttccataaagtcacctcaagcaatgaattagcgaatgctggaccactgctcctaggggaaatacatggctaggtttctgtgagcctctggtcacatcattttcagcaacctatcaacacataagcttgtttcgtgtgtttctgtgtaaatacaccgtatttaatatatattgttgattccttaatattgaattcatggccaatagctctatccctatgcctgaatgaagcttctctaatgaacattttctctggtcaggcagtttgcaaccttcttgcacttagggactctagacagcactgcagcactatgcttgggagccattttaagcagcaaaatcacccacaaaatgcacaaaaatgtgaaaaacgtggcactaaatatacttcgagtatacttatttacagtctgagagctgaaacaagaaggcagagtattgccttgttcagcctcagctgggaatgtgcataccgggcaactcaactttcaccgctctgcacatgtctgctaataactgcgaaagaagtgcctcaagtattaaggattacaaatgaatcttagcaagtaggcagtcacaaatgtggaatctacaagtaatgaaaatcaactgtataaatacacgctcttatgtatgtatgtttgtatacatgtaattttggagggcttggtttgtgatttcaggaaaaccaactaagattggtagagcaagggaaaaatctcagctgcttgtaaattattcattcccagtttttctgaccattaaatccccttagaatctatgaaaaaaaccacctttaaaatcatggggtgacctgttcttttggttgagcaacagggaggaaagataactgcctgctgctgagcaggtggttttggaaagatgagaggattaaggcatttagcttcatccttctcatgctgttgacccagctctctgtcttgttattcttgaaacgcatccaagtccttttagtaaactcactgagggcagaaccaatgacttacattgtacatgtgtgatgagaaaaagtttgtgtgtgctagataggaaaattgtctgttgtgattttaagtgggaaaaaaacaccttagactatgagcaggcacccgtccccacccaagtttagaagtgtcatggcatcggccctcactgcctgtatcttactgtcctgttttgttctcttccaccagctgatctacatgatggctactacatataactatgcggttttgaagtttaagagtcgggaagattgctgcactaaattctaaattgcataaggagttttagagagctatgctctgtagcatgaaatatcactgacactccagactaaagcagagtctaggtttctgcaattttgttacagtaatttgtaaatagctttagtaaactcaccttgcatggtagattaataagatgacttactgtacatgaattacacaataatgagatctggtggctatttccacattttgaaaaggattcagttatttactgacagtggtgagcatcctttttaaaataatgttctcatacttaaacattagagagcagtatctttaaatgaattattaacactttggaatacttacattttctgttatttttgattgcctgataaccagtttcaatgatgaaaatgaaaacaagtgctgaagatgaaatggaagagaaccgttttaatctggattttgttttgtcacacctggaaaatactttgcaaatatgttctaaattgaaaacaatttttttatgatcacatggttcactaccaaatgaccctcaaataagccagatgaaaatttgaagaaaaaggtcacccagttctctggaaaaaaaaaaaaaaaaaaaaaaaaaaggatttatatgtgggtagttttttttttggtacaacacaatcattctgttagagcccacaaaattggtaaccttaaattgtgtgttttggtaagtaataactaactgtttcctcatagctagttctcaagctgcatgtaagattttaacgggaagagaaaataggcctggacctgaaggtctcaaatatgttgagaagaaagtatgaactataaggaacttgagatgtagatttattttgcaggaaatacgaggaaaataggaaagaagtgtttgccgcatcaagtgtaaagaatgatactgaggatttttacattttatgaaatgaaataatggcatttacaaaatgaaaaatgtagtttcacaactaagttttgttaacagagactgcatgctttgcttatagttcttaattttggttttgacattcatttaattttttccatgttaaatatgtagtttaattatttactcaaaataaacattgttcatgcttttaggcctttgggggaattgatttttatccacaggtagaaaatggtctttgcacacactacacttatttcaaatatacaatgtgctcccgaactttcgcattagtctttaaaattactctcaaaatggtattaaaaaaaaaaaaaaaagcaccctctcgtatttcatttttgctttttcttaacaatacctttggccatttttttccagttcactatgtttgtatactaacttttcttcagccttttaatgcgaagccaactagtagagcatgctttcaggatctgacagctctgctagtagagcgagtatttattaatacagaattaaccttcgcccctttaaagtcaagtctgtctaatctaactagcgcctcgctttgccttctcacaatgctcactagccatcatgctcacccttctcttccagatccacttcctcatgatactgtcttctaactgggcttacttaaaggatgcgagcaaaatgcaggcttaccaggatatcaaagcaaaggaagaacaggaactgcaagatatccagtctcggtcaaaagaacaactcaattcttacacataaatgtttgccagagtgtttcggccgacgtatttacagctctgacaaatcatcagacagctgctctgcagtacagatgtgtatcccaccaaactaatgtagatgtacaaacacttcactgtctgtctcaagctgctgggatgtatctctaggaaaaccttccagtgggtaaatctttttctttagaacaaatattggaggtttcatgttagccattttaaaaggcaacactttgacaaaatgatcgttcatactttgggaatttgtggcatgttcacatttattgctagggcaattctaccaagacactcaatggaatatgtcacactccttaatagggacctgtgactccttaataaggacctgtgacatgcccagcatcaagggataagaccgtaaattcacatatatgccatctgtcctcaagtgttatctacataggaaataaaatggaattgatgtaaagttccatttctgacagctgacatttattaaactttggatcaaagataatgtgattcttatgattgatttctcaaactagcttttccctcccaagtccaggacccattaatttcctgagccaatcagaaatatatttttcaataatgctaaaattagctacaattctgctgaccctactattaaagaatctggatgctggactcactgacaagctttccagaagcaattttataacagatttcattttaacaaaatactgatccaattttcattattcttgagaaatgtcagctttgccttaatgagtatttgctttaaatttctaagaatttatatcataactagagacccaaatatctttcacagaattttgttccataaatgtttttcttaattattaagaagtgttaccttattaaaatgaccaccattctaaaccatttttcagtggtctggatacgaagtttacagtttcataccaactatctaaaacctaattgcaaattgaccacagacctctaacctcctacttttatagacttgaatacttaagtaatttaaattagggttggtatttcatttttttcttatctaaatcttagtttcctggaataataaagtttgatgttcagcaagagaactgcttgagtttaagccattttcaaaagaaacttgccttttacattattgtgttccagaacattaagtgactgtaggtactgggtattagtgatggtaaactttgtgttgctctttatgaaatgatccatataactgttgggtgcatcagtgcttttcaaaggggctgcttactatagggttaactatgtatattcattgttaagagttaacttgtggtttggctgtttcctggattttataacatacatgtgcagaaatgtattcaaatgaaaggaagcatacctttatcaagatgctattaaaattgaacatcaagtataatatttcatttggattctcttttttggttaat

SEQ ID NO: 12589 - DNA, 6000 bp, Homo sapiens
aacagaaacagtgaaccagtattacaggattattctttgtcatgttgggtgctgctttctgttttatatatgtttgatgtgaactttctaaaacactcagcctagcgtattttctaagaaatatttagttgcagccagattgtcaccaagaatcatattcccagaaggttttcaaattgtgttaagagtatagtggttggccgggtgtggtggctcacgcctataatcccagccaaggcaggtggatcatgagttcaggaaatggagaccatcctggctaacactgtgaaacccagtctctactaaaaattcaaaaaattagctgggcatggtagcatgcgcctgtagtcccagctacttggaagcctgaggcaggagaatcgcttgaacccgggaggtggaggttgcaatgagctgagattgcgccactgtactccagcctgggcgacagagcgagactctggaaaaaaaaaaaaaaaagtatagtggttattaaacatggaggacagatagcccaggttcagacttcaactctgcctcttcctgggacaagttacttaaccactcagtgcttttgattcctcatctgtaaaattagagtaacaagagaatctaccccagagggttgttgtgaggattaagtaacatgtaatggttagagaagtgcctggcacatagtaatcacttgattaacgttagttattattattgttgtccttattgttattagagtagaaagagtacctataaatgacagtacattttccagggttatttctatttatttatttatttatttatttatttatttgaggcagggtcttgctctgtcacccaggctggagtgcagtggcatgatcttggctcactgcaacctctgcctcccgggttcaagcaattcttctgcctcagcctcccgagtagctgggattataggtgtgggccaccacgcccggctgatttttgtatttttagtagagacggggtttcaccatgttggccaggctggtcttgaactcctgacctccggtgatccacctccctcagccttccaaagtgctgggattacaggcatgagccaccatgcctggcctctttaattttttattatggcaaatttcaaactgcaagaagtacaattgaattttgctatatctgtgttagctgtttgtttcatatcaccaagtcttaaatgtcagccactagaaagtaagtgccataatttgggaccttgtctgtgttagtcaccatttacagtttatgaaaatagttgtcaaatgatagttggccctcagtaaatatttgtggactggatgaatgaagatactgttttgtgctaatccaattctggttgggatctgcttgtggtctagctaagattcactcttccatttgttcattaattcactcattcattcattcactgaagctttattgaatgccttttatggatcagcagtgtgaagctttattgaatgccttttatggattagcagtggtatctctgggatttgtatgtaaatgaacaaaggggtggcaatccatttggaaagggattggctaaatggcatgtctagatgttgtatttgcatagtaagtgcggtttttttttaacctgacaggttatttatttggggtggagcagatctggtgtggttcatcggaatggagttaacacctcctaccctaagtcacaccttggatcagctgtcatatacaggtttctcatttaatgctttggattgtccctacattggagagaaagggggtatgtataaaagtcattataatgtaaggggaaagactagcagacgcatgtccaaagcatcaatgagaatagaaaggaagaaactactaactttcctccaggtcaagaaggaagggatgggatatccttggtctctttttaaggaatgtggtatttgagcaaggtgttaaaagacgttgggaattcatggtactagcagtgtgcatgtggacaaggagtgagcatgagtatgttgaaggaagaggtgggttgggctggggtgcaggggctgtggtggtggtagtggaggaagtgggcagctgaaggggaggtggtgcctcttcctgcagggctctgccagcccactcacaagctgcccttcttctgggtgggtgggcaagttggtgaaggagttcagttgggcagcagcatgatcagatttatactttagagagataactggggaggtgctgaggaatgtggactggagatgggagaggaagtagctgggagacttgccagccccggggctccatggtcgatgactaattggccaggcaccaggaacttctagtagctcttggaaaggggcagatgggcccacctcatgcacactctttaagctggatcgccgttgcctgggttggcagcaacactgacaaaagagccaagtttcctttcaaagaaaattcttttgtgtattttgggaatgaaaaagccaggagtcagcattctactatcttcattaatagataggctaagaagatagagacaatttttaaatttgaagttgagagggccttgttaaatagatttacatagatatacacatgggcataaacatgtatagctataaatcacagatatgtgtttatttatatatacctttgcattcagcaggtttatctttctaattagttttttaatcaacttttaattttagagtagttttagatttatggaaaagttgtgaagataatagagttcccacatacctcacacccggcttcctctcttgttaacgtcttgcattaacgtggtacgtttcatattatctttttttttttttttttttttgagacagaatcttgctctgttgcccaggctggagtgcagtggcgccatctcggctcactgcaacctccgccccccacccccacccgattcaagcaattcttctgcctcagcctcctgagtagctgggattacaggcacctgccaccaggcctggctaatttttgtatttttagtagagacgaggtttcaccatgttggccaggctggtcttgaactcctgacctcaagtaatccgcacaccttggcctcccaaagtgctaggattacaggcgtgagccaccatgcctggcccatattatcattattgactaacatccatgctttattcagatgtcctcagtttttatccagtgtcctttttctgttgcaggatcccatccagaataccacatttagttttctcatcttgttaggctttaacagtttcccagactttctttatttttgatgaccatggcaattttcagttttgtagaatgtccttaaataagcatttgtctgaagttattctcatgagtagattggagtcgtgggtttttgggaggaaggccacagaggtgaagtgctctcattacatcatattaattccatacttatcgctatagatgttaaccttagtcaccttggctgacgtaggtgttagtcaggtttctccgctcgaaagttctggttttttccctctttccatacttgactctttggaaaaagggtactctgtgcccctcccacttaaagagtggggagtttcattctacctccttgagggaggagtatctaaagaaatgatttggaatccttctacacaggagatttgtttattctcctccgtcctagttgggttttgataagggaattttttttatctgttctctgaattccaaatgctaattctgtagcacttgtattatatttgtcatttactacctagtgacatcacctacatttgtgtgtgtgtgtgataagtaaacagatttatgtcttatttacccaaggagattgtaaatttcttgaggactgggacagcatcttatttaaagccccttacagagttagatacagtgcaggcagttaataaatagtaagcaaatggtttttaaattagtttaattaaaaatttaaatattaaccatagttaactgaaacaggtcatcaaagtctaagcatatgagaaatgtggtaagataaggatactgtttacttggcatcctgatttgtgaaattgtcctgaacttgtaattgtggctaatatgatatttactgtgtgccaagcacttttgtaagtactttacatatattatttaattttccagacagccctgtaggttggtgccattatccccattttatagataaggaaactgagatgaacaaaggttgaataagttgttcaggatcacaaagccaggaagtagctcaactgggattttgatctcaaacactccggctccagagttttgaacacttaaccactgcgctctagattcattgaagtggtgattaaaatggtatctcttttgggggaaagaacaaaattgtgatttaaatatttcatttcaacctgttaggatgctcctgatgacatggcagcaatgttgctgtatttttcctagggggagtatttccataaagccacggctgtttttccttcttctgtgtgtgtgtgtgtgtatgtgtgtgtgtgtgtgtgtgtgtgtttatgagtaatttttgtgtagtgcaactaattgcatttaaaatacaggcatgttcatgattgatatgtcatatacagactatattctagatatccctcactctctagccatgtgatctgttgaaagatagtgggctttttatttcttctctggcatttttaaacagacgtgatcactaggtcttgccaaataaacactccctcagtgtgttccttgtccgaatggtcacacctgggggccccaggagggagcccagattgcagcagcaacataggcgagggaggaggacttctctcgaagccacccaagccatgaattggccctggcttcctgaaccataaacaaatgcgagctttgttctccccattcctcatttggtcccaagtatgactcagggttaggctgggtcctcaggctccgtgctgttggaaggaagtgggaggattccaggggagttctgggaccttttcaaactgaagagaggaggctggctgcatcatgggagaagaggtatttctttttttttttttttgcttttagagttgtaataaatccagttaacctgtatcttatctgtatataacattttgtagcaagactgggtaatgggtttgcattagtgggttgaaacaatgtgtgtgccagctaggatcccacagaggggagctatggataagctgaggaggaacctatcaagtatacggattatttgctaaagctgaatgtcactctggagctatttagccgttttaatccctcccactttggtcaatttggccattaatttttacagatgtttccaatctctctgtgtcttgggttttcatgtgctcatattgcagagagaaatttagatgggcagtttgcacaagcggtaactgttacaccatgtcacagagatgtttagcaattacagatgtttgtgcagtaaacaaatccagcttgcttttcaggttagcttagagagaagggtatgtccatgcagagcaagccagctgtggggcgtttcactcttgagggtcaccgacatttggagttttctttgtgagtggagcagctgtgagtagtgacttctgggtgctattgaactgctttttttatgatggggtaaagatatttggctagttttgtagtgcggggcatttataggtatgtactcatgtatggagaaaaattaagacactaaattattttgattttataaaagtttgctagaaataagtggtcttgtttttctctgtgagttgttcatatttgtctacctaaaagcagaagtctgtcattttccaaacacaaaattccctaaataaaccacaggataagtaaggcttacagtgtgtcatatgtcttccatatccctgtctctcattgaaaaaaaaattttaaggggagaattgatgaggtctgtaaaatatgtccctttatgtctttttctgttggctttaacttatactattttcaaaattacaaaaaaaaaaaaat

SEQ ID NO: 12590 - DNA, 6000 bp, Homo sapiens
aacaaaaacaaaactgaaccaacaagctgtgattcataccaccaaactcctgccaaatctgccttcttctgtcgattgacttagaataggatataatttccaataagaccagtggtttaaaccttccttttttccttccactgaagggataactagttattcatgtccttgtgaaacctcaagagagattttagctctgtcatttattaacgcattagggaaactacttcatctctccaagactcagattagcatggcgtctatctttcagagttgctaaaatcaaatgagataaccaatgtaacatgattagcatagtccttcccacatagtcaggactcaccaactgttagcacttcatttcactattatttctccaggaggcttgtccctgatagcctcctgttaccaagaatacattcacattggtacagcttttcagctttgttacctggccagtaatttctgtggaaccaaggcccacaacatagtttcttctttgacagactagtgtctcatgcagtcacttctcttccctctcttttccctccaagtgtgatagactgtcaaactaccatatctcctgactccatgtgaggcaattgtgttcagccagggacaatcctctgctcagaggcagcaaggctacccacagctttaggaattgagtgagggctcccatcaatctgtcatcacccattctactcccaagccaatccaacccctgaggtgaccttacctgacactttcctcctgctctcacctaccactggtggtacagaggcattctctctctctctctctgagtctctctctctctttctgaatatctctctctctctctctctcatacacacacacacatacacacacacactccttttcccaccactcatacacaactcctaatgaattagtgaatttcatcttccctagaccaccactgctgcaagaagcaaacagaaccaactggtctagcatcaatttctgtctaccttcctcatgattcttggtaatgccacttcataaaactgagaaaaagtaaaaaccaaacccacacatcccctctttataatctaaccacttattccccagaggactttttagtgaatgtattcttaagtattattcaggccttcagatgtctgtctgcatgggtccagtttggcaataaaacaatttccccagctcaggagtaaacatgtacttcccaagtatacgtgtttaggtgatgtgggctcaccatccccacttctaagaggcatttaaagccatgaatggaaagaaatgggtacttttaaaaaccagagcacagaaatcaccaaaattgagtttctctgttttgctgtttgagtgagttgtagccaaataagttacatacaggcatgcgctgcataacaatgtctcagtcgatgatggacctcatatactatggtggtcccataagattataatattgtatatttactgtaccttttctatgtttacatacacaaataccattgtgttacaactgcctacattacagtaataggttgtgcaggtttgtagcctaagagcaatagtttatgccatatagcctaggtgtgtagtaggcaataccatctaggtatctaggtttgtgtaagcatactctcttgttagcacaatgatgaaatggcctaatgacatgtttctcagaatatatctctgtctttaagtgaggcataactgtatttgcatatttacaagcttcctttttggctttaggttgcaagcacttttaaatacctctgggggctgaagtctccagatttagaagctcccaagcatggtccagcatattgttacaaagttgtatatatgcaaaattcaggattatgacatttcaggtacctctctaaaggactgtttttttttttccctgccttcttgtgaaatcatttgcagtacatggtccccttcaagaaattcagctaaactagtgggaaatctgcagatatcactggtccatggcttttcctgctgggtgaaatagtggcccctgggggaaaaaagaagtgaactgaagtgatccccaagttagatctcacacccaagtcagatcatgataaccgtcatcatgtagttatttgatatgagagtggggtggggagagacagtaaagtaaaaaagatcagggttcaaaccccagctctgctattcactgcgacttagaactagacacttaacctctctgagccccaacttcttcacttccctcacaggactgtggctgcgggcattaaataagataatgcatgtaaagcaagggcaaatagcaggcatttgccagccagaaacaaatctcttcctttggagaaggagggttgaagagaaacttagagaagaaattgctactcctgctgcttctaatgagggccatcgccagagtcacaacaggagccacagctctcatagtagatggttaggataaacagggcatgtttcttggtggtgggagcccagggttagttagaagcagtgagggaagtgtccctgagagaataaacgtccacggaatgttagcagaaccttcttctctggtagcttatggtcaggtaaaagaatggaaaagaaggcaattggaagcaggcattgctttgtcactttttatgcgatggcagcaccagataagctaactgatgtcctgacctctgtgatcttgcttaggttgaggaccagggtccaagttaccctggtatctttttggaggaactttgtgtgaccaaaacgcttcttttctaggcaagcagcaactactgctgtagccataggtgtctcccatgaagcttccacttatactattcctttcactggatttcctgtttcttggcttttggctctccaatggtcagaaacaatcctctttcccctactcagaactttgagtcttccctggatttgtggagcaaaggcaaccttctgcaggaaggtttatcataagccacttttctcctcaaacccccaaagctcttacccagcccttccttttgatcctactcttagagtcaagccattttcctgctggtttcctcacatgccattccatgccattcccctagagccctgtaactgtgcacatattccaagaggcattcccaatacagtgaaatctcaatggctgcagttatagggcaccttcactcaccttacggaggttggtgaggagtcccaacacaactgaaatacggtggcctgaggcccagtgctctacaactaatttgctatttgacttgagtaagcacagcccctcttggagcattattttcataatctctaacagggcagggagatctaagattactcattactaaggtcacggttagctcagaaagttaaaaggccagttttgtggcatgaacacagactttgaactaacatagaccagagcttgtatctccatcctaccaacttaacagtaggccccttgtcgcagtgaaatggcttgttcaaggctgcacagctagtaggcagcaaagccagcattcaaacctataagtagttctgggcgggctcagcagagctcttcctccttcctggatgcagctagtcccaggtcaattaccaagggccaggttaccactttcagaactttgtcagcctgggctcagattgctcacctcctccccataccccaaacaattagtgatccttaccctccctaggaattccagtaatagaaaagaagaaggggggaggggcagagatatttgagaagacacaggcttaaaggctaagcttccctttacattgttcctttcactgggtttcctgtttctatgtttttggctcccccaaaacttataggtgtttaggctttatggtcccagcggactagttttaaagtcatcaactcttgatatttattttatcaatgtactcagaccagtgcaaaatgacatgtatatacagagtttttgcagtgtcatttgtaataaaataagatttgaaagcactgtctttcaatagggaattgtttaaataaatcacattacattcatttagtagaatgctatgcaattgtaaaaagaaaggaaaccacttaatatgtatcaacatctaaaagggttcattgtatattaagtgtagaaagcaagaaacaaaacattgtacatagaatgctacgatttacaggaagaaaaaagaatatatgtgtatatatgtttgctcacgtgtgtaaaatacctttttagtgatatgcaaggaactggttaaagtttttgcctattcataaaaataaatacgtatagcatcattatcaactttcttttatttcactgatagagaacagggacacagacgttcatctatagctcttccttagcacaggaagcagtgggaggagatttgcagatacagtccttgcagacctgcgtggtagaaagatctggcttttcagtgttaggatgaccacgaggtctcagtttgcccaagaccctcctgattgtagtgctgaaactcctgggaaaaccaggacagttggtcatcctattcctcatcctgctgctgcagcccttagacagccaggagggaagattccagtagtggcatgagcagagcgatggcagcagcccttggctccacaatccacaagtgacaagggactcacagagtggcaggcacatgctctgtaaggtattctcatctaacagacaaggaaattgaggctcagagaggttaagtgatttgcccaaggtcacacagctagtaagtgctggagccagtctgtctgactcctgccatgtcaacaggaccctggggaatgtaaagctttcagtggagcagtgggtctgacctttcttaaagcctaaagcacccggagttgcattttaaccaaatcaaacacagttgctttgaatcaactttggcaagcgagtgttaggaaacagctttcttcccagcactctaacccaagcaaagacaatagatgttccaggtctttggactgaaggagtcatagacagaaagctggccttctcagttgtgcccgtaataattcagttctcacctgggaatgatagcttactcatcccccaacttgatccagcctcctacacaagagcaacaagagaaattaaaacggaagagcagccaactaataacaggtagtggtgcatgtcatgatgcttgtctactttttgagtgggtgggggtggaattcaacttggcttataacaggggacccttttgctaggaaaaggtaaataattccccaaagccttatgcatcaaaaacgaaccaagcaggctgaacatggtagctcatttctgtaatgggattacagaggtgggaggattgcttgagcccaggagttcaagaccagcctgggcaacatagcgagactgtctttacaaaaagatgaaaaaattagtcaggcatggtggcgggcacctgtagtcttgactactcaggagactgaagcaaggggattacttgagacaggagtttgaggttacagtgagtcatgattgcgccactgcacttcagcctgggtgacagaacaagaccctgtctcttaaaaaaaaatgcaccaagcaacagaaaaacagatgtagcagatagtagaagctttagggacttgggagaagcataggaaaaggtcacagcagcagctgtacttgccctttcccaattaagcagcaggggggtgttaattatatacaggaaattgggctgctttacagactctgttgaaatattttatagaagatattttataaatatggattgagggaaatgtttatcctcattaatttattaatttacacatgctgagttgtacagagcaccagagagagatactacctgtgccagggtgtgggagtttctgggagcaatggatttgggtattggtttatcaaagaggattcagaatgaaactgaagcagagttttccaaagctttagccttctctgcaagggctgccatggttttggcaaagaccattttgtgtgaacactgtacacaggacctgaatta

SEQ ID NO: 12591 - DNA, 6000 bp, Homo sapiens
tctcctgcctgatcgccctggccagaacttccaacactctgttgaataggagtggtgagagagggcatccctgtcttgtgctggttttcaaagggaatgcttccagtttttgcccattcagtataatgttggctgtgggtttgtcatagatagctcttattattttgaaatacgtcccatcaatacctaatttattgagagtttttagcatgaagcgttgttgaattttgtcaaaggccttttctgcatctattgagataatcatgtggtttttgtctttggttctgtttatatactggattacatttattgatttgcgtatattaaaccagccttgcatcccagggatgaagcccacttgatcatggtggataagctttttgatatgctgctggattcggtttgccagtattttattgaggatttttgcatcaatgttcatcaaggatattggtctaaaattctcttttttggttgtgtctctgccaggctttggtatcaggatgatgctggcctcataaaatgagttagggaggattccctcattttctattgattggaatagtttcagaaggaatggtatcagttcctccttgtacctctgatagaatttggctgtgaatccatctggtcatgggcttttttttgttggtaggctattaattactgcctcaatttcagcactttttattggtctattcagggattcaacttcttcctggtttagtcttgggagggtgtatgtgtccaggaatttatccatttcttctagattttctagtttatttgcgtagaggtgtttgtagtattctctgatggtagtttgtatttctgtgggatcggtggtgatatcccctttatcattttttattgcgtctatttgattcttctctctttttttctttattagtcttgctagcggtctatcaattttgctgatcctttcaaaaaaccacctcctggattcattaattttttgaagggttttttgtgtctctatttccttcagttttgctctgatcttagttatttcttgccttctgctagcttttgaatgtgtttgttcttgcttctctagttcttttaattttgatgttagggtgtcaattttagatctttcctgctttctcttgtgggcatttagtgctataaatttccatctacacactgctttgaatgtgtcccagagattctggtatattgtgtctttgttcttgttggtttcaaagaacatctttatttctgtcttcatttcgttatgtacccagaagtcatccaggagcaggttgttcagtttccatgtagttgaccggttttgagtgagattcttaatcctgagttctagtttgattgcactgtggtctgagagacagtttgttataatttctgttcttttacatttgctgaggagagctttacttccaagtttgtggtcagttttggaataggtgtggtgtggtgctgaaaaaaatgtatattctgttgatttggagtggagagttctgtagatgtctattaggtccacttggtgcagagctgagttcaattcctgggtatccttgttgactttctgtctcgttgatctgtctaatgttgacagtggggtgttaaagtctcccattattaatgtgtgggagtctaagtctctttttaggtcactcacgacttgctttgtgaatctaggtgctcctgtattaggtgcatatatatttaggatagttagctcttcttgttgaattgatccctttaccattatgtgatggccttctttgtctcttctgatctttgttggtttaaagtctgttttatcagagactaggattgcaacccctgccttttttttgttttccatttgcttggtagatcttcctccatccttttattttgagcctatgtgtgtctctgcacgtgagatgggtttcctgaatacagcacactgatgggtcttgactctgtatccaatttgccagtctgtgtcttttaattggagcatttagtccatttacatttaaagttaatattgttatgtgtgaatttgatcctgtcattatgatgttagctggttattttgctcgttagttgatgcagtttcttcctagtctcaatggtctttacattttggcatgattttgcagtggctggtaccggttgttcctttccatgtttagcacttccttcaggagctcttttagggcaggcctggtggtgacaaaatctctcagcatttgcttgtctgtaaagtattttatttctccttcacttatgaagcttagtttggccggatatgaaattctgggttgaaaattcttttctttaagaatgttgtatattggcccccactctcttctggcttgtagagtttctgccgagagatccgctgttagtctgatgggcttccctttgagggtaccccaacctttctctctggctgcccttaacattttttccttcatttcaactttggtgaatctgacaattatgtgtcttggagttgctcttctcgaggagtatctttgtggcattctctgtatttcctgaatctgaatgttggcctgccttgctagattggggaagttctcctggataatattctacagagtgttttccaacttggttccattctccccatcactttcaggtacaccaatcagatgtagatttggtcttttcacatagtcccatatttcttggaggctttgctcgtttctttttattcttttttctctaaacttccttctcactccatttcattcatttcatcttccatcattgatagcctttcatccagttgatcgcatcggctcctgaggcttctgcattcttcacgtagttctcgagccttggctttcagctccgtcagcttctttaagcacttctctgtattggttattctagttatacattcttctaaatttttttcaaagttttcaacttctttgcctttggtttgaatgtcctcccgtagctcggagtaatttgattgtctgaagccttcttctctcagctcgccagagtcattctccgtccagctttgttccgttgctggtgaggaactgcattcctttggaggaggagaggcgctctgctttttagagtttccagtttctctgctctgttttttccccatctttgtggttttatctacttttggtctttgatgatggtgatgtacagatcggtttttggtgtggatgtcctttctgtttgttagttttccttctaacagacaggaccctcagctgcaggtctgttggagtacccggccgtgtgaggtgtcagtctgcccctgctggggggtgcctcccatttaggctgctcgggggtcaggggtcagggacccacttgaggaggcagtctgcccattctcagatctccagctgcgtgctgggagaaccactgatctcttcaaagctgtcagacagggacatttaagtctgcagaggttactgctgtctttttgtttgtctgtgccctgcccccagaggtggagcctacagaggcaggcaggcctccttgagctgtggtgggctccacccagttggagcttcccagctgctttgtttacctaagcaagcctgggcaatggcgggcgcccctcccccagcctccctgccaccttgcagtttgatctcagactgctgtgctagcaatcagcgagactccgtgggcgtaggaccctccgagccaggtgcgggctataatctcctggtgcaccgttttttaagcctgtcggaaaagcacagtatttgggtgggagtgacccgattttccaggtgacccgtttctttgactaggaaagggaactccctgaccccttgtgcttcccgagtgaggcaatgcctcgccctgcttcggctcgcgcatggtgcgcacacccactgacctgcgcccactgtctggcactccctagtgagatgaacctggtacctcagatggaaatgcagaaatcacccgtcttctgtgtcgctcaggctgggagctgtagaccagagctgttcgtatttggccatcttggctcctcccccttctcttttgttatgagtggtcagggatgtcctctccggggtggtggtatttgagcagacatatggataaagtatggaagtgacacacaactttattgagaaagaccatctcaggcaaatataaagtctctgaagaggaagatgtgtgtgtatgtgtgtgtgtgtgagtataaataatgtgtatatgtatgtatattttaataaccacatagactaaaactatccaactgaaacaacttaggtatactttgagaaatataaaatgaaattgtaaggtagaggtagcattaataaactatctagtataccattaaataagtttgtggtgattggtgattcaacacccgaatcatctaggtaaatcctgaaaaactcatattttattaattgcttctccttccccttctttccccgtccccactcctttctcgtctctttccccccctctccttttctcccatctttcacttctaatttcagtgaaattggagcgatttgaaattccaatcaaggttcgattaagcccagagccatggacccctgaaactggtttggtaactgatgctttcaaactgaaaaggaaggagctgaggaaccattacctcaaagacattgaacgaatgtatgggggcaaataaaatgttgttgtcttattgacagttgtgcaggaggtagcctggtggttttcaacctctagaattttaagcctttgttgaactgttagaatgtaaggtatatcattctaaagatagagtaaaaagaaaacaaaaccaaaagttattaaaattgttgtccggtttactttaacttagttttgcatagttctagtgcagctgaaattgaaaagttatttccctttagctgtgttattatagagcagaaattctgtttttaaaaattagcctaagatatacttgtttttgtaaagaaaaatatttaatgttgaacaaaataaattggagttggagtagaatgtagtttgaggaaatttgcagcttccaatgcctcttgtcttcctatttcagaagtttaaatattaagcatgacagaaaatatgtattaacactactcaaagcaaaagtgctgcagggctttaaaattctcttccaaccatttatcttgaaggaaaaattcaatagtaatataatacacaaaatcaaataataccttagaaggtattaagattataattgttgcataggttagatatagagtcattgtaatgttgtgaataattacagtgcctaaaataagaatagaacaacatatacaacaccaaaaaatatctagtaatatatttaaagggaaattgagctgctttttttgaaactttgagatctaaaaataactgtaattatttgaatgactaagaggaaagtacattttttgaaatgctgaaaattgcctttctgtgtttattcaaactgaaaagctgagaccaagagcaaggaaggtaaaaagttaacaggcaaacattttctcttagaaaaggtgataaaatcataagtatttggaattagaacccttgcacagcactgaacctgggaaagagatttaaactctgaatttatctttgataacagggattgattttaaaatgtacatgtattaaattacatttgtaatttaaggtctgtttgctgttgctgattttattcttgatcagtagtttgcatttcagaaagcctttcattttgctttaattttagcaaagcgggttataatgaatgacttccccaatatcttgcttgaacttacaggtgattaacttggatgagttttgggaagttaaagggaagaaaacactgttatcattttttcctgtttgggaagagcttagaaactggaaatactagatttgggagaagggcagagttacttgataagggactgatgtttgtgcagtaacttgggagtgtggtttctttttgaatctttaattaaaacctgggattatatatccctgataaatatt

SEQ ID NO: 12592 - DNA, 6000 bp, Homo sapiens
gtttgaactgtgtgtggatctacttatacatgagtttatttcacctctaccaccctgaagacagcaagaccaacccctcctcttcctcctcctcgttatgattttttttttttgagacggagtctctatctgttgcccaggctggagtgcagtggcgcgatctcagctcactgcaacctctacctcacaggttcaagcgattctcctgcctcagcctcccaagtagctaggattataggtgaccaccaccaagcccagcaaatttttagtggagatggggtttcaccatgttggccaggctggtctcgaactcctgacctcaagtgatccgtctgcctcagcctcccaaagtgctgggattataggtgtgagccaccatgcccagccctccttatgattttcttaacattttcttttctctagctttattttcaaaacacagtatgtaacacatatataacatacaaaatatgtgtgaatcgactgtttatgttgttggtaatgcttccagtcaacagtaggatattagtagttaagttttgggggagtcaaaaataatatgcagattttcaactgtgcagtgggtcaacacctgttaatgttctgtttcttgacacaggtggttttggtttgtgaaattatttgagctgtagacttaatgttacgtgcacttttcccttacatctgttatactgtgcctgtttctgtacatatgttacatatcaaatgtttattaaaggggtatattgggtaactcagaatttctggtgctcctggctatatataccaaatcccagttcaggattcaacaacccagatcatgctgctgaactgcactaccactgccaagtgtgaaattgaagcttgctctgctggccttgttgcctgggagcttgatcctgcttctgttactccacacctgtctccctccctgttccattcctggctccatttgcagccctcctttcaaagtgtggggtggatacctttgttaggcagagcctagcacaagtggtcctccttactgcaagggagtctgggaaagcaagtatccagtgttttcagcttttatagtgggtggtgatttctgccagaaattgtaacaaggggacaaggggtgtttcagatttggggcagccaaaaagcgagcaaaatccatctttgaggtgagcatttaggccaatagaagaaagtagatttcaagtgttaggaacaatagaagcccagggtagaggttgaatagagtatggcatttgagcccagtggaaacaagtttaactggattaaagggtgtgctctgggaaaatagtttgagaaaagttgaaggaataggatgggacaagattaaagattactttgaaagtcaggcagaggaatttaaatttcatatgggaatgttggagccagtaaaagtttttgaacaagaaagtgtcctaaaaggaaatggtacttaaggattattaatctggcagcacttctaggggtatctaggcattttctgtcataatttaggtgtggggtgatagattgggagtagaaataaaagacaaagattgtatttaagagaagatttgaaggaaaaaaatcaataggacttcttgaagagaaagaagtagaggctatttctgaaactgagcttgagtgactgatcccactcttcatttagagctagcaaagctgaggagggacccagtttggaggaagcagaagaatgaattttagtttgggaattgctgagtttgaggtgagagatattgagtaaaagtggtccctgtgcagttagagttggggaccaagaagtggaaagaattgcactcaggcagaaaggctgtgaagggaatggaacagagtgtgccagaaccctcagggtgtttctcagctcttgtttacgggccaccaggtatactatcttgaatttaattttaagtgatacgtttgaaccacaacctctaccttttgtttcataaaacgtcagttctcacaccctaagacacattgatgcaagctatcgatgctattactattttacatggtcttcttcctgttattctaatatatttggaaagaaaatgattaatacatgtgaggcttttcttggtaattttcaatacttttgaatgttttgaatacaaggagaataatatactaaagctagagaccttaaacaagaccgagaaaagactgcatataaaaagcaaacctccagttcattaaaattgtaagttggagctcttggctccatggcagggagccttggatcagtaagtataacagctcccttccgtattgtacttagaaaagaatgatcataaaacctacttaggcctcacaaggtctttttgagccttagccaatgcatttagtcactgtcagtaaccacaagctttagtataatattctggcttgcaaagcagccaggtctccagagcatgacgataggctcttctatacaacttgaaagctgttgctgaggcataccttcttgatattcctcttagcacttttctctagtctatagcaagtctgtacctgtagatgacagtggattgctcagatattattaaagagtatgcaagtatcttaacaggaaacagcttaccctttgggtaatgtgtgatacagtgaagaaaatcccttaaatggttgcccaatatttatgctgctggcatgtttgctgggatattttttctcctctgaattagtattttgagtccttgggctcttcagtttaatagataatgtttctatgtttaagtgtagaagatccaccatgttagctgaaaagttccaaggcttttctgtctctgtaacatttctctgcctaaagaggtagcaggttgaaaatttaggaaataactttgcgtcaaaaaattcatcagcctttctaatcaattcgattttaaagtgaaacagtgatgaactttgcatttatcagaattcatgtttttctcatggatttaacagccctttgcaactctgcttccttggttacatgatagaaagagtatctgatcacatcagaataaaatcgtttgggaagacatccgtgtgtcatagattatgtagcttgcaacaggatttaaagcaaaaagatggtagaatatcggatctatcattatttttgcagtgaatgtttcaccagctggtttgagagaagttttacacccctaccaggcttcctcttacctcatttaccgcaaaaaccacaagtcctaacaggcaaactgtaattgcctaaaacaaaactagtaaggtataaatgcatgtggaaatgattatttgaaggcaaaaggcaaataaatgtcaccagtctgagccatgacctaagcatcctaggtctagtaaccattcttttggtaagggataatgccaacttttttatcaataggattctgttaaaaatacaaagaaaaacagtcagcaggatactgtatctatacacatacatatatgtatatacacatatatgtatatatatgtatgtgtatatatagatataaaatacttttgtttcattttagagctggttgaacttcagtggtgggtagagcttgtttttaatttatataatttttgtagtacaattttaaaatattatttttttaaatgaatccaggagctgtgcggtcttatgcattggaacttaatttgacagattcagaaaatgccacttgcctttatgcaaaatggcagatgaatttcacagtacgctatgaaactacaaataaaacttatgtaagtatatattttaatttttctttgagttttatagtaggaatttaattgactttatcctttagatacacgtatacaaatgaaattccacgttgactgacttaatgctgaaactctgggattttttttaagcatacacactcagaagttattctgtttagtgttagaatgaatatttcttctgattcattggttcttgggagtttttgtaggacttgattaagggcaaatgatctgaagacgactatatggtgttcaggtctaagtatttctgtaaagtgtttaaaatgtactagcaccaaagcttgcccttttaaaaagcagcttcccatctgggcatggtggctcatgcctgtgatcccagcattttggaaggccaaagcaggaggattgcttgaacccagcccgggcaacatggtgagacctcatctctacaaaaaaactttaaaaattagccaggcatggtggcacacacatgtacctccagccactcgctgggccgaggctggaggattgcttgagctcaggaggttgagtctgcagtgagccatgattgtgctactgcactccagcctgggcaacagagcgagactctatctcaaaaaaaaaaaaaatcgcttacttaggttggtacaaaagtaattgccattaaaggaacaaaccacaattacttttgcaccaacctaagtaagcgatttttttttttggcacaaactgcaattacttttgcaccaacctaacactaaaatctccccctttttgacatctcctcttaattcctttgccttcttattttctttttgttaaggtcctcactacttacaacctaattttttaaaaaatcagtttaagaacagcagctcaagccagttttccttttctttttagacatacacgaatttatccagaggagtggtatgtagcagaagaatcagggactggtttacacagcaaaccaggcaaagggcaacctggccatggagaatgtatgatttaggctgaagtggcatgccctacataaatgcttggtgttccttgctgcctgtttgtttctcacccccaaatttctatttcttttagaaaactgtaaccatttcagaccatggcactgtgacatataatggaagcatttgtggggatgatcagaatggtcccaaaatagcagtgcagttcggacctggcttttcctggattgcgaattttaccaaggcagcatctacttattcaattgacagcgtctcattttcctacaacactggtgataacacaacatttcctgatgctgaagataaaggtaaccttaagaatggatttgtgttatgttctcttgctttttattaatgataaaaatgtaaacaattttaaaattgttatgaatgtctgtcttcctaactagcatggaaacttcatgtctttataaccctcccactgaccccatgcatggcacatatgacaccatccaacatactgatgatatttgctgtcattgcttgagtgacttactgtataccaggtattatcctagtatacagtaagtcaccttactatatatatcctagtatacatatatatgtgtatatatatacatatatatgtatatcctagtatatatgtatatatatatatacacatatatcctagtatatatatacacacatatcctagtatatatgtatatatatatcctagtgtgtgtgtatatatatatatatatatcctagtgtgtgtgtgtgtgtatatatatatatatatctcctagtatacagtaacacacctagtgtgttacctgcagcatctcacttaattcttaacagcaaccctgggaagtagatgttgtttcatttttacaggtaaaggaaatgaggcttgataagattaaatgacttttccaaacatcacacagtctggtaagtgggcgagctggtgtttgaagcagtctattgacctgcagaattcatatacttaactattattgatttcattcagtagtgtgcatgaaacaaaggtttgatgaatgagaaaatgctttactaatagctactttattttcaagatcgggggttggggggggtgtctcactatgttgcctaggctggttttgaactcctggattcaagcgatcctcatgcctcacagcctcctgaatagctgggactacaggcatgcaccactgtgcctggctactaatagctattttaaatgtgtaaaagttaagtaacctgagactaggagaaatgcctcttgttcaaatctttttatcattta

SEQ ID NO: 12593 - DNA, 6000 bp, Homo sapiens
gccaaggtcctagactttcagaaggctattgtttagtagagtggacaaagttgcttgtgacatttcccaaagataacagtgtcagatcatgcgggtgacatcccaaggttgtgtgtgtattgagttgtctagtcagcagtgtcttcatctctgcttccccctttactaaaattcaggctttgggctctctatcttcttcactgctctcagagcatgtgcatgacagcatgtgtccatgtgtgctcacacacgcacacacacaatccctctctgtccagctctcctgcctgggatgaggattatctaagtctcttgacattgtattttggaacaggatgtctcatattctccaatcaaactcagacaccctggagctggatgatgatcagggagacattagagttattattggctcgtgacttagatagatctgggttcaagttccacctctataattcctagttgtgtggctgtaatatggaactccagtttactcatttgtaaagtaagtacaacagaagtaactatctcattgggttgctggcaatgctaattgagatagtgcatgcaaagcgtttagtacagtatctgacatacagcagatgttcagtgttcagtatgtgagctactattggcactatttgctaaccatcctgaggtcaacctacaggagacaccactatagccagccatcctgatcactgtgcagatctttgaaactggcaccctcgacaacaggtagacccctctccccatgcctgttgcatttctaaccccttgttgagcgctaccaaccgcattttgtctcttctcattggggatttgaatatcatcttctgcttcagctaaatctcccacatgatgataaccattaaggcaactttcttcagtacagaagataaatattcaaagtgcttattaccaagttcatttccctcatctgctctaatgctgtagctttctgcatttttatgccattttgtgaaatgtggatcttgaaaatacgtattaaagaagcaagtcctttctcaggttttactataaagcccagttaagggctttaggagcctctggtctggctctttcttattaaaaattaattttcatttagtctgtgacaagtatggcttctctaaagtaatttctcttttcctggattatgcttataaggcatttcctttccagcccatttgaatgacaaataaatccttttcctgggagcaactttggccttgaagcctgcttccttcaaattctccaggttgacctaagatataattttcaactcttgtattttagtattcagaactaggactcccacagagaccagtcatgcaatgggtgtgttcctctcttgctgagatcccagagtataaacataaatgggaaactgtgggtcaggcaaggccatttttgtttttatcattaccgttattaaaacctaccttaggctgttgtgttagctggaggtcacttctttatttttattttgagatgaagtcttgctctgttgcccaggctggagtgcagtggcatgttctcggctgactgcagcctctgcctcccaggtccaggcgattatcctgcctcagtctcccaagtagctgggattataggcacacacgaccacacccagctaatttttgtatttttagcagagatgtattttagtaaagtttcaccatgttgaccaggctgttctcgaactcctgacctcaggtgatccatccacctcggcctcccaaattgctggaattacaggcatgagccgctgcgcctggccttggaggtaagttcttgacatgactttttcccaatctttcagccttgactttaccatccaagtcagtagaggcccagaagccttattttcaactttctgtcttatccctatgatctgagaaactttgctcctcatttaagtccttcttccgcttttgtgactcagtgactaactggagggtcatatttggtagtgtatctttgctgacacaacagccagaagagagtggtgtccctccccagccttctcattagctagcatagctcagatcacataaggctcctgctgggaggggctttcccggtcatctaaggcagcccctcattttacgaaagttggcaactaaatcccagagacatcaagtgactcacccagggtcacacagtgagccagaggcagaactgggactcaaacattgttttcttggcatcccacttggtgctttttctactctgccactgtgaactggtgctgccagcccagggctcagttgatggggcttgttcagctaaggctcaagcaggatgaatgcaaacttgaccttgttttttaatcccaactgctgtggtttgactagttgctcaaatggaaacccctccggccagatcaaccattaacttttgaagtgaatggagcttaaaattagtgtcaagagtttaaagtagggctcgccccgtaagctctcctctttacttacctatagctctctatctcagctctccaagcatctcctccagtgccctattttctgtgtttcctagtatcccatgggaaggaccattcattagggttaagcaatgccatctcctcttttcttgttgatatatcttggaaggggacacgtgtatttgtcccatccctcaatgtgacacagtggatcagaggctttcctcctccatgggacatgagccaggagagcactagagagacatggagggagggtgagaaaagactgcagataaaaaaataggatgtggcaaagccagcctaggacaaaattaggcccatagccagttgcctgtcattaagtatatgtgtgttgctactgtgaagatataacaaagatatcaaatcaaagacattgagtcaaaagaggcggaaaaaagcaagcattttctgaaggtctgctttttcaagaactagactaagtgttctcagtagattattttagttaactcgcatgacagcccactgaggtagccatcattaacctcattttcatggatgagaaaattgaggttctgatgaactcacagagccctaattaaaccccacagggcagtgtgctctccaaacctatgctctcttctctttaaaagcactcatttgagattggattcctctttactatacccctaaaccagctttttggaggtacctggtcaggctactttcttcttcttcttttttttttttttctctttttttgagacagggtctcactctgtcacccaggctggagtgcagtagtatggtcatggctcactgcaccctcaatctctcaggctcaatggatcctccaacctcagcctcccgagtagcttggaaccacaggtacatgccacgacgcccagctaatttttggtattttttttttttttttttttttttgtagacacggggtttcactatgttgcccaggctggtctcaaacttctgtgctccagcgatccacctgccttggcctcccaaagtgttggaactacaagtgtgagccaccaaaccgagcccaggatattttctaagagtggaaactgaggcccaaagaagtgagatgactattccaggaacagtctggcctgctgcctatggttgctaggccttggcttattgtagctttaaaagccctgcatgagctgactcttccattcgttgtcagtgaaaagtgggaattttggctgggcacagtggcccatgcctgtaattccagcactttgggaggccgaggtgggtggatcacctgcggtcacaagttcgagaccagcctggccaacatggccaaaccccatctctactaaaaatacaaaaagtagccaggcatggtggtgcatgtctgtaatcccagctacttggaggttgaggcatgagaatcgcttgaacccaggaggtggaggctgcagtgagctgagaacataccactgcactccagccagggtgacagagtgagactccatctcaaaaaaaaaaagggaatttcactgctagtgaaatggtgggaacccttcatcagtagagggccggtcattgggctgcttgttcacagggttgggtctactatgagccccattccagtgcttatcctaccttctcagcacatattcatttagcatatacagcaccctggcacctccttttttttaactccttgagccccacgttttgttaggctagaaaaataaaactcagtgttctgtgggggaaactaaatgactattgagagtgatgcatataacacacccagcctgtttataatattaaagcctgaattgccggacagtgttttcattaagtactgctattcattccgtttggagagacacgtaagaacagaaaccagtcaactcagtagtttgcatgccttccatctttgtgacagaattgcctattattgagagtatgaacgttttcacaaaatgagagacagctagaaagccagggttgaagagaatgctcaggatgaggggaaggcataatctatgctttctggaaagaatgtcatgctttctttaatatgaagtttccactatttctgttctaatttgaacagggtaccctgctgtcacccttgtaatatgggcccagaacaactgcagctgctgctggcctggtgggatccagtgatgcaaatgccacagaatgcaggtagaaccaggtctaagtcattccccccgggctaaggccctgagtctttggcagtccttcagcctttgaggaagacagtaaaggtaaacatgtgacaaggaatgtcagatcagggaagtgcctcttgaatcacaaagtcaaccttgccatctcacagataaggaagttgagcccaaaagtgagcaagtggcttcctcagggtcatatatatatatatatagtctcattagtgtcagagtcaagacatgagcccaggtctctggactcccaggccagtgctcttgtaactacctcccactgttgtctcagattacaggaaccaaatgcatgtctggccttgtgctgcttcgcatgcaagccaggctgacctttatgctcccagaatcatcagccttttcattggaaaccatggaaggacggttctgggaaaataatgaaaatcataccacaccatagagacaaccagaagccctgctcagatgacagagttctcctcgccttccaggtactgaatcccaaatatatgcatacacagcaactccagttggtgttagaattaaggagatggaaaaccgaacacttgacagttcggccagttctcttcccttttttttttttttgcctcctacccccagtctttccccaaaaggccaaaatctagagcatttgagcctttgtcattcactgcctgagaggaactggctcctgggagcagagaccagccgagattacaagaagcctcttcaacatgcagccaaggcccagccttggcctcgggagaacatggctcttgggacacacgtaggaaaaattccctgcttctcagcaaaaagcctcttcaatcctggagggatcttctgaggtttgtgggactccctgctccccacaaagactgttttcttatacttccaggagccctgatatatgaattcctgtatgagagattcatttctttgttcctcacagcatgagggggtggaggaagggcttctaaatgcaaaaatcctagtgacatattatatctcagaaactgaactttacagccccaccttgtccctcttgctctgcaactaccaacctcactggccctttctctgaaggttggactgtgagtgtgtgtgcaggtgtgtggacaccttccttttcacaactcaaatgagtaaaacctgacttttccccccgtactgtttaccacctcccccttccctccacccaaggcactttcttgtgttccaatgccactaatccctcttacagtagaaactccgtagtttagctgctgagggcttgaatttgtgacccacctgtttcagaaatattttcctagggacccaatgaatgccattacatacaaa

SEQ ID NO: 12594 - DNA, 6000 bp, Homo sapiens
agcttactatgtcccctgccatctgccccactctggggctgcctgtcagtatttctctccattccctcccttgctgcctgcctggatttctcagatgaaggacaccatggtaagttggggaggggtgagagtgtttcccagaaggccaaggagaagggtaaggaggccctcagctgagcctgcacccccgccctcctgagtgccggggccctgctcggctctccctgagcaccatgtgcttctctcacctgtgtggggctggctttgttctgtctctgccccagcctgggtactctgtcaccctcactgttcctctctgccattctctctggtcccttctcccctgtctggggtttgtccttcttggtttctgtgtcttggcttttgttgcccccgcttctttctgtcataccctttttgtctttctcaggcatctctttgtaacttacgtggctgtcccctctctccctcttttcatgtcccacaagcctcttttgttcttcccctccgttcgtccccctgtggccatggggcctccaggggctctggaccctgcttccctcacgatgggacaggtgctgaggctatgacaccagccaggcagcaccctcaccaccgctctctccaccctgtcttcagtgatggagccacctgtcatcacggaacagtctccacggcgcctggttgtcttccccacagatgacatcagcctcaagtgtgaggccagtggcaagcccgaagtgcagtgagtgatctctgccgtctcagcccctgttgcctgccactgaccccggccttgtgcctccctggactgcctaacttctaagcccagaagccccaaaccttgctaatcaccccaagtcctcgccatctcccagtccatcccctgggggccctggctgcttgcacctgtccctccagcctgttccagcccccgttgggttccagggcctcaggcctctgggcctttttccgcccacaggttccgctggacgagggatggtgtccacttcaaacccaaggaagagctgggtgtgaccgtgtaccagtcgccccactctggctccttcaccatcacgggcaacaacagcaactttgctcagaggttccagggcatctaccgctgctttgccagcaataagctgggcaccgccatgtcccatgagatccggctcatggccgagggtgcgaggcgctgcagggaccagggagggcaggtcccggagttcgtgtgggattgtgggctggaagctgctgtcagccagttgtctcgtggcgaggggcctgggtgtcctgccagccctccaccccaccccagcttctcccctggcccatcttgtttcttgtgcagtctcctcctttgccctgtctctgtctccattgcacttccggtcatctcatgccctttcactccctcaggctttcctggtgcctgcctcatggctgagcaggaaggtggcggggggaggggggggcgggctggtggggggagtgactgattctgggcagacctgcctgagtcactgcagtcatctctgtctacacctgcactccttagcagggcccctcttctctggcttttccacttggctctccatctcctcccctccacctccgacttggtctctcttgctccacggctctgtcttgatctgtgtcgccttttccctggggttttccctttgcattccatcctccctgagctttctgcttcctgagcgctctcctctcccctccccacccctccagttaccttgggaaccgttgccatggtttctgtgtcaggatgatggaagggtctgtgactcctgcatccctccacagctcccctcccccatcactgcacctcagcctcagcctccccccacccgtcctttcctagggtgggcagggagagctgagaaccgtggaaggttaacccttcctggcctcctggtctcctgctcaccctggcctccctaagtgctagtctctgctatgagtccagaaggtatccagagtgtctgcctccttttctgtgaagtttctactggcctgaccctctcgccccctcgtccatccctggtgtagcccgccacccccctgcccccacctcccttctcctgcctagcaccatctggaccaggaggagagtgtcagcccgtctgtcccttctaggtgcccccaagtggccaaaggagacagtgaagcccgtggaggtggaggaaggggagtcagtggttctgccttgcaaccctcccccaagtgcagagcctctccggatctactggatgaacagcagtgggtgccggcgagcggctgcctcgtggggtcggggtgttagcgggggtgtcttcctggacggggtcatgacttcggcctccttgccccctgcagagatcttgcacatcaagcaggacgagcgggtgacgatgggccagaacggcaacctctactttgccaatgtgctcacctccgacaaccactcagactacatctgccacgcccacttcccaggcaccaggaccatcattcagaaggaacccattgacctccgggtcaaggccagtgagtctcagaggctctgcactctctccctgactcctttcaccctcaggcatggcccttcccaccataggtccatctgacaactccaggcttcctcaagaacagcttggctcccacctctaccctgcccagaccccttcccaggcgtcgagagcagagacaggacactctccttaatggaggaagacacagaggccccgggggctggctggagtgtcgagtccctcagccttgcaattctggggtggagggaagagtgggcagcccacccacccactttctcctggcagccaacagcatgattgacaggaagccgcgcctgctcttccccaccaactccagcagccacctggtggccttgcaggggcagccattggtcctggagtgcatcgccgagggcttgtgagtctgggaacccagggcagggcagggcagggcagggtggcggagccctagcagggagctcagaccaccgcggggtatagggggctggggtgattggccttgtcctttctcccttctgctctcttccctttgcctcccgggcagtcccacgcccaccatcaaatggctgcgccccagtggccccatgccagccgaccgtgtcacctaccagaaccacaacaagaccctgcagctgctgaaagtgggcgaggaggatgatggcgagtaccgctgcctggccgagaactcactgggcagtgcccggcatgcgtactatgtcaccgtggagggtatggacctcctgggacagtggcctgtgatgcccactgtcatgggggaggggagggtctgcgccgggtcaagagccagctgctggctgcgggctcagggcggctctccccttcctcccagctgccccgtactggctgcacaagccccagagccatctatatgggccaggagagactgcccgcctggactgccaagtccagggcaggccccaaccagaggtcacctggagaatcaacgggatccctgtggagggtgagcagggcctcaggcaggagtggggagtgtggcgagccctgggggctgtgggggagaggaagaggagggtgaggaagggcctcaacgcagctcaatgccgggctgtggcccatgggcccacctgctgcatgcacagagctggccaaagaccagaagtaccggattcagcgtggcgccctgatcctgagcaacgtgcagcccagtgacacaatggtgacccaatgtgaggcccgcaaccggcacgggctcttgctggccaatgcctacatctacgttgtccgtgagtgccctcccttccttacctcctaactcccagtctgtccctgcagcccactgggccaggccaccagagtggctcagctggcagctgatgtgtcctcggcctaccaggctggcgccgacctttctccttgctgacacccttcgccccatctcactcagcctcacgatagccgagggagatgtaagaggggaaaggtcttgtcactgtgactgagcggaccgctgtgccacaggatgtgaccaaggccagcccaggtggcacctctcctggaacttcagggaaggctggggactaggccaggaaggcttctggggagaggtgactgtcagttaggcctggaataacgtaaaagttgggtggctgtgaccagaggcgcatctgaggcagagggcagtgtctgaaggcagagagagacacagcctggcgggggcctcagctgggagcagggaaccaagatttgcagggctcttgggggcccgaggaagccgtgcagagggtccctggctcctggcccagctgtggtcccaagtcctgccctgtctcctgaggctgttcctcccctagagctgccagccaagatcctgactgcggacaatcagacgtacatggctgtccagggcagcactgcctaccttctgtgcaaggccttcggagcgcctgtgcccagtgttcagtggtgagtgtctcgtcctggtagtggtgagtgtcgtgtcccagtggccagggagccagggagggcagggagcccaggccagccagtcagagccaggcccgccctgctccctccaggctggacgaggatgggacaacagtgcttcaggacgaacgcttcttcccctatgccaatgggaccctgggcattcgagacctccaggccaatgacaccggacgctacttctgcctggctgccaatgaccaaaacaatgttaccatcatggctaacctgaaggttaaaggtcaggcaacccttgccacatggctggcagtgcctctgggagggagggtctgggcctctggaggacaacagagtgacttccccacgcacgcattaccctcagatgcaactcagatcactcaggggccccgcagcacaatcgagaagaaaggttccagggtgaccttcacgtgccaggcctcctttgacccctccttgcagcccagcatcacctggcgtggggacggtcgagacctccaggagcttggggacagtgacaagtgaggacagtgacggtgaaagggggcagagtgggaaaagctggaagtccagacctcttggcctcgtccttgctttgatggggaaggctctgacaggagcgggggaaggagacaggagggagggatgggaggggagaagagcccagatggcaggaaagacagacacggctcctccgcaggtacttcatagaggatgggcgcctggtcatccacagcctggactacagcgaccagggcaactacagctgcgtggccagtaccgaactggatgtggtggagagtagggcacagctcttggtggtgggtaagtcctagggtggaagcctccactccagaaggccggggctcacatccctgggccctttcaagcaccgaccctccccaccctcagggagccctgggccggtgccacggctggtgctgtccgacctgcacctgctgacgcagagccaggtgcgcgtgtcctggagtcctgcagaagaccacaatgcccccattgagagtaagaggcttgagctcagtgccaccccaccgtcacttctgccagccctggcccctcctggggtcctccctcctcctggagccttcctggggggacacggtttggggggactcacggttcctcatgggaatctggagatgccagttggcctgggtaatcagggacccagactgtacccaacccctccacagcccttcccccaaagccacatgctgatcactccattgtcggttcatttcttggcagaatatgacattgaatttgaggacaaggaaatggcgcctgaaaaatggtacagtctgggcaaggttccagggaaccagacctctaccaccctcaagctgtcgccctatgtccactacacctttagggttactgccataaacaaatatggccccggggagcccagcccggtctctgagactgtggtcacacctgaggcaggtgagtcagggtggcaccc

SEQ ID NO: 12595 - DNA, 6000 bp, Homo sapiens
tctttttccagcacctggcatgtgcctgcctgtgtctagaacacctttcccctcattctctgcttggaaaaattctgctcctgcagaggaaggagcaatctggattcaaatcctggctttgccacctcctaccccatgaccttgggccagcagcttaatctctgtgatcctccctgtctggagaatagggatcaaaatggcccctatcccctggggttctcaccccacaagcctgtttgttctcctagaagcaaaaccctctggcctgcaggtacatgctactgccaccatggaccaatgacaacgcactgttctcaatgagtctcttagtgacatccctgagagaaggggttatggataatgcctccttgaattctaatgccaaggctccaggtccacaggatccctgggcagttgcagagagttgaggactttccaaggacccatccctcctcccacagcctctgtcccctctgctggcatgtgatggagctgggcctcatgttggctcccgggatgcctacccccataggtccctccaaaacagagacactggccaccagctttcctgccccagaagtgcctccctgcactcgctggaggagcagctcacctcggcacacaggcacacacttgcccaagctgaagaagtgggagtgtagctccttggtgaagcagatgtctgcagctgcaggggtcctaagcagggacagatgcaattagtcctgccccctgcaccccgctccaccaccctgcccccagcatcagcatgcagaagggaggcacaggggagggcctgcggggccccaccccatgccctgcctggactgctggacgccacctcctgggcagagcaggaggagggcaaatctgggcagaggcaggtggggccggcccggcccacttcgaggggcccattcctcctcaccaacgcatcaacttcaggttccagatgtggcggagtttcaggatccctagaggacaggaaaggcttcatgccccaacttcccatatccccagggagtgcccttccttcaccccatctcagggaatgagggacagcagcactaccatttccctacagcccaaagtggcatctttcagacccttaggccagatcattcagttctccctggctcctccctctcccccaccctccacatcttactaatcactgcacctggactgcctacctccccaacatacttggacaatgcccattcttctatacttctccctgtactgtcactgcaaccagcccagtctaggctagtggatggctccaagtcctccttcctggcctcccaggatccacctgtgacatctataggcctttctccacccagcagccagggtgagctctgaagggctccagtgtggctaggtggctccccatgaactctaggacagttaagctctctgttcaggagtggaagccccaggcacccctccacccggccatctggttaccagagccaagcaacttcctgtgaagtcagcagagcaggaacctctaggtgtggcaaccaggctcccaaatagggctgaacggtacacgcccagccaggggcaaacctgaagccaggacactgggcttccagtccctggcccagaacttcctcacaggatatcctatgtccaacccccaaatttttcccaagactgtggggccctggatggtttagagaacagagggttctggaggcctgacgttaaaggagctgtaagatatgccctgtggccgttccttggtcctgctccatgcccaaggccctctccaaatcatgctccctcagggatgctgcaggagccacaaatccaagtctcagccctggggcagaacgcccggaaaccggagtgccagggctccatgaaaaggcagcgagaaggggtttgttctgacgaggctgggcccgtcccgaatcctcgcctttcctccccctgcccagcacactggcccgggtaccccagagatgagggtcgtccatgcaggactggtgattggacacggtgatgaggggcgtggccgggcctcgcttctcgatgagctcgtacagcacctccctgttgtgcacggtcaggtggttcatgtactctggcggggaaggagaggtcaggcgctccgggctcgcccgctaggtcggggccgcggcgtcccccaccctaagtcccacctccggccgggcatgggtacccgggcgggcctgcctcggcctgggcccactcactggtccagaagcagctgtaggtgcccaccaagcccatgacgacgctgctggccagggtccaggtgagcggcggcaccgcggggaacggccacttcacgtgcagaggcatccccacccggcccgcggccggcgctcccagcgccccgggccggcctgtggggcgcctctaggtctgcgacctcgaccgctcgagacactggcccctgactggcccgcgcacggacggacagggggcgcggcgcaacaggggactggaccgaggtcccttcgcaggtcaggccggagcagcgcccggccccgctctctcgtcactggggagcggtcgccggggtcacaggccgtgggcgcgctgcggaacgggaggaaacgggaaggcgggcgctggcaccccggcccggtgcaaccgccggaaagcgaacctgcgccggtgcccagcccgaccgactgtcgcaaagcgcgcacgggccgcttgacggcagcgaggccagccccggggcggcgggaagtggccgtcaccccgtggggctcccgcttcctggcagcctcctgcgctcgccttttgtctctctagtgtttctgttttttgtttgacacagggtccagccagacccaggctggagtgcagtgatgggatcatggctcactgcagcctcgatctcccagactcaagcgattctcctgcctcagcctcccgagtagctgggaccacaggcgcccgccatcacactctgatccacccgcctcggcctcccaaagtgttgggatgacagccgtgagccaccccgcccagccacatatacaatttgacatagttacagtactacatgatactatgtgtatgtagcaatgtataatctactgtatggcaaaatatacaatatatacagcaatatatacaaacatattgtgtatcatatgtaatacaagaaacagtattttataccatctgatacagtcacaatgtcagctactacctctagttctgaaacatattcatgacccggaaagaaagccccctatgcattaagcagccagttttttatttttattttatatttatttatttattattatttttttaggagtctcgctctgtcgccagactggagtgcagtggcacaatctcggctcactgcaacctccgcctcccgggttcaagctattctcctgcctcagcctcctgagtagctgggactacaggcgcaggtcgccacgcccggctaatttttttttttttttgtattttagtagagatggggtttcaccatgttgcccaggttggtctcgaactcctgagctcaggcagtccacccacctcagcctcccaaagtgctaggattacaggcatgggccgccgcacccggcagttttttatttttatttttatttatttttatttttgagacagagtcttgctctgttgcccaggctggagtgcagtgacgagatctcagctcattgcaacctctgcctcccaggttcaagcgattcttctgtctcagcctcctgagtagctgggattacaggcgcaagccaccacacctggctaatttttgtatttttagtagaggctgggtttcttcatgttggtcaagctggtctcgaactcccggcctcaggtgatctgcctgcctctcctcccaaagtgtgagtcatcctacctggcctgttttttatttttaaaccataatttattgatttttttttttgagatggagtctcgcactgtcgcccgggctggagtgcgagtgcagtggtgtgatctcggctcactgcaagctccgccttccaggctcaagcaattctcctgcctcagcctcctgagtagctgggattacaggcgcccaccaccacgccgggctaattttttgtatttttagtagaaacgggtttcattatgttggccaggctggtcttgaacgcctgacctcgtatccacccgcctcagcctcccaaagtgctgggattacaggcatgagccaccacgcccagcccataatttattgattttttaaaatttgtccagccttctattaccacgtcgaatccattagctacagccatcccatgagaagctgagtggattcagccccacctcctgctcacagaccctgtccgagcacctcatttgtcccaacagcattactgcaggacccccaggacgttggactgccagctccctgggtctcctcctctctggggcagatcctcagtcctcccttgacttcacgactgtggccagatcatgtgtggactgtccctctctttgggtctccagagcgcttgcatcaaacacccctaactcagaagtgtgcagccacactgggactcagaacccaacaacagggacagaagactcacgcccttggggtgcccggtctcgtggcatcaggcatgacttccagctcctgcgccttccccagcaactgctgactggggacccagaccgggagctgagcgacgggcctggcgagcgaagctcggggtctcactcaggcaccagcccctccttgccccaggcttgagtgactcacaggtctgtcatgtcccgctggcccgggaaggcggggtctgggtgggaaggtgggcgggcaggtcagcagttcccaggcctggtgctggtcctccttgttggcggcgaggcggagacggggcgggcctgcctgttggcaagggtggggcgtccggcccagccaggcccttcctggccgggtggctcaggaacacagcctcttcctcttttttttcccctcctagccctattcaggcaggagctgctcttctggggtatcgcgatccacttaaggatgaggcagacttggtgacaagctggtctgagcaggtatgggagccccctggggagacggaagaagggaggaagttgccttctgcctggggagggtttgagagggagagggaagcctagggctcccaccaaggctgatattgacagccagggtttggggctgaagccaggaaccgtcactctctctggttcttactggtagccctcatgggggtccctgacgccagagcctccaaggctgcatgtgccagcccagggctgcccacatacccatgtatatcccagaataggcaccagggtagggaacccaaactagcatgagtgacagagcaggtggtcagggagaaacagacatcaaacccagccaggagagagacaccgcaacagagagacagagaagggaaaccagagacgagagggaaagtgagacagagacggacagagcctcagagaggtaggaagtgagcccgaagggaaggtgacaggttgatagagaaaagcaggcagacagagcagaggaactcatgcctcaggatgcaaaagccacatggacagggcgtggagcaaggagccgagccctgcaaggtcaggtgagtgtgagacaaagataaactgagagagggggcctccagctggtgagatgaacaagaagggctccccagtggtggcaggggcatgggaaagagtccccatcacaggttgcaatggggatgatttggccatatctgagaccttttaaaatgcacacacccttcactgccgggagtttatcttaaagagaacatctcacaagtggggagacagagatgaacgaagatgttcctgtagttgctaatggaggcgaaaagcactggggtcttggaacaacatggtgaaaccccatctctccaaacaaattttaaaaattagcttggtagccgggcgcggtggctcacacctgtaattccagcactttgggaggctgag

SEQ ID NO: 12596 - DNA, 6000 bp, Homo sapiens
aaaaggtaaataggaaaagtatataactggatcagtgtgaacctatgcaaacaaatccagaaataaaaccattaatttctaaaacaggtgattttagtaaattagacttttaaaaaaattcaccatgagtagttgtgagtttaaaatgtatttcgtttcaaaaagagtttatataagtacaaccactaactttttcagacatgaaaataccatgttctgggctagtcatttagataatgaattatgagaataaccaaaggctgtgtttgaggtaacattagcatattttgcccatccctcagatacactttgaaatactgtggtccacagaccattctatcaagtgacaaattcctagactgaaatgactgtagatactttctgtatagcatatcttatgttatgcttaaaagatgaaatgagctttatatgtttgtaggtaattaaaacacaagtataggatagttaaaagacaccatcacttatactatagacttataaaagggatcattttagaactctacgtattccagaaaagttatatagaatcagttcctaagactggctaaacttaattgaattcatttttcccatttttatctcgagaagatatcatattaggtagtgaaagaggcaaaaatgtaaaaaaagaaaagaataattccattgaatcctcaaattaaatgactactgaggcattgaaagttaatttgagtgcggggattcatggaaatgttcatttgtgcagttacagaaggccatggattttaatttatctgtaataaatctggttgataccaagagctctagaactcactgtatttattctatacccatcagttactccttccctaactttatttttttttttttttggctctgttttataggaagaagaaaatctgtgagctctatgccaaagtgctgggatcccaagaagctttacatgtaagaaactcccagctttaatccctagcaggttcttctctgttcactataagtagtaaagcaaagcatattctgattttttgacagtcttatgaagagagtataaagcgatatgcttaacttggaggataaacttcagcagtcacaaaaggtcattaaaagctggtattaggcgcatggaatttctgacacagcaacttctttgggctgtttaaatgttcactagataactggcagccaattgtaatgagagcctagagctgcagggattatgtcaagaatgggtgagttgggttcctagaacagaagtcctgcccccagtcagtgtcacttacctgctgcacaattaaattccagatatgttatcatttgttggtgaaggcaaagtagtatgtacttgacaagatagactgaatctagagtctcttcccaggtcaaagtcatactaatttgtttttccatgtgtgaactcaattcacaactcatttaggaatatcagtgctttcaatccaccactgaaagcaattaggagaatgaaattacgtctttttgaaaaaaaaaatagaatggctgagcgctctttcaggggcttgtctctaaactgttcaaataataaactttctgaatgtgccagggaaattagagaaggttctctcatgtcccctaggaaatagttttcatcttaattgccgctttttcgtggaattcccatcatacatgtttccagcttagaaaagtggctgggaaaaaagcctttcttagacatttgtttgtcttctgcctcctccctcccaccctttccttagcaataatgcctgatagatggggaagtaaagtctgttattagggactccagagatttgagcagacctttccacaagctgaattgttgatggggtttcctatagacttagctctaaagacttcagaatctgcatggatggatggatacccctctctcccagatactggaatacttcatgtcttccctaatcaagaaaatgggaagagcaaagtatacatgttttgccacatggtacttcacaaaaggccattgcttggtactatcatgtttccccttaagtgagttagaaaaacaggattttctttattttcttaatgtaaactttttgttaaagcaacgatattattgactcgcagcatttcagctttgttttctcttttgtattttcttccccactgaactgcagccagtgcattatgaagagaagaactggtgtgaggagcagtactctgggggctgctacacggcctacttccctcctgggatcatgactcaatatggaaggtattacgcaagcactacgccaattaatccaagacctgtgccaaatttaaaaggaaaagcagagttcaatgcaaattctagaaatagttgtcaaaatccccatttcttatgtcctagataatacttgtatatttctggatgtccatagaaaaataaggatgtcattacatagaacaatagctgtcagcatacagaacaatagcagaacagtggggaggatttcagatgtgaacagtgcttgtgagaatgaagcaagctacagtgtcctccaaggggacttcgtgagctcaacttgacatttagtctcacatgactgccttaggctccttggcaccagtcaacacagaaggacattggatgtgtttatccaacacttctgtcttgccaacagagcagcatcagcagacagtcctcttcaggggaagagtcctcactgtatacagttgagatgtgaggaaatgacatccacgtggggtgggtccaccttgacctagaagccccttgctccatgggagccattatctctatgcttcataggcatagtgtccggtaccttgctcagttataagacttgctcagttacaagagacaccacactcagggaagcccaaagtgatagcctcctaccaggtatttacaattcatttagagtcctcccagcctggatgcagttcactaatgtggggatgggaggggaggcacttttagcataaatggtgttgcctccatagatggcattacaccttcatctggtttccagagaaacagagctagaaagttaatacaaggtcacatttgtccactgaaaaggaggaagtatttattaaccttttcgttacaggagtttttagtctgtttttttttcttcttaattgagtcagatcgcctttgttaacaatagcaggattgatgaactggattagttctggtatcaaagtagaagtctagaagacaagactaagatgaggaatagatgaaacccagggttctggaattggaaaaaggagtgccaacgggttgagatgaaggccatcagggtggggggcaggacatgcagcttgggagagttcatgaaactagctgtggacatggcaggagtcaaagccaaaaagttggaggggacagctgtccattcagtccagcccttctttgtaagaggagacccatttccttgctctcagccagtccccagagaagttcagagaagctaactgtacagaggttgttttcttaaagagacacacccatataatgtctcaggtctctcctttgccagaaatgatagttgacgtccctgtcttcccacctgccactgcagttcctcctgacacactgggagtgcctgcaaagctggatctgtggctgttttcaagaagagtgcaccttcccccgagaaagacaggacagggagaagaatggactgccaacaggaaacagcaaagaaatctgatttggggattgaatacatgttcttatattccagctctggctggcttggaaaagatcaacatcccctttaatgattgatgatctgatggcctgattctccctgacttgaaagttcagatcctctatgcagatccagaaagcaaaaagtggcctttcaccttgggctaagtcatacgggtgttttttaaacagtctgaatttctgtgccttctgcagactaaatgagggcagtgattggctcatttaccctgcccaccttcccaagtaactctgtgtaacctcttggttcccttgaagggtgattcgtcaacccgtgggcaggattttctttgcgggcacagagactgccacaaagtggagcggctacatggaaggggcagttgaggctggagaacgagcagctagggaggtaagcaggaaagcccaggctctctccctcccgagtcacggcaacgtttttggcatctggtcttgctagttcttgacactgatagaatctgtatgtccatttctctgcccctcactcatggggctcatctgtggctagcagggccttgaatctgtagaaactatacagcctcttttcataataccatggtgactttctttcaggtcttaaatggtctcgggaaggtgaccgagaaagatatctgggtacaagaacctgaatcaaaggtaagtttggtgactctgggcactatctctccttagaccaatcatggaacataaaactcacatctcccttcttctagcctccgatttaattatagatgcaactatcccaggggtctccatgcatggatcttgcagtgttttgttcctccttgtcagcatgagttttttgctcatgatctgtgttccttcatctaggacgttccagcggtagaaatcacccacaccttctgggaaaggaacctgccctctgtttctggcctgctgaagatcattggattttccacatcagtaactgccctggggtttgtgctgtacaaatacaagctcctgccacggtcttgaagttctgttcttatgctctctgctcactggttttcaataccaccaagaggaaaatattgacaagtttaaaggctgtgtcattgggccatgtttaagtgtactggatttaactacctttggcttaattccaatcattgttaaagtaaaaacaattcaaagaatcacctaattaatttcagtaagatcaagctccatcttatttgtcagtgtagatcaactcatgttaattgatagaataaagccttgtgatcactttctgaaattcacaaagttaaacgtgatgtgctcatcagaaacaatttctgtgtcctgtttttattcccttcaatgcaaaatacatgatgatttcagaaacaaagcatttgactttctgtctgtggaggtggagtaggtgaaggcccagcctgtaactgtcctttttcttcccttaggcaatggtgaactgtcattacagagcctagaggctcacagcctcctggaggaagcagcctccactttggatcaggaaatagtaaaggaaagcagtgttgggggtagcggcatgcagaccctcagaccagaatggggacatcttgtggtctgctgcctcaggaatctcctgaccacttgtagtccctccgacttctctagacatctagtctcagtgctagcttatttgtatttttcctctttcacttcttatggaggagagtgtttaactgagttagaatgttgaaactgacttgctgtgacttatgtgcagctttccagttgagcagaggaaaatagtggcaggactgtcccccaggaggactccctgcttagctctgtgggagaccaactacgactggcatcttctcttccccctggaaggcagctagacaccaatggatccttgtcagttgtaacattctatttcaacttcaggaaagcagcagttttcttttaatttttcctatgaccataaaattagacatacctctcaacttacatatgtcttcaacatggttacctctgcataaatattagcaaagcatgccaatttctcttaagtactgaaatacatatgataaatttgactgttatttgttgagactatcaaacagaaaagaaattagggctctaatttccttaaagcaagctcacttgctttagttgttaagttttataaaagacatgaaattgagtcattttatatatgaaaactaagttctctatcttaggagtaatgtcggcccacaagggtgcccacctcttgttttccccttttaaaaactcagatttttaaaagccctttc

SEQ ID NO: 12597 - DNA, 6000 bp, Homo sapiens
tacccaggaactgaactcagctctgcaccaagcggacctaatagacatctacagaacactccaccccaaatcaacagaatatacatttttttcagcaccacaccacacctattccaaaattgaccacatactgggaagtaaagctctcctcagcaaatgtaaaagagcagaaattataacaaactatctctcagaccacagtgcaatcaaactagaactcaggattaagaatctcactcaaagccgctcaactacatggaaactgaacaacctgctcctgaatgactactgggtaaataacgaaatgaaggcagaaataaagatgttctttgaaaccaaagagaacaaagacacaacataccagaatctctgggacgcattcaaagcagtgtgtagagggaaatttatagcactaaatgcgcacaagagaaagcaggaaagatctaaaattgacaccctaacatcacaattaaaagaactagaaaagcaagagcaaacacattcaaaagctagcagaaggcaagaaataactaaaatcagagcagaactgaaggaaatagagacacaaaaaacccttcaaaaaatcaatgaatccaggagctggttttttgaaaggatcaacaaaattgatagaccgctagcaagactaataaagaaaaaaagagagaagaatcaaatagacacaataaaaaatgataaaggggatatcaccactgatcccacagaaatacaaactaccatcagagaatactacaaacacctctacgcaaataaactagaaaatctagaacaaatggatgcattcctcgacacatacactctcccaagactaaaccaggaagaagttgagtctctgaatagaccaataacaggagctgaaattgtggcaataatcaatagtttaccaaccaaaaagagtccaggaccagatggattcacagccgaattctcccagaggtacaaggaggaactggtaccattccttctgaaactattccaatcaatagaaaaagagggaatcctccctaactcattttatgaggccagcatcattctgataccaaagccaggcagagacacaaccaaaaaagagaattttagaccaatatccttgatgaacatcgatgcaaaaatcctcaataaaatactggcaaaccgaatccagcagcacatcaaaaagcttatccaccatgatcaagtgggcgtcatccctgggatgcaaggctggttcagtatacgcaaatcaataaatgtaatccagcatataaacagagccaaagacaaaaaccatatgattatctcaatagatgcagaaaaagcctttgacaaaattcaacaacccttcatgctaaaaactctcaataaattaggtattgatgggacgtatgtcaaaataataagagctatctatgacaaacccacagccaatatcatactgaatgggcaaaaactggaagcattccctttgaaaactggcacaagacagggatgccctctctcaccgctcctattcaacatagtgttggaagttctggccagggcaatcaggcaggagaaggagataaagggtgttcaattaggaaaagaggaagtcaaattgtccctgtttgcagatgacatgattgtatatctataaaaccccgtcgtctcagcccaaaatctccttaagctgataagcaacttcagcaaagtctcaggatacaaaatcaatgtacaaaaatcacaagcattcctatacaccaacaacagacaaacagagagccaaatcatgagtgaactcccattcacaattgcttcaaagagaataaaatacctaggaatccaacttacaagggatgtgaaggacctcttcaaggagaactacaaaccactgctcaaggaaataaaagaggatacaaacaaatggaagaacattccatgctcatgggtaggaagaatcaatatcgtgaaaatggccatactgccccaggtaatttacagattcaatgccatccccatcaagctaccaatgactttcttcacagaattggaaaaaactactttcaagttcatatggaaccaaaaaagagcccgcatcgccaagtcaatcctaagccaaaagaacaaagctggaggcatcacactacctgacttcaaactatactacaaggctacagtaaccaaaacagcatggtactggtaccaaaacagagatatagatcaatggaacagaacagagccctcagaaataacgccgcttacctacaactatctgatctttgacaaacctgacaaaaacaagcaatggggaaaggattccctatttaataaatggtgctgggaaaactggctagccatatgtagaaagctgaaactggatcccttccttatgccttatacaaaaattaattcaagatggattaaagatttaaacattagacctaaaaccataaaaaccctagaagaaaacctaggcattaccattcaggacataggcatgggcaaggacttcatgtccaaaacaccaaaagcaatggcaacaaaagccaaaattgacaaatgggatctaattaaactaaagagcttccgcacagcaaaagaaactaccatcagagtgaacaggcaacctacaacatgggagaaaattttcgcaacctactcatctgacaaagggctaatagccagaatctacaatgaactcaaacaaatttacaagaaaaaaacaaacaaccccatcaaaaagtgggcgaaggacatgaacagacacttctcaaaagaagacatttatgcagccaaaaaacacatgaagaaatgctcatcatcactggccatcagagaaatgcaaatcaaaaccactatgagatatcatctcacaccagttagaatggcaatcatgaaaaagtcaggaaacaacaggtgctggagaggatgtggagaaataggaacacttttacactgttggtgggactgtaaactagttcaaccattgtggaagtcagtgtggcgattcctcagggatctagaactagaaataccatttgacccagccatcccattactgggtatatacccaaaggactataaatcatgctgctataaagatacatgcacacgtatgttcattgcggcattattcacaatagcaaagacttggaaccaagccaaatgtccaacaatgatagactggattaagaaaatgtggcacatatacaccatggaatactatgcagccataaaaaatgatgagttcatgtcctttgtagggacatggatgaaattggaaaccatcattctcagtaaactatcgcaacaacaaaaaaccaaacaccgcatattctcactcataggtgggaattgaacaatgagatcacatggacacaggaaggggaatatcacactctggggactgtggtggggaggggggagggggaagggatagcattgggagatatacctaatgctagatgatgagttagtgggtgcagcgcaccagcatggcacatgtatacacatgtaactaacctgcacattgtgcacatgtaccctaaaacttaaagtataattaaaaaaaaaaaaaaagaaagaaagagaaattccagagcaaaaaaaaaaaaaagacagtcacagttgggccacaaatggcttttgctttttcagcaatgtagctcatggccacttaatacagtcagttgccacttcattttcaatcctcctccttaatgctagattagttcatcaagtgagtgagataatataacaatgatgaactgaaagcatacaggtcccatgcagtgcctcacatttcataaggttttgttgtattaacatttcagggtgtatcgaaccttaagaattgatgcaagtaatactatttcaaagctctacacatagggtccagttattacagcacactgtgactgggttaatgtttaacagtggctgtcctttgggttcccttagggaatcctcccaatttagggagttgggagatagcaattttatttttctttaccggactgaccttattgcacaattaattaagacctgctttaaaatagccttcacaaccctttaaaaccatggaaacatcatagtgaatttattgtcaggctaaaatagctactttcatccaggttggattaatgagtaccagagttgttgttgctttctgcgtagagcattactactcagaaacaactcattttcttgactatactctgggttttcaaagtgatgaggtgctgttaaagaactgaccttgtatagtaagttcatatgaagtttagtttttcacgttttcctttaattatgatttgtacataagcataaaacatgtgtacagtttaaagaataattattaagtgaacactcaggtaaaccacctcccagatcaagaaaaatgaccagcattccagaagccctgcccttgccatgtgcccctcccacatggcagccctctactctgggtagcttctgtctttacttttgccatttccttgcttctctttgaaatgtaatcacttacatttgtattctaaaatgatataacttgcttgcctgtttttgaacttagaggcatagaatcgtaatgaatgttttgtgcatttttgtgtctggtatctttcactcagcattaggtttgtgagactacccacgttgctgctatctagtgtattttttaaaaaaccttttttatatttgcctttctcccttttatacttaggacccctgtaactctaaattcttttggatatttctactttgccttcttggactttctgctaaatgaagactaagacttgtctggacccaggtttcctgagctgacccgactgcccgcagtttgatggcatttgtttagatgagactacatctttaaggcttctgtgcccggttaaaaatcttcctttctcccaggctggtccaaaggtctggtcacgtgactccaacagtgacatcacattctgaccgccagggaacactggtagttctttaggtggcgtttgttgctgtgaaaggcagagaatgcagcaagtgcccttctaaagcacttcagactggggcttcttttgtaaaagctccccaacctgaatgaccaaatgcgggctgccaaggttatttcttccttgaggcagaaaaaaagaaaactgtgattgaaggtaagcagacttgagcctgaccaaggactgaagcatgccccccgggagcaggggatctggagaattgcaagcagtctgttgtaggattctaatcactgcctgctctttgagaggggcctgacaattgcgtttctaaggaaaccagactacaaaggaggatgatgcggtgctcatgttacctagtgatgtaataggattctttctttcctgctagaagctgttgcagatcttcattttgccttaatatccttaaaggtgggggcctcatttgatatatagtgtatcattagatagctatcagatgatttttaaaatcagtttcacaaaatcctatttttccccttctgaaaggagaactcttaaaccagagcaaattcaactggagcattaacctgccttaaaaagtaaatatctggttgtttggtgtcatgtgttcatgtcagcattggacttgagaattgaaacagcttgccctcccccacctccacacacacatactttatcctctttctgccctcatttcctagctggctttttccctctaagctctcaagaaacacatcagctttcatctttatcagtatgacactgacatgataggaaatgctgggctggtgattcagcagccatccattttacagtcaggtacgaatgaagatatggaaaggactttggttggggtttaagattaacttgttcaccttttccactccacccccaccccgcccccaccctacagatgatttggactctgcagagctttttctttcaaatgtgcaccttgcctgtgaaaggcatgctgacttaggtattcagaagacttacaattggtaaaccaattgtaagtacagcttggggtgtt

SEQ ID NO: 12598 - DNA, 6000 bp, Homo sapiens
tagagtaggaggttagtgccctactcagttgctgggtcttaagtcataccactcactgggaaatcgatgatgacaggtcttccacagaggaggcacttgataggtaactaagagaggggttgggggaagatccttcatggttatacttctagcaggaaataatagagtaaatctggagaaaacttaggaaagttggtgtttgagtctcagcatggattctacgatttccagctgggcttattaacatagtgggctttcattttggagtgaaaggattattaatacctaaggatgattaaggacagatgtagactatgaatctctggagggcagaactggtcccagtgcctggaaattataagcaagaatattccaacttacactaaaatagaattccaataatttaaaatatccaacagtaagggagattgtctcctctggatatgagtttcctatttttggaaaggctcaagcagaagctgtatataactttctagtggtgccaccaaaggagatatcttcactggtgggagttaacttagatgagctctgaggtccttcctaaatataaagattcataacttggtgagactaagggtgagatgggagtctatttgatacctaatgaaataatatcatattttcctttttatacatcagtatctcagataagtttttccagaagagctccagccgaattgggggcacttactggaaagtgcgatatgaagcctttcaagatgagacattccaagagaagatgcatttggaggaagataggcatcttggaatcctgggtgaggaatttttaaattatgaaattcatttactagagccagagaattgaggaagactttgaaactgaggcctggacatcacttaggagcacattgtagaccagcatctcccaaagtgagtcttatgagatgattgttttgtgaaagagttatgagtctgaatgtgttttaaaaccactaagttaagcagttaaatagtgctttttatgctacaggatttctaggagccttaggtttatttttgtttatcatgaatctccactttttttcagtgaatatcttccaataccactgatgtacagtacacatttttagaattccttctctagaagtattcctaaagggctatataaggaagtaagactgtataggttctcagcaatctggggccagtagcagattggcatgacatgcagacatacttgaaataggaggaatgcagaataggcttagagtctgaacttgaagaaggtatctagaagggctaaaccaaggttagaagtggtttagtagcatgatggaaccagaaaataaaataggccagatggaaaaaaaactttggaaattaatataatggaccatactcgggataggtgtgtgccagttgattctagatctgataatggacaatagatcttacatcagctggatagggagatacaatgaggagaaatccaccataggaaggagagatggtggtgagcctgaaggaattatcattggctggacttcagtatgagtgcccagtctttgagatgaggtgaaacattagatgtggaaattgaataggaaaccaagctagaaactctgaccaagagttagagccggaataagtgcccagttttggtactttttgtctgcttcaaagatgacctaagctagattacatgtggtgggtaatgaagttcagaagagtccaggagttgtggctagattacctagtacagtgcctggatagaagatatcataattctctttgctcagaattggtttcagattgaggcaagcacagatcttagataggtccacaaagacatgtagctatgggatctgggacaataaagtaagtgaaaatgagattggggctgacaatgggatgagagaaattgctggcctctggtcctggctgaatggcttatcaaccatttaaatttgcataggtaaattccacttctctcagctgaaattttctcatctgtaaattggagttaataatttttgccctatatgccttaaaatgatgtttgagaatcaaaataagataatggatttcccagtgttttctgtaattgtaaattgcaatatacttgaaaggaattgttcttattattacaaagaaaagttttttattttcttcttcactttcactttccttttctttccctccctcttcttccatttccttcctccctgtttatccctttcatcattctcattgtctctccttcccattttccagggccagtgatccgggctgaggtgggtgacaccattcaggtggtcttctacaaccgtgcctcccagccattcagcatgcagccccatggggtcttttatgagaaagactatgaaggcactgtgtacaatgatggtgagccaacagggtttctagtaaatgtgggctctaggtggtaccatgtgtctctagaaaacaaataaatgggagatggagaggatgaagtaggcagaattatttgccatatgtggatgttgttgaatgaatgaataatataatagtaaaacagagctgggcttcaataataagagaaaatttcttttaaatatatttaaatatatcctaattttaaaaataagtttattatagaactctgaaaagcagacaattacaaagtaaataagcatcatttatagattgtcatataaattttgatatacctttaaatatttttatgtgcttatacaagtctatatatagagatatgtgatcatatggtttgtacagttttgcatcctactattctcagttaccattgtattgtgtttgtttttctatgccattaaaatgctacaaacattttaatgactataaaacactttatctcaaggatttgtcgaaatttatttactttttcctctattgcttggacatgtaggtttttttcagtatttttgaatattgtaagtcaggttgcaatgaatgaatgcatatatcctagcttgcattttggattactgtatcaggagagaatcttagaagtgagagtattgtgtaattgattttttactttatctaagaatattaatgcatgctaattctagccaaactataaaagaaaaactgaaagcataaagagcaaagttgcagacaaatctagaatgaacattctataaggcaactggtctagtctcttcaagaagtcaataccatcaataaggggattagagacataacaaatgaaatgtgcaaattttgattgattctgcttgtaaaaatagctttaggagacattttggagataattgcaaaattcttgatatagactggatattagatgttattagggaattttcttaggtggaataatggcattatagcgacataggagatgcgtgctaatatcatgatgtttgtattctacttccaagtgattcaacaaaagcaaacaaacaaaaactgtatgtatgtgtgtgtagatgtatatacacatagagtagataaataaagatggcaaaatgttagcaatagactctaggtgataggttgatcattgcactattttttaaagttttctgtatatttgaaaatttgaaaagtaagaaataatgaatgaataaggaaaggtaggttaaaaccatcctaaattatagccccttgttataagctatactagaaatatccttccatatgtttctttgaatgtttttataaacctttcttcagaatatatttttaagttggggaattgctatatcagaggctatgtacattaaaatttttggtacctacacccaaattactctctggaaagatttgcagtcctatcagtttagagttccattagcagtacctgaggaggactccttttcttacaacctcatcagcactggggaaatctttttaatcttgtcaaaatgacagtcttgtaggcaaacgacagcatcaacaaaactcactgttgttttgatttacatttgtttgattatttcatgttgaacattcagtatttattgcatatattattctacttgtgcatatgaaccttttaaagaaatagctttgtctacattttggtgtactttttttttttcaaattttgtctatattttttttcaagtgttattcccttttacatttacactctttataggtgagtgagtagggtaggtgccatctaaaccacttcttaccatcatgcattattacaatttgtaaaatctttgctaaattaatttgtaaaaaagttatctagctattttcaattgtacttctttgattactgatggcatgaaaatttgaaaaaggtctgtgcattgcttgaccatgtcttgtgtccattttagaaattacagccttagtgttttatatatatatgtatatatatacatacatacataacatatacacacccacatgtacataatacatattaaaagaaaaaaattaaataatcagagctgttcaaagatgacatggactataatggcaggtagtgagtcccccatcactggagagttttaagcagaagtagggatgtaagagcagattaatgtatgttttcaagtgagagatgttccaaataagtcttaaagtccatttttagtcccaaagtcctatgattttggaaaactgaaacatagggaagattaaattgctgcatttcatatagcaagtaatggaagaacgagaaaataaactcatctcttgactccttgaccagagttctcctcattattcaatattccatgttgctgctactgctgctccaaaatgcctttgtagttcataatctttatttcactgtttggagctgatgattctcattctagtcaatctaagtaatgagtcccatattttcactacaggctcatcttaccctggcttggttgccaagccctttgagaaagtaacataccgctggacagtcccccctcatgccggtcccactgctcaggatcctgcttgtctcacttggatgtacttctctgctgcagatcccataagagacacaaattctggcctggtgggcccgctgctggtgtgcagggctggtgccttgggtgcagatggcaagcaggtattgtcagggttatctggctggaaagcctgctgggagaaggatgaagctgggttgctggataggagttaagcatggaactgggttctaaagtttagggaatagaagaaaaataatcaagctggtccatcagaaattaatagttggtgacctcatactatcttgcatgttattttttgtactgacaaatatatatcttccttagccttgcagataattcatgatatcctttcatcatcttcttctttcctccctccttccctccctccctctctctccctttccctctccccctctccctttccctctccctcacctcggtggcccctaaaccttgctcctgatccataaatctgctttaatatttgcttgtcttcttttgtattcagcccacaatttctagctgtgtaacattgggtgagctacttaacttctctttgactccgtttcctcatttgtaaaaatgggataacgatggaagaagacaccttggatttctgtgaagattaattaaaataacccatataaagtgcctagcacagtgtctggcacatattaagcactcagtaaatgttagtggtaacaataattatcactgatattacttatcttttattttctagtttccccccaagaccctcccctgcttttctagccacctcccctcattcctctccccaggtgattaccatctctcttcttttacactctatacctcttatttcttatcctatgctccttccctgcccactttcatacagtcttccctgtcaggcttgtacttttattgtgacattcttctctcatctgcaatttgaggttacctaaggaaaaactgctgcagctctggataggaggtatggtctcaaaatgggaaaaggaaatgggaaagaatctggcatcccttgatctgtaacgacacagtctacaactgctgaaactattgt

SEQ ID NO: 12599 - DNA, 6000 bp, Homo sapiens
ctatgacctttcatcaaagtcaggtggcttaatctgactgagttgcattgagaaatgttattactatatggttcttttatgccaactctctcatctcgcagtctgtacttagactggaaatgtgagaatgtctcttgagagagccaaggaacttctcccctagaatctcttccagccttcttgaatcaaactcacaccctttcaaccaggaggggttctgaaatggagagcttttggctttaggctattgttcacacatacccaagggacatttcttggactgtgaaaaatcaaagggagcccaatggatcttttctcagaatgctttgattgtccaactactttgatgaaaaaataatttcttgcaggctctgagtttttctcagttagaatctaaaatctgattcttgcttggacagactgactgagattcttcacttctgctgaacttaaatgcccccaaagcaaacatttcatctaggttgtgaagagatgaacatctgatgcttatgctgatattactgaattgtttatagcttaatagtgatagatttatctaaagtcatttatttcagactttacattagaaactcattaaagcctacttctttcttgtcccttgctttgagctgtagtggagcagaaaaggggatgctaagttattcaagttctaagaaaatagaggaaaaatggatgtaaaaagaaaggctatgatctggtgactcagaattgctcctaaggcttagccatttatcacccagtaagaacacaatccatgacactctcaggttatttggatgatgattgagggatcagatacactcaagaggatgtttccctctcatctttgcaaccctagaggtggcatcacctaacgcttaaagtggagttctcttttggctagcaagagttcaagttcctccatccctgaccatacctgcacaagcacttagcccttcccagatgaaaatgctgggatgagtgagtaggcccaagatggtcacttgctagggtggatggctcttcttaccctcggctaaacaaacagtcctgccattgttccctgagtctgaccccctccccaccccccggctgcaggcccctgtggaataccaatcaggctcctgagatctcaggaaagaacaaggcttctttgtccgggggagctatggagggctctgtccaagccctgaccctgtgctggggagaaagggaacagtggggtcactgaccttcttctccccccatccccaggcttcagagactttctttactagaaaagtctaagagtttgggggtggggaggagttggataggcagagaaggaaaatggcagtactgtttacttctaagctccttttcttgacttataggctgaatctagtatcttaacctgttgagaaagaggaagatcaatttctggaatgttttctgagaacaacaatcgatttcagttgttgtgtttttctctgtggtatacatgtgtgtatgtgcacatttgtacacatgcatgcatgtgcgtgtgcacacacacagacacacccatgggccagctctgaaaagacactcttcccaagcacgtttgcaaagttcatgctgagtaaactcagcctccactcacagcagcacagctacagattgcttcttatagaggccaagtttcctggcagcaatgctttagttcttggaaaaggaagttctgctccaaatgttagctgcttactttgtttggcttgggcttctgaggctcatctttggtgtgacactctttgaaggccaagaaagggctgtcatttcaggggatggtgggtaataggactcactccttttgtgtctctgagaacagaggcaaatgcctctacctcgattttcccatgacagagataatttgatctttccaaatctgttcacactgatgcaattcagccatgtaaatcactaggtattcatgctctctgggctaaaaacaaactgtaactaatgttaacagaatcaggaaaaggagtcccctttccctggtaccctatagaaaagtgagtgtggcttggagaaatgcttgaatacaaaaatccaagcctaagtaattaatacaatttatttttattgtacaagctgtcacaacctgcttattcaaaaatagcagcttcccagtacatttgctgagtatttgtgtgtgtgcatgtgtatactgtgtttatagatatataaaatcagtgggtatatatacatatatttatatatatacatacatatgaattaagacattttttctgaagagcttaacattctcatttcttctacattttagggatctggccgagaggccagaggaagccattcttttcctcatctagtcagtcatctacttggcatttgctaaggttcactccatatgacatcttagagcatgggactagtacttggaacacagctgctttcagagcctgtgacttcttgtgtgcctctcctgtttctcagcaacactggcatagggcctgggataccaggtctggggatctcagggactcttagcactttaagacacatgtgttcccaggccctggtgtgttcctctagtgccagaaagatgtttcatgctttgctgactttgtataaagtctgtttgtagctgttttgacagaatctcagcgtataactgagggtggggacattagccaagctgcattataggaggacaaaactgccatacaaagtgtccaaaatcattaagcctgcatttttattattgggagtaatatcaaacctcctattttccaattttcatttcttgtcctgtgctagctccatcctgtttggactgctcctcccatatgtaaactaagaagaatcaagcattctttgcaacaaatacacacgatgctcaaaaatgtccaggagcatccaatttccaaagtttcctccacctggaatgctcttcatgctaaaatcctgtctgacaataccagcatctctggcctgcactcatcccttcctggaactccaagtgcatttaccctctgttaccacttacttggctgcctgaattgttagttgaaaatattaggtctacttagctaattcttcctcaggaaattaaagactcccatatggcagagtctgtgtcttttctctcttcatatcccgtataacacccagcataatgctgggcatatagtgagtattccataaatagttgatgaatgactaaaataagcaagcaaacaaacagactagaacaataagaaagaagggactgatttcataatctctctggcttgctatttgaattgctgaattattattatttattaaatattttttaaattctggcaataaaaggtaaggatttattttctttctttctttttttttttcttgagacagagtctcgctcttactgcccaggctggagtacaatggcgcaatcttggctcacggcaacctccgcctcctcctgggtttaacagattctcctgtctcagcctcctgagtagctgggattacaggcatacgcccatgcccggctaatttttgtatttttagtagagacggggttttgccatgttggccaggctggtcttgaactcctgacctcatgtgatccacctgcctcagcctcccaaagtgctgggattacaggcatgagccaccgtgcccggccaaagatttattttcaagaatgaaacaaagtaaggattctgggtcaatctcacatgctgaaagccaaaacctctagccgctcctgctttttgacttcggagtgcccactatctccgagcctgtgagcacagggcctggcagaggggtttgagtggcatgagctacctactggatgtgcctgactgtttccccttcttcttccccaggcttgttagagtgctgtgcaagatgtctggtaggggccccctttgcttccctggtggccactggattgtgtttctttggggtggcactgttctgtggctgtggacatgaagccctcactggcacagaaaagctaattgagacctatttctccaaaaactaccaagactatgagtatctcatcaatgtgtaagtacctgccctcccacacagacccatcttttttttccctctctccatcctggagatagagaactcttcagtaccttagtaactagcaggggactggggtggagccagaccggattcccgagtcttccctctgtgcagatctctcctgctccacattcgaagcccattcagaaaggaggggtctgcctgcctgcctgtcagcccctcccacccccgcccccttgttttcttacacgtgttctgacttctgctaggtgtggttcatattgcccaagttggagcctccagcgtagtaggtatggagaagccaagggaggcactaagcctctcctgttcctagaacaagttaggctcctgttccttcacccacctttcttcttgtctagctccctactcctgtgagttagcatgtctgaagggtggggcagggagagtaggtccctggttctccaggtcccagggtaagcaaggtgtggcgggaggggcatatgtttctggtcacatacaccctgtcttcacttatttcaacaaagataaggtgaaagcatgcaggaggaacctggtgattcctctagaaaatccctagccttgttaaggtgctcgctctggtgtatacctcacttatgtcgggaaagaagccaggtcttcaattaataagattccctggtctcgtttgtctacctgttaatgcaggatccatgccttccagtatgtcatctatggaactgcctctttcttcttcctttatggggccctcctgctggctgagggcttctacaccaccggcgcagtcaggcagatctttggcgactacaagaccaccatctgcggcaagggcctgagcgcaacggtaacagggggccagaaggggaggggttccagaggccaacatcaagctcattctttggagcgggtgtgtcattgtttgggaaaatggctaggacatcccgacaaggtgatcatcctcaggattttgtggcaataacaaggggtgggggaaaattgggcgcgagtctgtggcctcgtccccacccaaggctgggtcctctctaggggcctggcatttgagtgaggaagcgatggctgcagccgaacgagaaggtcaggaagaacgtggtgcccagctggcttagcctcacctttcaaaggttccctaagcaaatttcttctcaaaacagaaagcatgagttttgtgggatgctttgtacaatcagaccatttctaagccatctgttggtatccctttgttcccttcctagtaggtaccacaagagtggatctaactggacaagagtctaaaatgctgctcatgtgattgagacttgggcacctgatctgagagggaggatggataataaaaattaaataattaactccaaggtgaaatttacaatgttctgggatcctgcacagttcgaggtcccagagggaattggagtagatctgcatgttgaatgttttattgcctgagggttatccatgctttgagtgaggtgcacatttgttttcagtctctggagttaaagatcctttggcggctgaacatgtgtgggttccagcaatgtctttttgtggccagcagttagcttagaaaggttttgtatctgaaattttaatctcctattggctttgttcaatggctagggaacaaaaatgttcctatggcaaggaacatgttctaagctcagcctaaggcacaaaatggcacgactttctttcaagatctgttttgatttctttacaccttatctgcccaaaaacatcctctgaagcctctctaacccagggatcctcctcactcttcccctacccattccccccaccctccgttatactggggccagttatctagtagatactgccaattacccttggcagaggtgccctgctcactaatttcatttgaaggagagccctggaacctggttttaatgtctggcacac

SEQ ID NO: 12600 - DNA, 6000 bp, Homo sapiens
cagaggccctcagtgtttcctggcccctggcccagagttcttcatatcctctgactcacttccctgcagccagaacttaaatcttttctcccttgccctcccacagatttaatccttcagcaaaccctgttgattccacctcctgaaagcacagggctctggtgtcaggcagccctgaactctagttctgccacttaccattaatgtaacctggagcaattgctgtcatctctcaaatcttggatcggtcatttattaattacgtgaccttaagattccttaacctctctgaacctcagtttcctcatccataaaacaaggaaaataatagtgcttgagttttagggttgccataaggattcaatgaggtaaaatgtgtaaaaagcctgacgcttagaaggtgccacaatttaccaactgtgtgatttggggcaagttttaaaaaccactctaagcctcagttttcccaactgtacctatccttcaaagttgttgtattaaaggagttaatccatgtaaggttcataacaagaattccagaattatcagctgttctaactcttatcctcctaggtatcctattgtctagtcttctctggacagggaaagccccactcccacacctgtgggtgtcaccacctcctactcccccgcccccctgccaccccgcactgtgactttatggctctctagtggacagacagttcatctcctctcttctccagtctcctgttgtaaactggtgacctgacttcactgttttacttgtcatggcctggtgttggttcctgtattttttacttaatcactgctgacaaggcttgtagcatcttccatgcaggcacacaaacccaggcacagaaacccagctaactcttagttttctcattaataagtggggataataataagacctatctctaggactgttgtgattacaagtaccacacaagatgatgggtgtaacgtcagtagcaagtgctgtggcacccgctgtcagagcagtcattccttgttggctttctgtatctgggtttctgtgtttccatggaggttgtcacgagccttgccagccaggggataaaccaaaaacacaggaaccaacaccatgttcctgataggccaaaacagtggattcaggtctgctaacaaccttatttgggatggggattggccaccatttggcaaaagggaagtggggaggaaaggagacaatgtatctacccactagatgggtcacacaggcacagttttgaggagggggtgagaggtgagggtttgtaacacccactgggtaggcagagggctttccgtgctgaggcaaaggagaataggcgactattttaatgagcatgtgctgtgtggggaagaggtgtgacacaataaagaactacagtcaggagttcaagacctgcctggccaacataatgaaaccccatctctactaaaaatacaaaaattaactgggcgtcgtggtgcacacctgtaattccagctgttcgggaggctaaggcaggagaattgcttgagcctgggaggcggaggttgcagtgagccaagtgccactgcactccagtctgggcaacagagtgagaccctgtctcaaaaaacaaacaaacaaaaaactatagaggttgtagtgaaagggttaagagcagagagctgaccttgacacttgaggggagtgggcctatgatttgagccagcatgcagcagaaaaggcatttgaacccatgttcatctgcttccaaagcccatgctcctaatcattacaacgttaagggctggcacatagtaagtgctcaataagtattgtttaatgaaggcattcatagtgctgcctctttctgaaaagttttctccctccattactactcatgcccatccttcaaagcccagctcaaatgcagcctcaccccaacagatgtgttctctcactgctgcaacaaggtgggagaaacaggaggaaatcagtgctaggatggggaagtgctgggacactaggatgggccagccaaatggagctggaggaaggactcttgagttttgcacagagatttttctcctgagtttgtgcactggagttgaagttggcacaaggattggaaacgcccataacaaagtaactcatactgagctctgattagtcagaacagtgaattccaatgacttagcaaccacgtatggggaagaggactggaagccatttcaggacaggggacggagaggacagcgagacaaaatgtctgcccagtaaacaacagcaagtgtgcagtaaggagggcggggttggaaaatgagaagagcccattctgagttacgaattactgctccaagggttttaggatctttaaatccctgaggatttagggatttgtaatactatgctatataataccttaaaaccaaggatattgggattccaaggattttaaatccctataacctatggtataaggattcgagcaatttttgagctgtgaaatgctgggtgcttaggacccaaaacaaggattttaaacagaacactggacattttgaagtactaattaatctcccttctacttcaaatcaatcctggtttaacccttggaacagtggtttccaaattgtgttttccacagtctagggatccttgaaagtgcctcccagaaaggggtggagacagctactttaccggagagaagacaccagcataagaattctggccccccccccccattatggcttccaccaggatagctccatttttatttgatttatatattgggcttctgcattcaattcaaaagaaaggttttcctgctaaagcacaaaaaatacgtttacaaacctctggccttggaaaaagggagctaaaacctgtgggttaccatttgaatgtagacagtggtccagggagccacacttcgcctctattgttgttttgtttttttttttgggggggcggtttctttctttcttttttttttttcattttggaataaacactgaaaagatgcttttaccggtaaaccatcaaatggtgccaggaagatcaagtggtgataactgacaaatcagttattagttgagtaaatcgtcattagctgactctggcctataagatcatttcctttataaaatcagcaatagcagctactaagactactattattatgactactaccatttattgagggtttgtactatgtgccagggggcatgctaagtactttacatatatcatttaatcctcacaataactctgaaaggaagtattattagccccattttacagacgaggagactgagactcagagtggataagtaactggcccaaggtcatactgctagcacatggtagattccactttacttacaaacagaaacagaatggactaaaagaattaatgcagtcaaaggtcaactgcctggaagccttaattaaagaacaaggttaaattttgaccaatagatggcaccagtgtgtgagtttggtggcttactcaaggttgtgtccaatgcagggaagtcccagctagggcttagaactgaagcagcctgtctcatgctgagggagaaggaaaagaaagatggtcatcgttttgctcctgaatgaaatgacattacccttttccctttgtagctaaaccaggaagccagcaagttgggggaacaatggtggttccaccaagagctactttcagaagatttgagaatcttttctctttcaacatttcctgagcacctcctttgtgccaggcagtgttctgtgcaatgaagtcatatgggaatatcaaatacagccccaggttactgtataggaaaggaggcaaatgctatggtaggggaggctctgaatgagtgggggcacccaacctggtgcctgggatgtctggggaggcttcctacagcaggggtgtctgagctggttctgttagatgaatgagagtttcctaggcatgcgaaagtggaaaggcattccagacagggttaaggacacacacagaggtgttagaaagcatgccacattcaaagagaggcagtgtaaacttcaagagttgagagatgagtctcaagagacaggcaaaacccagacaactgaaaggcctagaatatcaagttaagtacttgatttgtgaagatatagcactgtgtgtgtgtgtgtgtgcgtgtggtgtgaacaaatgtatttttctgagtagagaagccacaggttctcaaggggatctgtgaccaaaaaaaaaaaaaaaaaaaaagataagcccaaaagtgttggcaaagtcatgatgtggtctaatctggttgtcagtgtggaagatgaatcacaaagggacagctggaggccaaaaaaaaaaaaaatttagtcgaagagtaattggagcaagggtaagcatgagggtctgagctgtggtaaatataaagggaattgaggaaaaaaattgctaggtcctagtagccctcctccccacatgcacacagccatctctgaggctcaaatgaggctgcacctgtcacatttcccctctaacctgcatccctactcccaacttacaagctgccctttgggacctttttgttccctttccaagccatccttgcagtttaatcaagtctgatttcacaaattgatggagagggcctggccccatgctgggtctccagccctacaaccccatgaagaaaaacttgtcaactgacctcaggtaggaaaagcaatgaattggccttgagctggtctctgaacctctgcccatggcttcacaatatgggcagagttcagttaagaaatcagcacagttccaagaaaaaggaaaacaccatccagtttatttttctcctgattcatctcatgccaacacacagacttcaatggacagcaggcaaaatggggaggcatccccagagcaagccgattctctacacactgccttcccttcctgtaagactcatcaaaaaggcaccccaaccttgcatggatctgctgttggtattccttggggtgaagccagaagtcaggctttccacagagagacgggactacatggccacctgggaaggctagggagtcaaagggcctgaggaatgactacttccctccacaagggcattccctgccctgctctgcttcctgggggcttcagcaagccttccttctagagctcctagaaccctcccatggtcaacacaacagcagcccagacaatgagatgcaagaggcctgagctcacaggccattcaggtaagccagggtgagctgggcagctagatgacccaattttcagtccagaaagctctatctgctggactaatacttccggctaactgatgtctgtgaaaacttgccagacaaactgaaccccaatcagactctggctgcctccatttggataggttaggggtgaggaagggggatgagctgtggcgctgtagggtatggaccctggtaccctcacacacccttctggccccttttcattggcctcctacttctcttcttcatcctcctgctcttcatcttcctcttcttcttcgctgtctgagtcctcgtataggttgatggttgcctggacaggaaagttctgcagtaaaatctccccagcactgtacagatagtcgaaggagcgggatttaggccagaagagcctgtggacagagaagaaacatggcccctaacaggtgtcatatgtgcagaggggccagtagggccaagaaagaagctggcccctaaaccccttctcttggctgcaacaatgaggtcagagggaaaggaagaaagaaagttttgtaacagaaccttctgcattgttacaaagtggccccacgcaggaaggtaaacccttatggacctatagtggttgggtcgggggccagccccagcatctgtcacttatggctctgactccacctgctacctaccccagaaagcttctagccaagaattctccagccctatggccccatctccttccactgaggattatttcactgacccatccatgggggatcattcttggg

SEQ ID NO: 12601 - DNA, 6000 bp, Homo sapiens
aagttgactatttaagcaacagattttcatgtgttttttactccattttggaaatacttgcatttaaggaaattagtattctctttacattagacagcaagtgacttttattgtgtggaggagaattttgcattacactttcttttctccaacccagtcaagttttatatcttatactctcaacaagggacactggtttctcgctccctgtctctttttaaaaagtttttactgagttataatacatgaacaaaattacacaaatcataacctatagctcaatgatttttcacaaatgatttttcacctatgtaaccagcaccacagaagcccccttcagttgctgtcctcccaaagagcagctactctcctggcttctaatcccatagattgattttgttgctactttaaaactttatataaatggaattatatagaacgtacttttttttttcgagacagagtcttgctctgtcacccaggctggagtgcagtgcagtggcgcaatctcagctcactgcaacctccacctcccgggttcaagcgattctcctgtcttagcgtgcggagtagctgggattacaggcacatgccatcaagcccagctttttttttttttttgtattttttagtagagacgaggtttcgccatgttaggcaggctcctggctctcgaactcctggcctcatgtgatccaccctcctcagcctcccaaagtgctgggattacaggcgtgagccactgtgcctggcccagaatgtacttttttgtgtgtttgccctttttttcactcaacattatgtttatgagattcaccaatgttgtttcttatagctgtagatggcacgttctcactacattcattccattgtgtgaatataccatactttatccattctcccattgatggacgtttggatagtttcccatttggttttatgaatggagttcttatgaacgttcacatacttgtctcttggtacacatgtgcgtacatttgtatggggcatttatataggcatatgtgggtcataaggttacatatgattgtctctagtagataataacagttttcctggatggttgtgccagtttacactactaagcagaaattgtgagttctagatgcttcatatcctcacaacacttgttgttgtcaggtaagtgtgtgtattgttatcttgtggatttaatttgcatttttctcatgaccagtgatgttgaacactttttcagatgtttattcgcaacttgcttatcctcttatgaagtgcctgttcaagtcttttgccagtttttttaaaattgggttttctgtttttgccttattagtagggtaagaaaaaatacatatgcaagtcctttgtcagaaattgcaaatatgttctcacactctatgcattgcctgtttatttccctataaggtgtcatttgatcaacaaatgtttttaattttaatatggatgactttattaaaaaattctctttatggttaatatgggaggtttttttggtcttgtttaagaaatatttcccttcttcaaggtcattaagatattctctgtttttatctaaaagcttgctatagttatgtatttattaattcattttatcttacacatttaaatctgcaatatatcaggaactgattttgtgaatagtatgaggtagggcgtcaagaatctttttttttttcatatgcatatgtaattgacccagcaccatttattaaaaaaggccaaccttttttcactgtacctgatcatcttttaatgggataaaaggaaagcttgttagaaatgactaggtgatagaaaatgggtttttaaacatttaggactcattagtttatttatttatttttattttcaaggtccaagaggctaaatgtgagaatccagaatttgagagaaatgtggaggtcagtaaattcaacattagctatttgggtttagacttagagcagttgggggtggagcatagcctaaatatgagctgctttgagaaaaacaaattacgttgttccgtgagttattgacaattttttcgaaaagtcaaagataatttgaattgcaatccaagtcttaatcatagacagaatttggcagataattgtattatgattcaataacagtgaaaaagaataaactggtaatattccttgtgtatttttattttatgcctaagaatacatcttgtttcatggtccctggtgttcttcctgatactttgaacacagtcagaataagagtcaaaacaaataagttatgctatgaggatgacaaactctggagtaattggagccaagaaatgagtataggtaagagaacagaatttttattaaaatttaaaacactgatgtataaaaactaagctgaagcagaaaatagactggggaaagggactgtcatgctctcttgatgtcaggaaaagagtacttacaattgaaatttattttcttcttaatcactttcaaaccacccagggttaattgacagtatacagttatttagaaaaccataatccaaatggttttatgttcttttctatctcatttccatttttattaacaaactgaacaaaaatatagaaagcaggcataggctgcacacagtgactcacgcctgtgatcccagcactttgagaggctgaggcaggaggatcgcttgagcccaggagttggagaccagcctgagcaacatggtgaaaccccatctctacaaaaaatacaaaaattaaccagatatggtggtgcacgcttgtggtcttggctacccaagaggcagagatgggaagatctcttgagcctgggaggcggaggttacagtgagctgagattgtgccactgccctccagcctgggcgacagagtgagaccgtctcaaggaagaagaaaaaaaaaaggcaggcataataaaatttgcacattgtacaatactagagactgtcctacatgctggttggcagaaacaagagtggagccatttaatagaaacctgtacctaagtttgaaaaaaatcatttattaattgaaaggctgagcaagctaggctcaagtacaggactggaaagacctgtgctttatggatgtgtgtgtggtggggtgggatacacggctttataagtgcaatgtgactcaacattgtaatcttaaatgtgtcaaaaaggcatatacaatcttaggagtgataagtgcagcacccagaaaggaatgctgcaggttggggcacagagctatggtcacatcagaattgtgcagtattccattctgagcaccacattaaaggagttgccttggcagactggaatctatccttgaaaggataatcaggatgttgaagaatctcaaaacttggcaaggaacaattggtaaagtaactttgaggagtcatgattgctgatttctaatatttgaggtattgtcaggtacaagaaggaataggctttactttttgtgtctccaaggggcaacacagaaccaacttaagaactttttaaacagctgtatattggtcaaacaggttgtcgaggtagccaattccctattaattgagaagctcaacaagttatgtgccaggcatggttgtattcgtttatttattgttgtataacaaattactccaaagtttaatggcttgaaccaacatacatttaccatctcacagtttcggtgagtcaggagtctagccacggcttagctggaggtctcatgaggttgcagtcaagctgcaatgagaactgaaatatgtctgaaggcttgactggggacagagcatccatttccaagttcactcatatagttgttggaaagcctcagtacctcactggttgctggatggaggctgttgcaggttgaattgtatctcccaaaaaggtatgttcgtaggttccaaccccggtacctgtgaatgtaaccttatttggaaataggatttttgcagatataatcaagtgaggatgaggtcatgctggattaaagtggacagttaatctaatgactagtatccttataaaaagagaagccacacagagacacacagacacacagggaagaaagccatgtgaagatggaggcagagattgcagagatgcagctacaaccaaggaacaacaaggattcccaggagctaccagaagctaggaagaggcaaagagggattcttctctagagccctcagagggagcatagccctgctgacaccttcattttggatttctagcctccaaaactgtgagataatacatttctgttgttgtaagccattcagtttgtggtaatttgcttcccttagttccttgccacttggacctccccatagggctacttcctgacatggaaactggctttcccaagtgagtaatccaagcaagaaacagtgtgagagaacacgcaatatgggaaccatggtcttttataacctaaccttagaaatgacatcccattactgctgctgttctgttttttagaagtgagtcaattagtctagcccatgctcaaggagaggggattacaccagggaatgaatatcaggaggcaggaatcatgtggagaaatcttagtgactgcctaaaacaatggtgccaggccttgatgatgctttctagatgttcatgacctagtgggaaaaatgaatttgtatatagacaaatgacagtctatatgttagatgtagcaaggcaggctttggaattggacagtggaactggaatttgaggcctgatgccattatttactaaatccttccggatgacttactaaacctctctgagccttatctttctcatctgcttaaatgggagataatgctatcattatagcatatatatgagataagcatgcaaaaccacctagtgtggtatcagacatatagtaggtgcttatttaagaataatagtagttgttaggattattttaggtattttagtagtggtaagtaaccagtaaaatatgtagtcactgttaataagattacatatttaatatagcatctttgttaatagtatttaaaactagttaagatcttctgatttacctgagcgggtggggaaacccaccccatgagcatcccctgggctcacccagtgcacagagggaggcctcccgtggctgggcccctctcagtcagcccatgtggctgccatgacctggagcaccacagccgggggcgcccaccagctcaacaccaccacattcacgtggcagcacctccctgcctggcaaccgctgctgttggccagcattaggctgcagctcttcttctacgtgggcctggccttcatcagcctggacctctattactcctccaccagcatcaaggagctggagtacaactacaccggcgacccgggcaccagcaactgctcggtgtgtgctgtggctggccagggctgtgtgccactgcccatctgctcatgcgcctggtacttctcactgcctgagctcttccagggccctgtgtacccctactacgtgctgaccaacttctaccaaaacaaccggcggtatggagtgtccgcgacaacgcgcagctgagcgggctgcccagcacgctgcaccatccagtcaatgagtgcacccactgcgccgcctgcccatcgtgcaccctgcaatgtcatcaccaacagcctcttcaacgactcctcgctgtggcaccagtgctggcccggcgagccctacgtggaggtgccgcgctaccgcactgcacctgcatcacccggtagaccaactaccccatcaagttctgcaacccaccactggtcaacggcagcctggcactggccttccatggcacagcacccctgcccaactggcgctggctggtctacgacaagctcagccccatccccaacaacaacggcttcatcaaccaggacttcgtggtgtggatgcgcatggcagcgctgcccacgttccgcaagctgttccgcaagctgtacgggcacatccgccagggcaactactcagctgggctgccgcggtgtgtctactgtgtcaacatc

SEQ ID NO: 12602 - DNA, 6000 bp, Homo sapiens
tccttggaacttgccatttgattcacaagtgactggagggttatggccaaacccagtgggccacgtcttagagaaaaaacatcacacaccatcgaatatgaaagcaggcacttcaaacagactcaggatgccacacctgagaccgggaagatgccactgttgactagaaatgggcttctcaaattttcatgtgcacacaaatcaccccagaggccttgttaaaatgcagattctgactcagtctggggtcacttccaacattctttatttctcacaagttcctccctgctgaagctgacactgctggtccaatgaacacactttgcaaagcacatggaattgacaaatgacaaatggtccactcatatcttttcttgacctctgatagttttccttgttgcccagtagaagctgccagcatccaagttcagctcttctcagctacagatccatatatcccttcacatcatccagagtgatctttcacaaccccaatctgtttcccatgcttaaaaatgctccctggcagaccaggcatggtggctcacacctgtaattgcagcactttgggaggccgaggcgggaggatcacttgagcccaagagtttgagaacagcctgggtaacataaggagaccctgtcactacaaaaaaattaaaaaataaaaaatgagctgggtgcagtggcatgggcctgtggtcccagctacttgggaggctgaggtgggaggatcgcttgagccagagagttcaacaccgcagtgagcagtgattgtgccactgcactccaacctaggcaacagagcaagaccctgtttcaaaaaacaaaacaaaacaaaaaaaaaacgcagtggcttcccatgattttgttttttttgtctttttgtttttgtttttgtttttgttttgagatggagtcttgctctgtcacccaggctggagtgcagtggtgcaatctcggctcactgcaccctccgccttccgggttcacgccattctcctgcctcagcctcccgagtagctgggactacaggcgcccaccaccacgcccagctaattttttgtatttttagtagagacggggtttcaccgtgttagccaggatggtctcgatctcctgacctcgtgatccgcccgtcttggcctcccaaagtgctgggattacaggcgtgagccacggcgcctggtcaaggcttcccatgattttgaagataaagtccagaattcttaaggtggcctggaaagccctaggtggtctagctcctatattacctatatcctctagctcctaaataaacacatttagctttttcttactaactttttgcagcagttttggttcctctaggatgagtgtgtgatatgtgactaaattgcccagtgttcaaagatatcatgcacactgtgaccagaggtggcttctatactgacatagaagatacagtggagagtgatccatttatagattgttggatatctaccacacatgcaatcttaaccctgaagataactggtcaaccaagctagaataagctctacatccagctgtattatgtcctataaatttttcccatattttatgtcactagcttctagtcatgttggctggcacagtccgtaagagttttatctgtgccagtggagcaaagatggtgatttctgttctataggagccagggttcctacagccacaaataaaatcatctgctgaaaacctaagagcattggcatctgctgagagagcatgattcattgaagtgatcccccaaattcttgagttcctggttttccctgctgttataaaactagatccacagcatgaggtatatacagagtccttgagagatataaattggagggaaactttagctttgatctagtattgaatttgggattgaacagcatcattcttctaaccccacttggctttttgagcctgggagagctgtgatatttctttggaatgctctaaccatttggatgaaagaccgtttgaagtggcaactgtggatttggaaggatgagttctatcgttaaagggcgagtgtgctgcaccataacacctaaccctaactccaaatgatgaaaaagggtgtgggtttagtttaaaaatatatatagatgtatacatctatatatacacacagagaattaatgaacaattttatctggttatatatcagtgtcaccacatcagctgtttaagtattctggatactagatctttctgtagaaggacccatccagtatgaattatttgcccttctgatcttccctgtcccccttctctccactctctttccactggctctgcaggggtctgtatctttgcccccatcatgctggactataataattgtgttacttgtctgcctgcagtattggatttatcttgaagccagaaaggtatcttatttcagttttgtgtacttggcacccagtaggtcttcacaaaatactgaattaatgaaatccaacagaaaacccagttagaacccagctcctgggttatagaaaatcaaatatgtgacaattcaaaatgtatcttccaaagcagtgtgttctgtgatgatgaaatgtcctatatctgtgttgtccaatacggtagccactagtccatgtggcttttgagcatatgaaatgtggtttgtgcaacagaggacctgaaattttcattttatttaattttaaataaacgtaaatagctacatgtcttagtggctaccattttggaccacacagccccaaggcctcacatctttatcctttaagaaccagatacaactttgttagccaggaaagcaggcattcatctttttcttaacatgatcatagaggctgagaatgtggggaggttgtggatgatacaatacccatgtctgttttctctttataatgagatacgtcaaggccaaggattctagtttctcttagtttgggaacctggagagaatttggactttgagttgcattcctctcacctcagtccccagaaagtcatgtgacaaaataagattgagctctaacatctctgctcacaaatcccaagtgtctgaagctctttaagatactgacttgctagtgaacttgaaccatattgtgcactggttccctttttctttttttgagacggagtcttgctctgtcgcccaggctggaagttcagtggcgcaatctcggctcaccgcaacctcttcctcctgggttcaagcgattcccttgcctcagcctcccaagtagctgggactacaggtgcccaccaccacacccggctaattttttgtatttttagtagagacggggttttactgtgttagccaggatggttcccattttatatagtttccccaatccacttcagggaagttggtcttcctaaaaacagctgctcatcttttgaaattaaaggaagcacagctttcttatgaagccctgatattttttattttctaatgaactaaagagaaatctagtaatgagttttcatagtcactttccataggtttaagcgaatgctagtttaaaaggaatgctcactaaaatgaaaacattcatctatggtgttttatgctgggttgtcattccatgacaactatgaagaccatttgggggattttttttttttttttttttttttttttgctggcttaatgtgcttgccctaaagtaatgaagtgcccttgattgctgctaaacaccataatgcgtttaaagttcaatttccccgacaagccatttacttaagggtctggataatataaacagagacaggaggttaggagaggtactgacattatcctgaggccagtgctgcctttactgaaacgtaaatgtctccaaactgaaaacgtcacctggctctgcccctgaggcaggtctttatggacatctcaagtaaaagtttattttaaaaatgaatacaagtctcgtcttttcaagattaagagtgacttacggctgtctctccttcattccacttcatggatgttcattttggttttgtttttttcttctgttcttttttctccttcaagtacttaaatatcacccaccagttctgggttctgactctgaacgtgtgtgtcggggaagggggcaggtggaagccggggaggaggaggactgtgaatgaattgcttgggctgactgggctggggggaagcatttttattaaaaatttgagataatttctgatgtcaacttgaatgaaacttgagtagacccacttgagtggctcttggtgactttgttcttcactgaattatggaccaaaatacctgtgacctttccaaaacaatcaccttgctatttgtttgaacctggcgacggcataattgctgtatcagattctcccagttgccccggaggtccagggcttggggaaagccgttggttgccacagcagcagacgtattgaaaccccagaactgtgaggctggagacgacctgactgttgcttttcttcacagagctgcagcttcactgctgtcctctcttttgactgtgttagtggaatgagtgcttcttgttggcacttgagcggggctccccccaccactcagtcgatcaggaagctctagaactgtaactaccttataactctttgtcaattgactgctctgccattcactacccttccagattctgagcaaattaagttacattcccttttggagcctcagggtcctcaccgcagaatgtgagatcacggtaactaccacactggcccttgggatgtcgaagtattaatattaaccatagagcctgagaggggagatggaaaattgtaagccttctctgtgaatatggggtattcttgaagaccagaggtgttcttgcccgtaacggctatattttctctcctttgggttcaggctgctttgaatgctgcatcaagtgtctgggaggagtcccctacgcctccctggtggccaccatcctctgcttctccggggtggccttattctgcggctgtgggcatgtggctctcgcaggcaccgtggcgattcttgagcaacacttctccaccaacgccagtgaccatgccttgctgagcgaggtgtaagtatccggttccctttaaaaatgcatctaaggcctggcgtggtggctcatgcctgtcatcccagcaatttgggaggctgaggcaggcagatcacctgaagtcaggagttcaagaccagcctggccaacatggtgaaacgccacctctactaaaaatacaaaaaaaaatttagctgggcgtggtggtgcgtgcctgtaatcctagctacttgggaggctgaggcaggagaaccagttgaacccaggaggtggatgttgcggtgagctggtgagccgagatggcaacactgcactccagcctgggtgacagagtgatactttgtttaaaaaaaaagtatctgagatgcaaccacctcatgatgtttttcagaaagactacagtgtgctttcctagcagaagatgaatgcttttacttaaagctcactttatgtagttagaaaaaggttcatgagagaaggaaaaagaaagggcctagaatatggtagctgtttaggccccagggtggaatgttacttgggaatggtaaggtgcacacataggacactccacacatggtagctgtggacatggggagctgtgacatggtgataggtgatgctgccgattgtctcaacagaattgtgttgttcccaagtaacagatgcctccagctttctcccaggaagtgaccatccctggaatggtaggagccctgttgaggactgaccccaactctaagcctacaggagcagtattttaacattaactcttccagcagaagagcagatcccagggcatcctccattgcagaagagcagatcccagggcatcctccattgcagaagagaggaaggtccaggggtttagcagcagatctctgcctttctttctggaaacattctcaatggagtcgcagtgactcccacacatagattcttgtagctgtgcaagctcagc

SEQ ID NO: 12603 - DNA, 6000 bp, Homo sapiens
tgtggatcacctgggggagtttaaacaacacagtttctcacagccacaccagacctattgaatcagatctctgcaggggtgaaaccagcaggtatttggggaaaaaaaaaaaagctatagaaatcatttgataatacatctgccagctttgtttattggggatgggggagtaatgacagctttgaaaacttcactgttggaatcagattgagatgtttaaagttaagctttttgacatcctaagggcttccactccaaaactacatgagctatcttagcagccacccatcttggaagggaactcactagttctttatgagtatgtccaaactggcttagatcagagagagtggaggaaaaaaagagtacttaatggttagcttgctgacctgcctagcattagataatgtctgtgaaggcccctggagtgcctccagggaagccggggcccaaatatggaaaagagaagtcatgattatgaggtaggagttgcaattaccatcgtgaatatttaaagtgttatttcagctctttcctacgctcctgggtttggggtttcatttctttttcctttttttttaatatggattctcactctgtcgcccaggctggagtgcggtggcgcgatcttagcctactgcaacctctgcctcccgagttcaactgattctcctgcctcagcctcccgagtaactgggattacaggcacccgccaccatgcctggctaattttttgtatttttagtagagatgaggtttcaccgtgttagtcaggatggtctcgatctcctgacctcgtgatccgcctgcctcggcctcccaaagtgttgggattacaggcgtgagccactgtgcccagcctggggtttcatttctagcagtgtgtggggagccaggacaggttagaaagaagggccaggggatgtctttgttgtgataaagcagataccaccatggagttttgccactttcacggtatgattttattttattttattttttttgataactgagacaccccagcaagtgtcttcttaacatttcgtaaatcttactattaatcttttcccctgaggtcaagcaggaagataagacaccaggtagagacttagctttcgccctcctcaagctattgtgtctctcttttaacttggagtctttctttaaaaccaagtgtttcccagtgttgcgtgtgtgacttttcttaactccttacattatctaaggattaaaaaaataaggggctgggtgtggtggcctatgcctgtaattccagtgctttgggaggtcaaggcaggaggatcacttgagaccaggggtttgagaccaacctggccaacatagcgagaccttgtctctacactaaatttaaaaattagccaggcatggtggtgtgtgcctggcttggcacttgggaggctggggtgtgggaggattgcctgagcccaggagttagagaccagcctggacaacatagtgagacaatgtctctaaaataaataagggaaacctcacaatcagaaaaataaaaaaagttggacattccctgtcttccttttctgaagcttctacggtgagagatgttgtgcattgtcaccatgaacttctgtgtcagggagggttggagccgagaagcagagcgctaagtgtgatctggataagggatttcctgcacgttgtggaagctgccagtgcaagctgccccctgtgtcctgtactgagtctgaagtcgctggaggaaggtgggtgtggatgagagcaaggactcctggaacctgcctctggctctcacgcccccaacctcaatgacacagtgccctgtgggagagattggtgcccttcccgaaagagaaagattagcccagtccagtgggcatctgttgagtgtctgctatgtcttgagagctgttctgggccccgggggagagcatgaggggagagactgacctggaagcacacttttccaacccgttgtggtgcgtgcccagtacgctaagggagcacaaagggagggggacctaagagcctggggcagaagaggaaggaatttgatcaggtgaagaggacgggccagagcccagagcgagtgagaatgagggtatagtgtgagtgtgaacagaggcctacagcttgatgagtacctagaaataagccttgccagagtaaaatgggaagcaaggccagaaggtgagagggatcttgcacgcccttgaaaggaacttggacttttggggtaattgggaaccactgaggcaggattctaagcaggggtatgccgcaccgtcacatgtggatggaggaaagttccttcaatctgtgacctctcctgaatgagcacctgctcccaggcaaggtttttatttatttttattttattttaatattttggagtgcagtggtgcaatcttggctcactgcaacctgcgcctcccaggttccagtgattcttgtgcctcagcctctcgagtagctgggactacagacatgcgccaccacaactggctaatttttgtgttttcttggtagagaccgggtttccttgtgttggccaggctggtctcgaactcctggcctcaagtgatccgcccacctgggtctcccaaagtgctgggattacaggcatgagccaccgcactgagcctccaggcatgttccccactggccacccctccccgagacagagccttgctctgtcgctcaggctggagtgcagtggtgtgatcttggatcactgcaacctctgcctcctgggttcaagtgatccttctgtctcagtctcccaagtagctgggattacaggcacctgccatcatgcccagctaatttttctgtattcttagtagagacagggtttctccatgttggccaggctggtttcaaactcctgacctcaagggatccgcccacctcagcctcccaaagtgttagaattacaggcgtgagacactgcacctggcccaggcaaggttttagaaacagctttgaggtctaatttacatgccatgatattgacctaatgagtatcccagtcagtgctttttaatatatttacagagttgtgtgaccatcttcacaatctaattcttgaacatttccatcacccccaaaagaaacctgtgcccatttgcagtcactctccatttccacgctcagccctaggcaaccactcacctttgtaatttctcctttttctttaaggagaatgttttctgcaaatgtattatttactttaaggagtctcccaaattataaactcttactcttggctacccggttagttactgcttagcctgttcctcccagcacacttgagattgcatggaacagaaacctgtctgggactgccttaaacacagacatttgttattttgcataattgggaggctagaggtagggtggaccccaggggcagtgtgatcagctgctcagtgtgacatcagaaacctgtgttcttgctgtctcttcccccaccgtgttgttctggcagtagcttcacccaagggctggcttccctgtggtcatcagatggttgtagaatggtgtccatctgcagtggggccctttgcttccttgctcacagcccgtatgtaggaggagttatttcttgcagtctgattgggtgagctttgttccccctgcccaccctgaagcaatgattggcttagaattaattaggctgtccttcctagagctggaaatgggctccatgggggaatggatggcacctgtgaccaggagtgggctctgctggggaaggaggaagggagccagctctactgggtaggcaaccagcagtgctcactgagggttcctgaccaactgcattggattgtttgtttcctttcacttgggggccttttttatgttaaatgcaagcaaggtgatcctctgattttgaacttgttatctgggggaaggcagaccaatcccagttcatcctggctgagtgacagcggatttgatcgttgatctcaataggcttgagagtaataatatgtgagtatttttgaagctgaccctaactttacatctctgaaaagtatcaattcagatctcactaattcaggaggttctgataatttggtcaagaagttcgctgaagtttacctttgaacagttttatagtgagggtaatattggtgatggtggtaacactaacatatgtgggaaataaatgatttgagtaacattcgaaaaacctgtttgctttaggatagaaatatctaaatatacgactagaagtaaatagtagaaaatcattcctatctagttattaacttagtcccttggaatctctccttggggaaaaaataaaatcctgctctgactatgtcagtatttgaattactgtatgaacctgaaattaacaaaaatggactttcaagtataattcatgcttcactgagccaaatagacattctgccagttatttggactttattaaattttactttattacttatatgtaataaaaaatcaaggtaagcctctgctttgcgaagtcatttatttgattaggagctgtattttagagtgcatttcagggcgaggtttgtccacatgtaagtaatgaacgtttgctggtgcagctcgtaatggtgagaacggatgttgaagaaagcaaacaccatatgccctttgtttcccgtgcatgtcctcttctggaggcctgggtggagtgtttcagctgtctcaaataatctccattttgctgttactgcagactctgcggttctccagctctctcctctctgatgttaattataacttcttcctaattaggtggctcttcctcctcctcagtcatacaggttccacactctcaagtgccagagattggattacttttcacttgatttgcgacagaaataagtgcaaagaattacaaaaaaaccaccagtgtgagtgtgtagtgggaggggcaggcgggttgggtacgggacaggatgcttagaataattttgctgccaagtgaatcagagagacttgcagttctcggagagcacggaacttattcctgcccagagttcagacacagccagaaattaccatttcatacttcacagaatggaggtttcagcagccaaagccccaagtgccgcagacttgtctgagattgtaagtaggccatacatctgttttgattgttgcgatgtctgcatcttttgtagcctgttgcccgactactttgtaggccaggagggaggcatgatggggaatttggtctcaggccagtccttccaagatggtgaccaacactgttttccacttggccccaggtctcagttttctggtttatagccgaagggtatttctttcactaagcccttgtctgtgatagaagtggattctttggctgagttccttttgtagtggcatttataaagattttgaatagctctgtcatctggtttggtggctctttccctctctgatcactatcgacagccaggtgagttttctccaggggacacggcacacagatagctgcattcaaccaaaccccctgcaggcatccatttctgcagtgaggtacccctctcaggggttgggagcaggtaacatttctgatgcagctggcagatctgggaatctaggggggaagccaggtgtggaatttagctttcctgtagtgtgaagaaataaagggggtgggggtaagaatgagatgggagacaggagagaaagtcagcttggggtctgtcaagagcactgtcctgttgccagatgccaactgaggtgtcgggagaggttcagttccccactcagctaactgtgcagccatgggctgctaaccaagatctctccaagtcttacttttctcatctgaaaatctgcatcctaccacctcgcaggactactggattgtttaaagtaatgaatgtgaaggcacctggtgcttggttgccatccttctccttttccatggcactctatgccataaatgcaagcagtgtgctgggctctgtgagatgccaccagtgttgctgtcctggcttg

SEQ ID NO: 12604 - DNA, 6000 bp, Homo sapiens
aggtgctcctgtattaggtgcatatatatttaggatagttagctcttcttgttgaattgatccctttaccattatgtgatggccttctttgtctcttctgatctttgttggtttaaagtctgttttatcagagactaggattgcaacccctgccttttttttgttttccatttgcttggtagatcttcctccatccttttattttgagcctatgtgtgtctctgcacgtgagatgggtttcctgaatacagcacactgatgggtcttgactctgtatccaatttgccagtctgtgtcttttaattggagcatttagtccatttacatttaaagttaatattgttatgtgtgaatttgatcctgtcattatgatgttagctggttattttgctcgttagttgatgcagtttcttcctagtctcaatggtctttacattttggcatgattttgcagtggctggtaccggttgttcctttccatgtttagcacttccttcaggagctcttttagggcaggcctggtggtgacaaaatctctcagcatttgcttgtctgtaaagtattttatttctccttcacttatgaagcttagtttggccggatatgaaattctgggttgaaaattcttttctttaagaatgttgtatattggcccccactctcttctggcttgtagagtttctgccgagagatccgctgttagtctgatgggcttccctttgagggtaccccaacctttctctctggctgcccttaacattttttccttcatttcaactttggtgaatctgacaattatgtgtcttggagttgctcttctcgaggagtatctttgtggcattctctgtatttcctgaatctgaatgttggcctgccttgctagattggggaagttctcctggataatattctacagagtgttttccaacttggttccattctccccatcactttcaggtacaccaatcagatgtagatttggtcttttcacatagtcccatatttcttggaggctttgctcgtttctttttattcttttttctctaaacttccttctcactccatttcattcatttcatcttccatcattgatagcctttcatccagttgatcgcatcggctcctgaggcttctgcattcttcacgtagttctcgagccttggctttcagctccgtcagcttctttaagcacttctctgtattggttattctagttatacattcttctaaatttttttcaaagttttcaacttctttgcctttggtttgaatgtcctcccgtagctcggagtaatttgattgtctgaagccttcttctctcagctcgccagagtcattctccgtccagctttgttccgttgctggtgaggaactgcattcctttggaggaggagaggcgctctgctttttagagtttccagtttctctgctctgttttttccccatctttgtggttttatctacttttggtctttgatgatggtgatgtacagatcggtttttggtgtggatgtcctttctgtttgttagttttccttctaacagacaggaccctcagctgcaggtctgttggagtacccggccgtgtgaggtgtcagtctgcccctgctggggggtgcctcccatttaggctgctcgggggtcaggggtcagggacccacttgaggaggcagtctgcccattctcagatctccagctgcgtgctgggagaaccactgatctcttcaaagctgtcagacagggacatttaagtctgcagaggttactgctgtctttttgtttgtctgtgccctgcccccagaggtggagcctacagaggcaggcaggcctccttgagctgtggtgggctccacccagttggagcttcccagctgctttgtttacctaagcaagcctgggcaatggcgggcgcccctcccccagcctccctgccaccttgcagtttgatctcagactgctgtgctagcaatcagcgagactccgtgggcgtaggaccctccgagccaggtgcgggctataatctcctggtgcaccgttttttaagcctgtcggaaaagcacagtatttgggtgggagtgacccgattttccaggtgacccgtttctttgactaggaaagggaactccctgaccccttgtgcttcccgagtgaggcaatgcctcgccctgcttcggctcgcgcatggtgcgcacacccactgacctgcgcccactgtctggcactccctagtgagatgaacctggtacctcagatggaaatgcagaaatcacccgtcttctgtgtcgctcaggctgggagctgtagaccagagctgttcgtatttggccatcttggctcctcccccttctcttttgttatgagtggtcagggatgtcctctccggggtggtggtatttgagcagacatatggataaagtatggaagtgacacacaactttattgagaaagaccatctcaggcaaatataaagtctctgaagaggaagatgtgtgtgtatgtgtgtgtgtgtgagtataaataatgtgtatatgtatgtatattttaataaccacatagactaaaactatccaactgaaacaacttaggtatactttgagaaatataaaatgaaattgtaaggtagaggtagcattaataaactatctagtataccattaaataagtttgtggtgattggtgattcaacacccgaatcatctaggtaaatcctgaaaaactcatattttattaattgcttctccttccccttctttccccgtccccactcctttctcgtctctttccccccctctccttttctcccatctttcacttctaatttcagtgaaattggagcgatttgaaattccaatcaaggttcgattaagcccagagccatggacccctgaaactggtttggtaactgatgctttcaaactgaaaaggaaggagctgaggaaccattacctcaaagacattgaacgaatgtatgggggcaaataaaatgttgttgtcttattgacagttgtgcaggaggtagcctggtggttttcaacctctagaattttaagcctttgttgaactgttagaatgtaaggtatatcattctaaagatagagtaaaaagaaaacaaaaccaaaagttattaaaattgttgtccggtttactttaacttagttttgcatagttctagtgcagctgaaattgaaaagttatttccctttagctgtgttattatagagcagaaattctgtttttaaaaattagcctaagatatacttgtttttgtaaagaaaaatatttaatgttgaacaaaataaattggagttggagtagaatgtagtttgaggaaatttgcagcttccaatgcctcttgtcttcctatttcagaagtttaaatattaagcatgacagaaaatatgtattaacactactcaaagcaaaagtgctgcagggctttaaaattctcttccaaccatttatcttgaaggaaaaattcaatagtaatataatacacaaaatcaaataataccttagaaggtattaagattataattgttgcataggttagatatagagtcattgtaatgttgtgaataattacagtgcctaaaataagaatagaacaacatatacaacaccaaaaaatatctagtaatatatttaaagggaaattgagctgctttttttgaaactttgagatctaaaaataactgtaattatttgaatgactaagaggaaagtacattttttgaaatgctgaaaattgcctttctgtgtttattcaaactgaaaagctgagaccaagagcaaggaaggtaaaaagttaacaggcaaacattttctcttagaaaaggtgataaaatcataagtatttggaattagaacccttgcacagcactgaacctgggaaagagatttaaactctgaatttatctttgataacagggattgattttaaaatgtacatgtattaaattacatttgtaatttaaggtctgtttgctgttgctgattttattcttgatcagtagtttgcatttcagaaagcctttcattttgctttaattttagcaaagcgggttataatgaatgacttccccaatatcttgcttgaacttacaggtgattaacttggatgagttttgggaagttaaagggaagaaaacactgttatcattttttcctgtttgggaagagcttagaaactggaaatactagatttgggagaagggcagagttacttgataagggactgatgtttgtgcagtaacttgggagtgtggtttctttttgaatctttaattaaaacctgggattatatatccctgataaatattcacacttgaaccatagttactgtaaaatgcaaaaaatcttaatactgttattctttgcactttttcttaatcattttttatatatatgcatatatatatgtgtgtgtgtgtgttgcttatgttgttttgtacagatgtgggccaccattgcaacaaaatacattctttttgctctaaaatatttatgaagaaaatacttaaatgttatgtatatggtggtaataagggaaaaatcaagtattataaacaagaatgaaggtttttgtaaagatttctgttcagcgttttgcaaggtaaaattttaggcaagttttccctgaagttatgtgtatgtgagtattctcattcttcccaacttgcctttgaagagtgaaataccattattatcaagtagactactgttcagcttttattcctgccctgctgtttatcccttaagaatgagtttcttagacttttccaatatgtgattttttttcccatttagaatggtgattttaaatgtgtgagtgcatgtactatcttatctcagatatttgcacccccaatctgcccccaactcccaaaagctagaacactgccaactgatctgttataggtcctttagaaacacataattaacacttaaggttgggtgctgctaattctttgcaaaaatccaaatattgttaagggaccagggagatgccactaccccttgattttccatctaaaaatatacatgtttatgtaaacaaatctttccatatccatagtgacttttcaagtatttaagcctaaagattttgatctcacatttttatacctgtttaaattgctcacagttattacatacacatcagccatcaactaaagttgtactttaaaaatttactacaatatgtacatttctaagtcaaacacttgtgacttttgctttaattccatgaatgttcctgcctccttgatatttgtatttattctttttttctctagagtagaggtataattgtgtgatatttcagaaatacagataaatgattcaaaaagtcacagttaaggagaatcatgtttctttgatcatgaataactgattagtaagtcttgcctatattttcctgatagcatatgacaaatgtttctaaggtaacaagatgagaacagataaagattgtgtggtgttttggatttggagagaaatattttaatttttaaatgcagttacaaattataatgtattcatatttgtactttctgttaaaatgcatgattgcagaattgtttagattttgtgtttattcttgatgaaaagctttgtttgttcttgtttttaagtttgcactcaaatcttaagaaataaatccacccatgttatcaagccaatttgtacttcattatgcattgagataaaatctccaagtttgaagattattaaccaaacttttaaacacatatttttaaagtactcatctccaggtttatggaattgcattaagcagttaaaccggcttgtatagtcccatccattagttcagagtatttgaatcccaaactgttactttggtccagtcaatagagtaaaacccctttgtaacactgatactttgggacaaaacatggattatcagtgggcgctaccaaattataactgctacttttaggctaattaatattttagagagaaattaatttgagttatatg

SEQ ID NO: 12605 - DNA, 6000 bp, Homo sapiens
ccctaccatgacactcatgatagatgacattcatataaaagacacactgctaggggttgtgggatacatcagatcatctgatcaagggagcatactggagttcaaacgagtgacagaaatgttatctaaagggaatcttgaatctatccatatatatcattcattcacagacttggtactttttttattagtaacaaattacttactgtatactataatttaccatggcacaccagtttgttatgaagtgacagttgaaaactgctgtgttggagcttatgacagtaggagggacaggatttactgctataaaataactgaataattcaggataatgtaaaatatactgaaatgggatgtgcattattactgctccttgagggcttttatagtcagggaaagctttgtggagaaaatggctactgaaaaaacagatagcatatcagcccaggttcttaattgcaaggaagagaaatacaatctgattgattttaagcagaaaagaatttattaaaaagaactgggatataatgcataccctttggccccacagtttcattcctagatatacagccaacatacacgcatacatgtgtttactaatatgtgcaagaatgtttgcagcagtgtttgtaatagaatcacactggaaactaaatgcccattaaaggtagcatagataagtagtttttttgtttgtttgtttttgtttttttttgagacagagtttcattcttgttgcccaggctggtggagtgcattggcatgatcttggctcactgcaacctctgcctcccgggttcaaacgattctcctgtatcagcctcctgagtagctgagattacaggcatgtgccaccatgcccagctaatttttatattttcagtagaggtgggatttggccatggtggccaggctggtctcgaactcctgacctcaagtgatccaccctccttggcctcccaaagtgctgggattacaggcgtgaaccaccccacctggcctgtattcacctgatcatagaaggttatacagcagtgagcacagactgcaattatgcataacatgggtgaatctcacaaaacctaaaattgaggaaagaaagcagacacaaaagagagcatagtgaatgattttatttatatcaagttgaaaaatggataaaattaatctatagtgtcagaaatcaggataatggttacccttgggaagggaatagtaacccttgggaagggaaagggaaataaggagggctttggaagtgtagttgacccttgaacaacacaagtttgaactgtgtgtggatctacttatacatgagtttatttcacctctaccaccctgaagacagcaagaccaacccctcctcttcctcctcctcgttatgattttttttttttgagacggagtctctatctgttgcccaggctggagtgcagtggcgcgatctcagctcactgcaacctctacctcacaggttcaagcgattctcctgcctcagcctcccaagtagctaggattataggtgaccaccaccaagcccagcaaatttttagtggagatggggtttcaccatgttggccaggctggtctcgaactcctgacctcaagtgatccgtctgcctcagcctcccaaagtgctgggattataggtgtgagccaccatgcccagccctccttatgattttcttaacattttcttttctctagctttattttcaaaacacagtatgtaacacatatataacatacaaaatatgtgtgaatcgactgtttatgttgttggtaatgcttccagtcaacagtaggatattagtagttaagttttgggggagtcaaaaataatatgcagattttcaactgtgcagtgggtcaacacctgttaatgttctgtttcttgacacaggtggttttggtttgtgaaattatttgagctgtagacttaatgttacgtgcacttttcccttacatctgttatactgtgcctgtttctgtacatatgttacatatcaaatgtttattaaaggggtatattgggtaactcagaatttctggtgctcctggctatatataccaaatcccagttcaggattcaacaacccagatcatgctgctgaactgcactaccactgccaagtgtgaaattgaagcttgctctgctggccttgttgcctgggagcttgatcctgcttctgttactccacacctgtctccctccctgttccattcctggctccatttgcagccctcctttcaaagtgtggggtggatacctttgttaggcagagcctagcacaagtggtcctccttactgcaagggagtctgggaaagcaagtatccagtgttttcagcttttatagtgggtggtgatttctgccagaaattgtaacaaggggacaaggggtgtttcagatttggggcagccaaaaagcgagcaaaatccatctttgaggtgagcatttaggccaatagaagaaagtagatttcaagtgttaggaacaatagaagcccagggtagaggttgaatagagtatggcatttgagcccagtggaaacaagtttaactggattaaagggtgtgctctgggaaaatagtttgagaaaagttgaaggaataggatgggacaagattaaagattactttgaaagtcaggcagaggaatttaaatttcatatgggaatgttggagccagtaaaagtttttgaacaagaaagtgtcctaaaaggaaatggtacttaaggattattaatctggcagcacttctaggggtatctaggcattttctgtcataatttaggtgtggggtgatagattgggagtagaaataaaagacaaagattgtatttaagagaagatttgaaggaaaaaaatcaataggacttcttgaagagaaagaagtagaggctatttctgaaactgagcttgagtgactgatcccactcttcatttagagctagcaaagctgaggagggacccagtttggaggaagcagaagaatgaattttagtttgggaattgctgagtttgaggtgagagatattgagtaaaagtggtccctgtgcagttagagttggggaccaagaagtggaaagaattgcactcaggcagaaaggctgtgaagggaatggaacagagtgtgccagaaccctcagggtgtttctcagctcttgtttacgggccaccaggtatactatcttgaatttaattttaagtgatacgtttgaaccacaacctctaccttttgtttcataaaacgtcagttctcacaccctaagacacattgatgcaagctatcgatgctattactattttacatggtcttcttcctgttattctaatatatttggaaagaaaatgattaatacatgtgaggcttttcttggtaattttcaatacttttgaatgttttgaatacaaggagaataatatactaaagctagagaccttaaacaagaccgagaaaagactgcatataaaaagcaaacctccagttcattaaaattgtaagttggagctcttggctccatggcagggagccttggatcagtaagtataacagctcccttccgtattgtacttagaaaagaatgatcataaaacctacttaggcctcacaaggtctttttgagccttagccaatgcatttagtcactgtcagtaaccacaagctttagtataatattctggcttgcaaagcagccaggtctccagagcatgacgataggctcttctatacaacttgaaagctgttgctgaggcataccttcttgatattcctcttagcacttttctctagtctatagcaagtctgtacctgtagatgacagtggattgctcagatattattaaagagtatgcaagtatcttaacaggaaacagcttaccctttgggtaatgtgtgatacagtgaagaaaatcccttaaatggttgcccaatatttatgctgctggcatgtttgctgggatattttttctcctctgaattagtattttgagtccttgggctcttcagtttaatagataatgtttctatgtttaagtgtagaagatccaccatgttagctgaaaagttccaaggcttttctgtctctgtaacatttctctgcctaaagaggtagcaggttgaaaatttaggaaataactttgcgtcaaaaaattcatcagcctttctaatcaattcgattttaaagtgaaacagtgatgaactttgcatttatcagaattcatgtttttctcatggatttaacagccctttgcaactctgcttccttggttacatgatagaaagagtatctgatcacatcagaataaaatcgtttgggaagacatccgtgtgtcatagattatgtagcttgcaacaggatttaaagcaaaaagatggtagaatatcggatctatcattatttttgcagtgaatgtttcaccagctggtttgagagaagttttacacccctaccaggcttcctcttacctcatttaccgcaaaaaccacaagtcctaacaggcaaactgtaattgcctaaaacaaaactagtaaggtataaatgcatgtggaaatgattatttgaaggcaaaaggcaaataaatgtcaccagtctgagccatgacctaagcatcctaggtctagtaaccattcttttggtaagggataatgccaacttttttatcaataggattctgttaaaaatacaaagaaaaacagtcagcaggatactgtatctatacacatacatatatgtatatacacatatatgtatatatatgtatgtgtatatatagatataaaatacttttgtttcattttagagctggttgaacttcagtggtgggtagagcttgtttttaatttatataatttttgtagtacaattttaaaatattatttttttaaatgaatccaggagctgtgcggtcttatgcattggaacttaatttgacagattcagaaaatgccacttgcctttatgcaaaatggcagatgaatttcacagtacgctatgaaactacaaataaaacttatgtaagtatatattttaatttttctttgagttttatagtaggaatttaattgactttatcctttagatacacgtatacaaatgaaattccacgttgactgacttaatgctgaaactctgggattttttttaagcatacacactcagaagttattctgtttagtgttagaatgaatatttcttctgattcattggttcttgggagtttttgtaggacttgattaagggcaaatgatctgaagacgactatatggtgttcaggtctaagtatttctgtaaagtgtttaaaatgtactagcaccaaagcttgcccttttaaaaagcagcttcccatctgggcatggtggctcatgcctgtgatcccagcattttggaaggccaaagcaggaggattgcttgaacccagcccgggcaacatggtgagacctcatctctacaaaaaaactttaaaaattagccaggcatggtggcacacacatgtacctccagccactcgctgggccgaggctggaggattgcttgagctcaggaggttgagtctgcagtgagccatgattgtgctactgcactccagcctgggcaacagagcgagactctatctcaaaaaaaaaaaaaatcgcttacttaggttggtacaaaagtaattgccattaaaggaacaaaccacaattacttttgcaccaacctaagtaagcgatttttttttttggcacaaactgcaattacttttgcaccaacctaacactaaaatctccccctttttgacatctcctcttaattcctttgccttcttattttctttttgttaaggtcctcactacttacaacctaattttttaaaaaatcagtttaagaacagcagctcaagccagttttccttttctttttagacatacacgaatttatccagaggagtggtatgtagcagaagaatcagggactggtttacacagcaaaccaggcaaagggcaacctggcca

SEQ ID NO: 12606 - DNA, 6000 bp, Homo sapiens
tccggccggagcctgaaccgagcccggctggctgtgctgcgcggtgccgccgggaaagatggtcgtggcgctgcggtacgtgtggcctctcctcctctgcagcccctgcctgcttatccagatccccgaggaatgtgagtagctgaagggagcctgggcgcctaccttcgccgctatgttgggcccctctttatcttctacctcctcaccttctccctgttccggaccctgactcctctccctggcctttcctgggcacagggtgggcaggagatagccaggacgttgggtacccccggagagaagggcagggtagaaggtgcggggcgtgtcaggaccatggacagggacaggcgcggccgccggggcgatttcagcaccagggacagcgaacctggagcagggccccgaggtcttgggcctcctccatgctctccttagcccgccccatctctgcccgccccactccgactcctccgcttccatcccccaccacaggggtgtggcagcaggagaatggggtcgtccccagccctcagctggcttgtgcaaaggcctgtgttcaagtcttgtccccatttctctttcccctcctgggcccttggtcaccctgtctctgaactgagacaggaaaaggtggcttgaaaaaccctggtcccagcccagcagccttctggacccttttttgtgtgtagttatttggtgggggtgggggcagggctgctggagcatgtgtctatggttgtaacatttgttgggggcacaagcaggtgagtggatgttggggagtgtggccgtagggttgtgattaagcatggatacactgtgtatgtctgtgtgttcttgtgattgactgagcgtagatattcgtgaatgtgattttgacttccttacatgggtgactgtgtgagtcactctgttacttactggccaggcttgtggaggtcgggaggtatttgaccacgacatttgattgcattgggtcatgtgtatgtgtgagtggggctgaatgtaagtacacacttgcgtgtggggggtgttaccgtgatggtgttttctcctgtaagtagctgtcaggccgtgtgaggggcatgtcacagggtatcatgtgtgagggcatttgtgtctcttgagctaccaggctccagtcccttcccagcctcaccttgacacctttgtctctgggcctggacaaggaggaggccagtgtcactgagagacgagttggcggataggggttgggaagactgtctgtgccagcagtgggacaggggctgcgagagagaggctggggaggcacctggcgttgggaggcagtgagggcttggaggaggtaaaggggctggccccttagacacatacatggagggccagggccaggcagactcccttggtacagatgcacatggacacatgcacacaggtgcatgaagacaaggcaggtgcagggatgaaggagcagagccgctgagaggccacacaggtggaaacacacaccagtgaggcttttagacccagaggacacagaggtggatacacaatataacactgtacagtggaatgcaagccgtgcattctctacagaaagatgggagtggggagagagaactaggccaaaaggccatggcagctccaaggctgccctggtcactgaccagcacttgttcttgaccctgatacgacacagtgggcagtggcaggcagccggccctccctgttggaacctgtcttccatctctccctccccagccactccagccccctttgtctcttttcctgcttcctccacctagttggctttctgcatcctgtcatccctgtcaccatctccctccccagctcagggccctctgcagtgtccccagggagccccctcctccctccctggaccttcacactgaggtcttctgcagagacaaagctttcagaggcagcctgctgctccctccctccctcttctcccttcctcgaggccgccctggccagtgctctgcagagtcctggggctgggacagcagctctggcctctgccccagagagcttggtggctgtctgggaggaaggagggagaagaggagggctggcgccaaccccgcaggctatggaaactcagaggcagcagggcctttgggatagttttcagggggagggggcagcagggctctgaaggctgggccctggtaattgaaaacactcagctgtgctaattggattaggagggaagcaggctggagcaggggacggtgccttccaaggcatcctgaatgggtggggtcagttctgcaggccctgccaggccctgccagggggctgcaaggacactccttgttaaaggcaagaatttctctctccctgtctgctagagctggaggcatggcctggctgcctctgggctacatgccctgtgtgtctatccagtggagctcctctccctgggcatctctctgtcccatctccctgggcttgacctgccactgctccagcccagcgtgtgcccccttgttgccactgccagggcctcctctcctgccattccctctccacgggggggctgcaggagcttactatgtcccctgccatctgccccactctggggctgcctgtcagtatttctctccattccctcccttgctgcctgcctggatttctcagatgaaggacaccatggtaagttggggaggggtgagagtgtttcccagaaggccaaggagaagggtaaggaggccctcagctgagcctgcacccccgccctcctgagtgccggggccctgctcggctctccctgagcaccatgtgcttctctcacctgtgtggggctggctttgttctgtctctgccccagcctgggtactctgtcaccctcactgttcctctctgccattctctctggtcccttctcccctgtctggggtttgtccttcttggtttctgtgtcttggcttttgttgcccccgcttctttctgtcataccctttttgtctttctcaggcatctctttgtaacttacgtggctgtcccctctctccctcttttcatgtcccacaagcctcttttgttcttcccctccgttcgtccccctgtggccatggggcctccaggggctctggaccctgcttccctcacgatgggacaggtgctgaggctatgacaccagccaggcagcaccctcaccaccgctctctccaccctgtcttcagtgatggagccacctgtcatcacggaacagtctccacggcgcctggttgtcttccccacagatgacatcagcctcaagtgtgaggccagtggcaagcccgaagtgcagtgagtgatctctgccgtctcagcccctgttgcctgccactgaccccggccttgtgcctccctggactgcctaacttctaagcccagaagccccaaaccttgctaatcaccccaagtcctcgccatctcccagtccatcccctgggggccctggctgcttgcacctgtccctccagcctgttccagcccccgttgggttccagggcctcaggcctctgggcctttttccgcccacaggttccgctggacgagggatggtgtccacttcaaacccaaggaagagctgggtgtgaccgtgtaccagtcgccccactctggctccttcaccatcacgggcaacaacagcaactttgctcagaggttccagggcatctaccgctgctttgccagcaataagctgggcaccgccatgtcccatgagatccggctcatggccgagggtgcgaggcgctgcagggaccagggagggcaggtcccggagttcgtgtgggattgtgggctggaagctgctgtcagccagttgtctcgtggcgaggggcctgggtgtcctgccagccctccaccccaccccagcttctcccctggcccatcttgtttcttgtgcagtctcctcctttgccctgtctctgtctccattgcacttccggtcatctcatgccctttcactccctcaggctttcctggtgcctgcctcatggctgagcaggaaggtggcggggggaggggggggcgggctggtggggggagtgactgattctgggcagacctgcctgagtcactgcagtcatctctgtctacacctgcactccttagcagggcccctcttctctggcttttccacttggctctccatctcctcccctccacctccgacttggtctctcttgctccacggctctgtcttgatctgtgtcgccttttccctggggttttccctttgcattccatcctccctgagctttctgcttcctgagcgctctcctctcccctccccacccctccagttaccttgggaaccgttgccatggtttctgtgtcaggatgatggaagggtctgtgactcctgcatccctccacagctcccctcccccatcactgcacctcagcctcagcctccccccacccgtcctttcctagggtgggcagggagagctgagaaccgtggaaggttaacccttcctggcctcctggtctcctgctcaccctggcctccctaagtgctagtctctgctatgagtccagaaggtatccagagtgtctgcctccttttctgtgaagtttctactggcctgaccctctcgccccctcgtccatccctggtgtagcccgccacccccctgcccccacctcccttctcctgcctagcaccatctggaccaggaggagagtgtcagcccgtctgtcccttctaggtgcccccaagtggccaaaggagacagtgaagcccgtggaggtggaggaaggggagtcagtggttctgccttgcaaccctcccccaagtgcagagcctctccggatctactggatgaacagcagtgggtgccggcgagcggctgcctcgtggggtcggggtgttagcgggggtgtcttcctggacggggtcatgacttcggcctccttgccccctgcagagatcttgcacatcaagcaggacgagcgggtgacgatgggccagaacggcaacctctactttgccaatgtgctcacctccgacaaccactcagactacatctgccacgcccacttcccaggcaccaggaccatcattcagaaggaacccattgacctccgggtcaaggccagtgagtctcagaggctctgcactctctccctgactcctttcaccctcaggcatggcccttcccaccataggtccatctgacaactccaggcttcctcaagaacagcttggctcccacctctaccctgcccagaccccttcccaggcgtcgagagcagagacaggacactctccttaatggaggaagacacagaggccccgggggctggctggagtgtcgagtccctcagccttgcaattctggggtggagggaagagtgggcagcccacccacccactttctcctggcagccaacagcatgattgacaggaagccgcgcctgctcttccccaccaactccagcagccacctggtggccttgcaggggcagccattggtcctggagtgcatcgccgagggcttgtgagtctgggaacccagggcagggcagggcagggcagggtggcggagccctagcagggagctcagaccaccgcggggtatagggggctggggtgattggccttgtcctttctcccttctgctctcttccctttgcctcccgggcagtcccacgcccaccatcaaatggctgcgccccagtggccccatgccagccgaccgtgtcacctaccagaaccacaacaagaccctgcagctgctgaaagtgggcgaggaggatgatggcgagtaccgctgcctggccgagaactcactgggcagtgcccggcatgcgtactatgtcaccgtggagggtatggacctcctgggacagtggcctgtgatgcccactgtcatgggggaggggagggtctgcgccgggtcaagagccagctgctggctgcgggctcagggcggctctccccttcctcccagctgccccgtactggctgcacaagccccagagccatctata

SEQ ID NO: 12607 - DNA, 6000 bp, Homo sapiens
aagtctttgtttgtctctggcacctcttgataattgttgttttactcctagaacccacccactgatccccatccatccctagtaccagtcacggctgctctagcatttcggccttgtcaactactgcaggccctgatcaaggaggcctctgttcatggggtaaggttaaggggtgggttctgggaggagggtaagactgtagtgcagattcgagacctagggaggtggggccagtttctcactcaatgagcctgcctgttgtttagctctattgtatagggttcttctatctctccctttgtcagctggattcaagggacaggctgggaattgtgcagggtacaattggtctctttctaccattcctttcgatgaaagcccttcctctccttcctttgatgagttcccagattcacactgaatttccatcatggagctggtccttgaggcgggcccagggcatgggaaaggagggagggagggttgggagctcttggtgcctgcttaaagagacagcatcaggatcaacacagtcccttgatgaacctggatctgtgtaagtcacattggttctgttgatctctgtcagaccgctgtgaagagcgctggtgagaagggcttaaagttggagtatcaactatcacagattgattagacttgttttgggagtttgtatacaaatgtagccaaccatgacatgatcttttccctttgcttacattttgcccacacaacttcgttatatccattttaacacttgcttataggtagctttagattttgattcacagacatatgtttgttcaccccaacaggatttcaagttttctaaagaaagggactggccttttaattcccttctgtttctcctaatgtctatgtcactgctagtgtgcttaattcttgtactgaattcacataaacagaaatgaaagaaaaacactggagggggtcattatttttctctatgacctttcatcaaagtcaggtggcttaatctgactgagttgcattgagaaatgttattactatatggttcttttatgccaactctctcatctcgcagtctgtacttagactggaaatgtgagaatgtctcttgagagagccaaggaacttctcccctagaatctcttccagccttcttgaatcaaactcacaccctttcaaccaggaggggttctgaaatggagagcttttggctttaggctattgttcacacatacccaagggacatttcttggactgtgaaaaatcaaagggagcccaatggatcttttctcagaatgctttgattgtccaactactttgatgaaaaaataatttcttgcaggctctgagtttttctcagttagaatctaaaatctgattcttgcttggacagactgactgagattcttcacttctgctgaacttaaatgcccccaaagcaaacatttcatctaggttgtgaagagatgaacatctgatgcttatgctgatattactgaattgtttatagcttaatagtgatagatttatctaaagtcatttatttcagactttacattagaaactcattaaagcctacttctttcttgtcccttgctttgagctgtagtggagcagaaaaggggatgctaagttattcaagttctaagaaaatagaggaaaaatggatgtaaaaagaaaggctatgatctggtgactcagaattgctcctaaggcttagccatttatcacccagtaagaacacaatccatgacactctcaggttatttggatgatgattgagggatcagatacactcaagaggatgtttccctctcatctttgcaaccctagaggtggcatcacctaacgcttaaagtggagttctcttttggctagcaagagttcaagttcctccatccctgaccatacctgcacaagcacttagcccttcccagatgaaaatgctgggatgagtgagtaggcccaagatggtcacttgctagggtggatggctcttcttaccctcggctaaacaaacagtcctgccattgttccctgagtctgaccccctccccaccccccggctgcaggcccctgtggaataccaatcaggctcctgagatctcaggaaagaacaaggcttctttgtccgggggagctatggagggctctgtccaagccctgaccctgtgctggggagaaagggaacagtggggtcactgaccttcttctccccccatccccaggcttcagagactttctttactagaaaagtctaagagtttgggggtggggaggagttggataggcagagaaggaaaatggcagtactgtttacttctaagctccttttcttgacttataggctgaatctagtatcttaacctgttgagaaagaggaagatcaatttctggaatgttttctgagaacaacaatcgatttcagttgttgtgtttttctctgtggtatacatgtgtgtatgtgcacatttgtacacatgcatgcatgtgcgtgtgcacacacacagacacacccatgggccagctctgaaaagacactcttcccaagcacgtttgcaaagttcatgctgagtaaactcagcctccactcacagcagcacagctacagattgcttcttatagaggccaagtttcctggcagcaatgctttagttcttggaaaaggaagttctgctccaaatgttagctgcttactttgtttggcttgggcttctgaggctcatctttggtgtgacactctttgaaggccaagaaagggctgtcatttcaggggatggtgggtaataggactcactccttttgtgtctctgagaacagaggcaaatgcctctacctcgattttcccatgacagagataatttgatctttccaaatctgttcacactgatgcaattcagccatgtaaatcactaggtattcatgctctctgggctaaaaacaaactgtaactaatgttaacagaatcaggaaaaggagtcccctttccctggtaccctatagaaaagtgagtgtggcttggagaaatgcttgaatacaaaaatccaagcctaagtaattaatacaatttatttttattgtacaagctgtcacaacctgcttattcaaaaatagcagcttcccagtacatttgctgagtatttgtgtgtgtgcatgtgtatactgtgtttatagatatataaaatcagtgggtatatatacatatatttatatatatacatacatatgaattaagacattttttctgaagagcttaacattctcatttcttctacattttagggatctggccgagaggccagaggaagccattcttttcctcatctagtcagtcatctacttggcatttgctaaggttcactccatatgacatcttagagcatgggactagtacttggaacacagctgctttcagagcctgtgacttcttgtgtgcctctcctgtttctcagcaacactggcatagggcctgggataccaggtctggggatctcagggactcttagcactttaagacacatgtgttcccaggccctggtgtgttcctctagtgccagaaagatgtttcatgctttgctgactttgtataaagtctgtttgtagctgttttgacagaatctcagcgtataactgagggtggggacattagccaagctgcattataggaggacaaaactgccatacaaagtgtccaaaatcattaagcctgcatttttattattgggagtaatatcaaacctcctattttccaattttcatttcttgtcctgtgctagctccatcctgtttggactgctcctcccatatgtaaactaagaagaatcaagcattctttgcaacaaatacacacgatgctcaaaaatgtccaggagcatccaatttccaaagtttcctccacctggaatgctcttcatgctaaaatcctgtctgacaataccagcatctctggcctgcactcatcccttcctggaactccaagtgcatttaccctctgttaccacttacttggctgcctgaattgttagttgaaaatattaggtctacttagctaattcttcctcaggaaattaaagactcccatatggcagagtctgtgtcttttctctcttcatatcccgtataacacccagcataatgctgggcatatagtgagtattccataaatagttgatgaatgactaaaataagcaagcaaacaaacagactagaacaataagaaagaagggactgatttcataatctctctggcttgctatttgaattgctgaattattattatttattaaatattttttaaattctggcaataaaaggtaaggatttattttctttctttctttttttttttcttgagacagagtctcgctcttactgcccaggctggagtacaatggcgcaatcttggctcacggcaacctccgcctcctcctgggtttaacagattctcctgtctcagcctcctgagtagctgggattacaggcatacgcccatgcccggctaatttttgtatttttagtagagacggggttttgccatgttggccaggctggtcttgaactcctgacctcatgtgatccacctgcctcagcctcccaaagtgctgggattacaggcatgagccaccgtgcccggccaaagatttattttcaagaatgaaacaaagtaaggattctgggtcaatctcacatgctgaaagccaaaacctctagccgctcctgctttttgacttcggagtgcccactatctccgagcctgtgagcacagggcctggcagaggggtttgagtggcatgagctacctactggatgtgcctgactgtttccccttcttcttccccaggcttgttagagtgctgtgcaagatgtctggtaggggccccctttgcttccctggtggccactggattgtgtttctttggggtggcactgttctgtggctgtggacatgaagccctcactggcacagaaaagctaattgagacctatttctccaaaaactaccaagactatgagtatctcatcaatgtgtaagtacctgccctcccacacagacccatcttttttttccctctctccatcctggagatagagaactcttcagtaccttagtaactagcaggggactggggtggagccagaccggattcccgagtcttccctctgtgcagatctctcctgctccacattcgaagcccattcagaaaggaggggtctgcctgcctgcctgtcagcccctcccacccccgcccccttgttttcttacacgtgttctgacttctgctaggtgtggttcatattgcccaagttggagcctccagcgtagtaggtatggagaagccaagggaggcactaagcctctcctgttcctagaacaagttaggctcctgttccttcacccacctttcttcttgtctagctccctactcctgtgagttagcatgtctgaagggtggggcagggagagtaggtccctggttctccaggtcccagggtaagcaaggtgtggcgggaggggcatatgtttctggtcacatacaccctgtcttcacttatttcaacaaagataaggtgaaagcatgcaggaggaacctggtgattcctctagaaaatccctagccttgttaaggtgctcgctctggtgtatacctcacttatgtcgggaaagaagccaggtcttcaattaataagattccctggtctcgtttgtctacctgttaatgcaggatccatgccttccagtatgtcatctatggaactgcctctttcttcttcctttatggggccctcctgctggctgagggcttctacaccaccggcgcagtcaggcagatctttggcgactacaagaccaccatctgcggcaagggcctgagcgcaacggtaacagggggccagaaggggaggggttccagaggccaacatcaagctcattctttggagcgggtgtgtcattgtttgggaaaatggctaggacatcccgacaaggtgatcatcctcaggattttgtgg

SEQ ID NO: 12608 - DNA, 6000 bp, Homo sapiens
caatgttccactcaggctgtagagggattgccaagaaacaaatccgatttccaggatcttgtgacttaaacaagcgaggcagatggctcttgtgctccataaaaatgtgtgttttcatttggctcattactgtagaagcttccctcttgtttttttttttaagttgtctgagtcatagcttgaggacccatgccaactttgtttgaaagtgaagacaccatgaattttaagtatccagacaaaagattttttgttctacgctgaagttgattttgtttggtagagtgtaaggctttgctggccacttttatagctaacctgtaccttttccctttcttcttctcctgaaggttgcttcagttattaacatcaaccccaatacaactcactccacaggcagctgccgttctcacactgctctacttagactcaatagcagcaccattaagtatctagactttgtctttgctgtggtgagtaacagattttttaaagttaggttcattctcttagaaacacatctgaaagtctaaatagttgcatggggggaggggggtatttagctttattttccagttctacagtactcaattataaagtgtagtccattcatccctgttcatccctcagagtctgtgcaatggtctgtggactggactcttgcattaatgttcaccaagagtggccattttaccattagagagactctagggtagaagcaagaattaactcacatcaaaaaaaagaaaaaaacgaaacccacaattgtctaatctatccatacataagtaatttccatgataattttttctctgttattggttaggtagtgctcatgtttttctgtgatactatttgaagccatttggaggctatattatttgtgatagtgtcagtaataaaaataggtaacatctattgagtacttactatgtacaaagctctgtgttaagtgtgtatatgaattcattaaatcaggacaatttataatggcagcattcaggtttttgttgttgatcaagagctgaaacctaaacagaaggttttgggttaagcatacctgttctacttcttgctagcataaattaatcatcggggatctttatttccaccttctcagaagcaactattattcccataatttctgtgaagggatgtatgtgtgaacatgttgtggcaaatgagactggtggaatagaagatagctgtaagtgagggaaaatgttgaaccaccaactattctcaaactaaaaatattgtataattagataaaaaccagttctgtttttaaatcagattactgtgtttggggatggggaaataatctcaacatctgatatataaaaagtaggtatgttgttatttcatatgtgatcttggtattttgagtctaaagcacatttttctctttagaatatatgccgagtaattgaggattacattaggcacttgtattttggaaaggtttacaaaaatgttcctttttccagcattcaaataattcctctgttaaagtaccatgtgaccagtgaattactattgaaaatgtctaattgaatttgtcctctccagtatggtaaaagcaagcctcaggcacattctcttttaaagttacctaataggggttatggtcaataagaacaaggaaagtagtattttgggtttattccctttcaagtgattgagtttgatctttctagctgtggtagactcctaaaaggaacatgatttctcttgactcttatacggcaatgtttagtatttaagaattacaatatttaatttacccagcaggctatcttaaaacgtaatccaaaatagtgacattttaatcatgctacaggcactctgaaaaatcaagagacacctgcaatgtccccagagttcagtggggcccatttttgccttcaaccctgtcatgatagatgctccttaggagaatttatagaattcgagtgcgttatgtgcaggctgctatggtgggttatggagaagaaagccagtattcttaaagtgcccacagtttagtggtaatgggagaaatctgcaaataattaccatttttgtgaaaggcctacatgccatgccaaggcttttgaactcgattctgtaggcagtatagtactgtggaaggtgtatatgaaatgggatgagtgccagaccagagaatagtacaaagtgctgcaggagaatggaggagggagaggttaattccggctggaggagagtcaggaaggtttaatggcagagatggcatttgagctgggccttcaaggatgggtctgatttgtattggtagggagataaggagagtaagtgggaaagtgcaggttatccctggataaagggcataatcaagaccagctgggagaatgaggagtgttatatgtttagtgaaaatgtggaaaagtcattgggacaaattgtggagtcttgaatgcaaagccaagatgtagcctaagtcgaggagggatgtgatgaaggtgtgaagtcctccattatgcttcttcctgaaatttctctgaagtctgtctcctagcttttactccccattgcctttgctctgggtccagtccacattacctcttgcctggaccattcaaacagctcctgcctgattgctcctcttcctcaccttctccattgttctacatcaacttaaccttcctaaagcacatctctccatcagtgtttctctctttcttttctttctttctttcttttcttttttcttttcttttctttccttccttccttccttccttctttcttcttttccttcttttcttttctttctttgacagagtctcgctttgtcgcccaggctggagtgcagtagcgagacctcagctcactacaacctccgcctcccagattcaagcgattctcctgcctcagctgcccaaatagctggaactacaggcatgtgccaccacgcctggctaattttttgtatttttaatagagacgggatttcaccgtgttagccaggatggtctcgatctcctgacctcatggtctgcctgcctcacaatgtttctcttttgccaacaaggtaacatctaaagtccatggctgggtagttcaagccttcttttctcccatgcaatgcagcctgcattttcagccttcactccctctttatgaaccttatgtttcctttagttccttcagggtgcttccctcatcctgtcctctgtgcacttcttgtgaggtaggagaacatagtaataataattacatagactccgcagccatactcccaaaatggggatgataacagcacctattgcataggagtgttgtacttactcagcgaagcatcatatgtaaagttttaagaacagtgctgggcacttagtaagtgctcaaatgctagcataaaaatttgagattatgcttattttctaactaccgttatttatactcttgctctctcaaataccccttttcccacttgtttcctaagagaatcctgcccggttcaaaatgccccatccctaagctggcattactttttctcctcccttatttggaagtgatttctctcctattttcatgacttctcactttcttttttgtaatatggttgtttatgtgtttatcttaccttccctggcagattgcaaacagggtgaaggcaggattgaagtgtggttcattttggtagctcctggagtacttgcactctgaaattattagaatgactggctgatcagatgagtacttcagaaagataatagcagtgaaaaggaaagattaggactggaggggctgaaaggcagggagcccacttaagaggctgctgtgatccaggctagaggtggtgagggctcagcaagtgacaggaggaataaaattgaggccataaatcttcaagtgtctgagatccacatgactacacctgtgctccaaaagttggaaacaaaatacagaggaaagggatttctgtcagattatgagttctcttttacttagttgcagtttattctaccgcatgatttcttcttctgtgtaatagtgttagattgcttttcttctgtgggtattaaccgtatctgttatctgtagacagttgtgaaatgttaattaactggaagctctttttcaaacagaaaaatgaaaaccgattttatctgaaggaagtgaacatcagcatgtatttggttaatggctccggtaagcaaagcactggcctggggaaaaagactgtggattaccctgaaggattagaaattacaatggtcttattaccaaatagtgccttatttaatgaaacagaagatgctatgtaaaaagtgtaccttgatcataccttaaaatcagtaacttagaactatgatgttctgtctttttctgtatcccattttttcaaagtagagtagataataattaaggatatgactgatttttagactatagaaacatctatagaaagataagggaacctagttatggtaagaattgctttttgtgggttgatcttgtcccccaggccttcactgaaaaaccctgaggactgttcctttttttttttttttttttttttgagacagggtctcgctctatgcccaggccagattgcaggggtgtgaccacagctcaatcccaggttcaagccaactacccacctcagcctcctaggtagctgggactacaggtgtgcaccatcatgcccagctaatttttttttgtattttttgtagagacagggtttcaccatgttgcccaggctggtcttgatctcctgggctcacgtgatctgcccaccttggcttcccaaagtgctggaattacaggcgtgagccactgtgcctggccaactttcccatttttgatgttgataggataagaagttactaacctgtttcttttctttgaagttttcagcattgcaaataacaatctcagctactgggatgcccccctgggaagttcttatatgtgcaacaaagagcagactgtttcagtgtctggagcatttcagataaatacctttgatctaagggttcagcctttcaatgtgacacaaggaaagtattctacaggtaagaatcaagcaaacttcattaataatttatgttcttatgttgacaggtggcttttcctttgaatcatagacatttaaacgttgaaatagaggaatatgaattcatagccttgaccaaattgtgcaactctatatttggctcatcattttgctcaaccgagatgtttttgtgatcttaaaatcatttgcaaaaaaagttcttaaagctaaaactgatagaagctttaagtgagctttatttgaggtatgggttttagtttgtagggaagatggcacttgggagcagcagctttgagcatcttgcatctgcttcctgaggccgtcttctcactggaaacattttcatacctgaatgaaagcagtttggtctgattttgttaagacaaaagataaagagcggtagcaaagcctcaaatatcatgaactatgtttttaccagccaaaacgatctggagagttttcaaagcatgtgccagtgtgaatgacgctttttgaagatcactcagggataatggtggtatttattagatttttaatgaaaccttttgaagggctcattataatgtgttcatacgaatatgaaagacatatttggcattacaagattaaaatttgcatgaagaaaaaaagcacataaaattccttaattgacttgtccttttaagcctattacctaaaattgggggtttgtggatcacaactctgttgagcagagctagctattccaggcatccacatccttttcaaccattaattctatggtttggaaggaaatgtggaagctgtgtttaaaagcgaatatactgtgagccattcgactacttttgcagtggtgttgaatacctagtctgacttggttaggccacaataaattgggctctccaccctaccattcttgcgattaaagacgttagttacactttaaaaatattttcaagaattcattttcc

SEQ ID NO: 12609 - DNA, 6000 bp, Homo sapiens
gtagctgtcaggccgtgtgaggggcatgtcacagggtatcatgtgtgagggcatttgtgtctcttgagctaccaggctccagtcccttcccagcctcaccttgacacctttgtctctgggcctggacaaggaggaggccagtgtcactgagagacgagttggcggataggggttgggaagactgtctgtgccagcagtgggacaggggctgcgagagagaggctggggaggcacctggcgttgggaggcagtgagggcttggaggaggtaaaggggctggccccttagacacatacatggagggccagggccaggcagactcccttggtacagatgcacatggacacatgcacacaggtgcatgaagacaaggcaggtgcagggatgaaggagcagagccgctgagaggccacacaggtggaaacacacaccagtgaggcttttagacccagaggacacagaggtggatacacaatataacactgtacagtggaatgcaagccgtgcattctctacagaaagatgggagtggggagagagaactaggccaaaaggccatggcagctccaaggctgccctggtcactgaccagcacttgttcttgaccctgatacgacacagtgggcagtggcaggcagccggccctccctgttggaacctgtcttccatctctccctccccagccactccagccccctttgtctcttttcctgcttcctccacctagttggctttctgcatcctgtcatccctgtcaccatctccctccccagctcagggccctctgcagtgtccccagggagccccctcctccctccctggaccttcacactgaggtcttctgcagagacaaagctttcagaggcagcctgctgctccctccctccctcttctcccttcctcgaggccgccctggccagtgctctgcagagtcctggggctgggacagcagctctggcctctgccccagagagcttggtggctgtctgggaggaaggagggagaagaggagggctggcgccaaccccgcaggctatggaaactcagaggcagcagggcctttgggatagttttcagggggagggggcagcagggctctgaaggctgggccctggtaattgaaaacactcagctgtgctaattggattaggagggaagcaggctggagcaggggacggtgccttccaaggcatcctgaatgggtggggtcagttctgcaggccctgccaggccctgccagggggctgcaaggacactccttgttaaaggcaagaatttctctctccctgtctgctagagctggaggcatggcctggctgcctctgggctacatgccctgtgtgtctatccagtggagctcctctccctgggcatctctctgtcccatctccctgggcttgacctgccactgctccagcccagcgtgtgcccccttgttgccactgccagggcctcctctcctgccattccctctccacgggggggctgcaggagcttactatgtcccctgccatctgccccactctggggctgcctgtcagtatttctctccattccctcccttgctgcctgcctggatttctcagatgaaggacaccatggtaagttggggaggggtgagagtgtttcccagaaggccaaggagaagggtaaggaggccctcagctgagcctgcacccccgccctcctgagtgccggggccctgctcggctctccctgagcaccatgtgcttctctcacctgtgtggggctggctttgttctgtctctgccccagcctgggtactctgtcaccctcactgttcctctctgccattctctctggtcccttctcccctgtctggggtttgtccttcttggtttctgtgtcttggcttttgttgcccccgcttctttctgtcataccctttttgtctttctcaggcatctctttgtaacttacgtggctgtcccctctctccctcttttcatgtcccacaagcctcttttgttcttcccctccgttcgtccccctgtggccatggggcctccaggggctctggaccctgcttccctcacgatgggacaggtgctgaggctatgacaccagccaggcagcaccctcaccaccgctctctccaccctgtcttcagtgatggagccacctgtcatcacggaacagtctccacggcgcctggttgtcttccccacagatgacatcagcctcaagtgtgaggccagtggcaagcccgaagtgcagtgagtgatctctgccgtctcagcccctgttgcctgccactgaccccggccttgtgcctccctggactgcctaacttctaagcccagaagccccaaaccttgctaatcaccccaagtcctcgccatctcccagtccatcccctgggggccctggctgcttgcacctgtccctccagcctgttccagcccccgttgggttccagggcctcaggcctctgggcctttttccgcccacaggttccgctggacgagggatggtgtccacttcaaacccaaggaagagctgggtgtgaccgtgtaccagtcgccccactctggctccttcaccatcacgggcaacaacagcaactttgctcagaggttccagggcatctaccgctgctttgccagcaataagctgggcaccgccatgtcccatgagatccggctcatggccgagggtgcgaggcgctgcagggaccagggagggcaggtcccggagttcgtgtgggattgtgggctggaagctgctgtcagccagttgtctcgtggcgaggggcctgggtgtcctgccagccctccaccccaccccagcttctcccctggcccatcttgtttcttgtgcagtctcctcctttgccctgtctctgtctccattgcacttccggtcatctcatgccctttcactccctcaggctttcctggtgcctgcctcatggctgagcaggaaggtggcggggggaggggggggcgggctggtggggggagtgactgattctgggcagacctgcctgagtcactgcagtcatctctgtctacacctgcactccttagcagggcccctcttctctggcttttccacttggctctccatctcctcccctccacctccgacttggtctctcttgctccacggctctgtcttgatctgtgtcgccttttccctggggttttccctttgcattccatcctccctgagctttctgcttcctgagcgctctcctctcccctccccacccctccagttaccttgggaaccgttgccatggtttctgtgtcaggatgatggaagggtctgtgactcctgcatccctccacagctcccctcccccatcactgcacctcagcctcagcctccccccacccgtcctttcctagggtgggcagggagagctgagaaccgtggaaggttaacccttcctggcctcctggtctcctgctcaccctggcctccctaagtgctagtctctgctatgagtccagaaggtatccagagtgtctgcctccttttctgtgaagtttctactggcctgaccctctcgccccctcgtccatccctggtgtagcccgccacccccctgcccccacctcccttctcctgcctagcaccatctggaccaggaggagagtgtcagcccgtctgtcccttctaggtgcccccaagtggccaaaggagacagtgaagcccgtggaggtggaggaaggggagtcagtggttctgccttgcaaccctcccccaagtgcagagcctctccggatctactggatgaacagcagtgggtgccggcgagcggctgcctcgtggggtcggggtgttagcgggggtgtcttcctggacggggtcatgacttcggcctccttgccccctgcagagatcttgcacatcaagcaggacgagcgggtgacgatgggccagaacggcaacctctactttgccaatgtgctcacctccgacaaccactcagactacatctgccacgcccacttcccaggcaccaggaccatcattcagaaggaacccattgacctccgggtcaaggccagtgagtctcagaggctctgcactctctccctgactcctttcaccctcaggcatggcccttcccaccataggtccatctgacaactccaggcttcctcaagaacagcttggctcccacctctaccctgcccagaccccttcccaggcgtcgagagcagagacaggacactctccttaatggaggaagacacagaggccccgggggctggctggagtgtcgagtccctcagccttgcaattctggggtggagggaagagtgggcagcccacccacccactttctcctggcagccaacagcatgattgacaggaagccgcgcctgctcttccccaccaactccagcagccacctggtggccttgcaggggcagccattggtcctggagtgcatcgccgagggcttgtgagtctgggaacccagggcagggcagggcagggcagggtggcggagccctagcagggagctcagaccaccgcggggtatagggggctggggtgattggccttgtcctttctcccttctgctctcttccctttgcctcccgggcagtcccacgcccaccatcaaatggctgcgccccagtggccccatgccagccgaccgtgtcacctaccagaaccacaacaagaccctgcagctgctgaaagtgggcgaggaggatgatggcgagtaccgctgcctggccgagaactcactgggcagtgcccggcatgcgtactatgtcaccgtggagggtatggacctcctgggacagtggcctgtgatgcccactgtcatgggggaggggagggtctgcgccgggtcaagagccagctgctggctgcgggctcagggcggctctccccttcctcccagctgccccgtactggctgcacaagccccagagccatctatatgggccaggagagactgcccgcctggactgccaagtccagggcaggccccaaccagaggtcacctggagaatcaacgggatccctgtggagggtgagcagggcctcaggcaggagtggggagtgtggcgagccctgggggctgtgggggagaggaagaggagggtgaggaagggcctcaacgcagctcaatgccgggctgtggcccatgggcccacctgctgcatgcacagagctggccaaagaccagaagtaccggattcagcgtggcgccctgatcctgagcaacgtgcagcccagtgacacaatggtgacccaatgtgaggcccgcaaccggcacgggctcttgctggccaatgcctacatctacgttgtccgtgagtgccctcccttccttacctcctaactcccagtctgtccctgcagcccactgggccaggccaccagagtggctcagctggcagctgatgtgtcctcggcctaccaggctggcgccgacctttctccttgctgacacccttcgccccatctcactcagcctcacgatagccgagggagatgtaagaggggaaaggtcttgtcactgtgactgagcggaccgctgtgccacaggatgtgaccaaggccagcccaggtggcacctctcctggaacttcagggaaggctggggactaggccaggaaggcttctggggagaggtgactgtcagttaggcctggaataacgtaaaagttgggtggctgtgaccagaggcgcatctgaggcagagggcagtgtctgaaggcagagagagacacagcctggcgggggcctcagctgggagcagggaaccaagatttgcagggctcttgggggcccgaggaagccgtgcagagggtccctggctcctggcccagctgtggtcccaagtcctgccctgtctcctgaggctgttcctcccctagagctgccagccaagatcctgactgcggacaatcagacgtacatggctgtccagggcagcactgcctaccttctgtgcaaggccttcggagcgcctgtgcccagtgttcagtggtgagtgtctcg

SEQ ID NO: 12610 - DNA, 6000 bp, Homo sapiens
gtcactgaccttcttctccccccatccccaggcttcagagactttctttactagaaaagtctaagagtttgggggtggggaggagttggataggcagagaaggaaaatggcagtactgtttacttctaagctccttttcttgacttataggctgaatctagtatcttaacctgttgagaaagaggaagatcaatttctggaatgttttctgagaacaacaatcgatttcagttgttgtgtttttctctgtggtatacatgtgtgtatgtgcacatttgtacacatgcatgcatgtgcgtgtgcacacacacagacacacccatgggccagctctgaaaagacactcttcccaagcacgtttgcaaagttcatgctgagtaaactcagcctccactcacagcagcacagctacagattgcttcttatagaggccaagtttcctggcagcaatgctttagttcttggaaaaggaagttctgctccaaatgttagctgcttactttgtttggcttgggcttctgaggctcatctttggtgtgacactctttgaaggccaagaaagggctgtcatttcaggggatggtgggtaataggactcactccttttgtgtctctgagaacagaggcaaatgcctctacctcgattttcccatgacagagataatttgatctttccaaatctgttcacactgatgcaattcagccatgtaaatcactaggtattcatgctctctgggctaaaaacaaactgtaactaatgttaacagaatcaggaaaaggagtcccctttccctggtaccctatagaaaagtgagtgtggcttggagaaatgcttgaatacaaaaatccaagcctaagtaattaatacaatttatttttattgtacaagctgtcacaacctgcttattcaaaaatagcagcttcccagtacatttgctgagtatttgtgtgtgtgcatgtgtatactgtgtttatagatatataaaatcagtgggtatatatacatatatttatatatatacatacatatgaattaagacattttttctgaagagcttaacattctcatttcttctacattttagggatctggccgagaggccagaggaagccattcttttcctcatctagtcagtcatctacttggcatttgctaaggttcactccatatgacatcttagagcatgggactagtacttggaacacagctgctttcagagcctgtgacttcttgtgtgcctctcctgtttctcagcaacactggcatagggcctgggataccaggtctggggatctcagggactcttagcactttaagacacatgtgttcccaggccctggtgtgttcctctagtgccagaaagatgtttcatgctttgctgactttgtataaagtctgtttgtagctgttttgacagaatctcagcgtataactgagggtggggacattagccaagctgcattataggaggacaaaactgccatacaaagtgtccaaaatcattaagcctgcatttttattattgggagtaatatcaaacctcctattttccaattttcatttcttgtcctgtgctagctccatcctgtttggactgctcctcccatatgtaaactaagaagaatcaagcattctttgcaacaaatacacacgatgctcaaaaatgtccaggagcatccaatttccaaagtttcctccacctggaatgctcttcatgctaaaatcctgtctgacaataccagcatctctggcctgcactcatcccttcctggaactccaagtgcatttaccctctgttaccacttacttggctgcctgaattgttagttgaaaatattaggtctacttagctaattcttcctcaggaaattaaagactcccatatggcagagtctgtgtcttttctctcttcatatcccgtataacacccagcataatgctgggcatatagtgagtattccataaatagttgatgaatgactaaaataagcaagcaaacaaacagactagaacaataagaaagaagggactgatttcataatctctctggcttgctatttgaattgctgaattattattatttattaaatattttttaaattctggcaataaaaggtaaggatttattttctttctttctttttttttttcttgagacagagtctcgctcttactgcccaggctggagtacaatggcgcaatcttggctcacggcaacctccgcctcctcctgggtttaacagattctcctgtctcagcctcctgagtagctgggattacaggcatacgcccatgcccggctaatttttgtatttttagtagagacggggttttgccatgttggccaggctggtcttgaactcctgacctcatgtgatccacctgcctcagcctcccaaagtgctgggattacaggcatgagccaccgtgcccggccaaagatttattttcaagaatgaaacaaagtaaggattctgggtcaatctcacatgctgaaagccaaaacctctagccgctcctgctttttgacttcggagtgcccactatctccgagcctgtgagcacagggcctggcagaggggtttgagtggcatgagctacctactggatgtgcctgactgtttccccttcttcttccccaggcttgttagagtgctgtgcaagatgtctggtaggggccccctttgcttccctggtggccactggattgtgtttctttggggtggcactgttctgtggctgtggacatgaagccctcactggcacagaaaagctaattgagacctatttctccaaaaactaccaagactatgagtatctcatcaatgtgtaagtacctgccctcccacacagacccatcttttttttccctctctccatcctggagatagagaactcttcagtaccttagtaactagcaggggactggggtggagccagaccggattcccgagtcttccctctgtgcagatctctcctgctccacattcgaagcccattcagaaaggaggggtctgcctgcctgcctgtcagcccctcccacccccgcccccttgttttcttacacgtgttctgacttctgctaggtgtggttcatattgcccaagttggagcctccagcgtagtaggtatggagaagccaagggaggcactaagcctctcctgttcctagaacaagttaggctcctgttccttcacccacctttcttcttgtctagctccctactcctgtgagttagcatgtctgaagggtggggcagggagagtaggtccctggttctccaggtcccagggtaagcaaggtgtggcgggaggggcatatgtttctggtcacatacaccctgtcttcacttatttcaacaaagataaggtgaaagcatgcaggaggaacctggtgattcctctagaaaatccctagccttgttaaggtgctcgctctggtgtatacctcacttatgtcgggaaagaagccaggtcttcaattaataagattccctggtctcgtttgtctacctgttaatgcaggatccatgccttccagtatgtcatctatggaactgcctctttcttcttcctttatggggccctcctgctggctgagggcttctacaccaccggcgcagtcaggcagatctttggcgactacaagaccaccatctgcggcaagggcctgagcgcaacggtaacagggggccagaaggggaggggttccagaggccaacatcaagctcattctttggagcgggtgtgtcattgtttgggaaaatggctaggacatcccgacaaggtgatcatcctcaggattttgtggcaataacaaggggtgggggaaaattgggcgcgagtctgtggcctcgtccccacccaaggctgggtcctctctaggggcctggcatttgagtgaggaagcgatggctgcagccgaacgagaaggtcaggaagaacgtggtgcccagctggcttagcctcacctttcaaaggttccctaagcaaatttcttctcaaaacagaaagcatgagttttgtgggatgctttgtacaatcagaccatttctaagccatctgttggtatccctttgttcccttcctagtaggtaccacaagagtggatctaactggacaagagtctaaaatgctgctcatgtgattgagacttgggcacctgatctgagagggaggatggataataaaaattaaataattaactccaaggtgaaatttacaatgttctgggatcctgcacagttcgaggtcccagagggaattggagtagatctgcatgttgaatgttttattgcctgagggttatccatgctttgagtgaggtgcacatttgttttcagtctctggagttaaagatcctttggcggctgaacatgtgtgggttccagcaatgtctttttgtggccagcagttagcttagaaaggttttgtatctgaaattttaatctcctattggctttgttcaatggctagggaacaaaaatgttcctatggcaaggaacatgttctaagctcagcctaaggcacaaaatggcacgactttctttcaagatctgttttgatttctttacaccttatctgcccaaaaacatcctctgaagcctctctaacccagggatcctcctcactcttcccctacccattccccccaccctccgttatactggggccagttatctagtagatactgccaattacccttggcagaggtgccctgctcactaatttcatttgaaggagagccctggaacctggttttaatgtctggcacacgccactccaggatctcccagtttgtgtttctacatctgcaggctgatgctgatttctaaccaccccatgtcaatcattttagtttgtgggcatcacctatgccctgaccgttgtgtggctcctggtgtttgcctgctctgctgtgcctgtgtacatttacttcaacacctggaccacctgccagtctattgccttccccagcaagacctctgccagtataggcagtctctgtgctgatgccagaatgtatggtgagttagggtacgggtgctttggctctcctacccactatggaagcactatatatttggttattttcttagtgtaaggagggtggtgattatgagaaaaatataagatgatgaatgattgggtcttagtttattaatccttccctactgaaaccagagaggtttcttccccgggaagggaacttggaagtggtgggagttttcttggccattcacattggcctactctagttgactgctgttcacaaccccaaagcagcacatttcaataacaaacacaaggtttcaccactgttcaataccaccttctcttttttgtaaacctgtagaaaagaggatcctgattgttggtagaatccaactttacagccaggataattagagatggaagaagggctctgggggaaagtctccatgtggccccgtaactccataaagcttaccctgcttgctttttgtgtcttacttaggtgttctcccatggaatgctttccctggcaaggtttgtggctccaaccttctgtccatctgcaaaacagctgaggtgagtgggttatttgggttattttacaagggagtagctaataccatacaaattacacccatggccttcaattttaaggactgaaagtttccctttgctggattttgaattagccgattgccttctacaacatgttggctaagtgtgcctgagccaatgagcatagaaggtaaaacacctgttttctctagagttgcatagaaagacttcctttccaacccttcccctcttaaaagagaagtttgtagctttaggtaaagatagagcctaatggcaaaatcccccacatgaaaattttcattcctttagttaaaaaccatatcaagaaaatgggctgtgcacagaggcattcataggttttatgaaaacattttcaatttggaacttctttatctcaaatgagaggtaaaataagtacatttgaaagg

SEQ ID NO: 12611 - DNA, 6000 bp, Homo sapiens
gaccatgggtaactgaaaccagggaaagcaaaaaccgtggataaggggagactaaagtcaacatttgctgttattttaagacaatttcaggtcaaaatgaacttgggaagcattggcaattaggccattctagtaattcccagaactgaaatgcgtgttaaaatattttgaagatatagagtgtagagattttattttattttattattttgagctggagtctcgctctgtcgcccaggctggagtgcagtggcctgatctcggcttactgcaacctccgcctcccaggttcaagcaattctcctgcctcagcctcctgagtaactgagattacaggtgcgtgccaccacgcccggctaatctttgtatttttagtagagacagggtttctccatgttggccaggatggtctcgaaatcctgacctcacgatccacccacctcagcctcccaaagtgctgggattacaggcgtgagccaccgcacgtggtcgagattttaattttgttagggatataattctcttctttctccccctgcccgttgagattgagttaatgtggtatttgtagtagcttagctctttgcagatagtgtttcattctgaccccagaaacaggtagatgggctttagttgcctagacctggggattaataactcatttggacttaaggatgtcaaaagatcctattcgaaagaaccagaagtaaataagctcacgtaaaatttgggaggtattgcagaatgagacttggaaatcaaatcctagtgttctttttactaatctcttagtttgagagtataactaaagcaaatggttattggctatcttatcagtttatctttgtgccctgttttgcctttcagagctagtataagatatgcccctcactttcaagtagcctaagaatgagctggggagacaaagctaaatgctattcccgagttacatggaaaaattggaaaacattgagctcagtctgattttgttgttgttgtttgcgtttttgtttgagggagtagagggttcataaatctcttctgacagtgtgaggaaaactttagactccctctcaaaaaagaaaaagtacacagtaaactttgcatatggaacatagtccctgaacccatatgtagatccctgtggttaagagtgcctgatttaggtcgagaatggtagctcatgcctgtaatcccagcactttgggtggccgaggcaggctgatcacttgagccagggagttcaagactagcctgggcaacatattaagactttgtctctacaaaaaaaaaaaaaaaaaaaaagccaggtgtggtggcgtgtgcctgtggtcccagctacctgggtggctagggtggaggatcgcttgagcccaggaggttgaggctccagtgagctgtgatcccaccactacactcagcctgggtgacagagagagagagaccctgtctcaaaaaaaaaagaaaagaaaaagaaaagactggctgatttaaaagtgttcccgtgttcccacaagtggtcctgattaggaggagtgataaaggaaggctcagtgtgtgttagagtagtgagaaagcttggtagagaagtaggacctgagctgaaactcagctaatggtagaatttgagtaagcggaggattttgagcaggatgtttccagcagggggaagcatagcatatgcggcagtaattggagagctgcctgattaaatcaggctgtgtgtgtagcagaaggaaaataaagttggctaaatgaagtgggcctaaattatagggggccttggaagccaaggaaagacatttagcttgatggggcaggcactggggaatcattttaggtttttaaagcaggagaatgatataacaaaagcagagacagtagcttataaagaatattctgcaggattagttgagaagtgaggaggctacaagcagagatgctggcttaagaagctgttatagtaatcaagggctgatgtaataaatgcctggactacaggggcatcagttgttagcagttattaggaggaggtgtttaatctgacatatttggatagaaaaactatggaccctgaaatgttaacacttctctctttccccttttatttaaaacaaagggaggattactttttaaattactaccttctatataataatatttgaaactatttggaatgttaaatggcttcctgaaatggactattaataattgtttttgatatagttcagtgtttcaagaatactaatttatggctgggcgcagtggctcacacctgtaatcccagcactttgggaggctgaggctggtggatcattggaggtcaggagattgagaccagcctggccaacatggtgaaaccctgtctctactaaaaatacaaaaattagccgggtggtagtggtgcgtgcctgtaatcccagctactcaggaggctaaagcaggagaatcgctttaacctgggaggcggaggttgcggtgagccaagattacgccactgcactctagcctgggcaacagagggagacccttccttacccacccccaacaacaacaaaaaaaactaatttaggccaggtgcagtgactcaacgcctgtaatcccaacactttggaaggccaggcagatcgcttgagctcaggagtgtgagactagcctgggcaacatagcgacattctgtctcaaaaaataaaaataaaaaactactaatttatttttaggcatctgataactgaagtaacattgaagctgcttttttcttttttaaatttttttcgtgattaaaatatagaaatgtactggccaggtgtggtggctcgtgcctgtaatcccagcattttgggaggccaaggcaggcagatcacctgaggtcagaagttcgagaccaacatggtgaaaccccatctctactaaaaatacgaaaattagctgggcgtggtggcgtgcacctgtaattccagctacttgggaggttgaggcatgagaatcgtttgaacctaggaggtggaggttgcagtgagctcatatcatgccactgcactccaacctgggcaacagagcaagactccatctcaaaaaaaaattatatatatataagttacgtatataataagggttttttaaaaggctctacatatacatatatatatataaagattatatatctataaagattatatatgtatacagagaataatatagcagacccatatgtacccattatccagaattaataaatgctgtttttttaatgtttgtgttacttttttgattaaaaagataaaacgttgacaatacagttgatatttcctttgtcttcattccccagacccattttccttcttgcctgctaagaggcaaacactttcacaaatttggggtataaccttcctgtctttatgtttgtcttttactatataagtacgtgttcataaacaatacatagtttaaaaaaagctattcatagtataactccaatatgcctgcaagttgtttttttgctgatttgcttttgaagtccatctatatacagccagtcacgtatctattcatttttgttaacggtgagaagcaattctgggaaaaatgttctagttcattggttttttgttttgttttgttttttaattcctatggccattagggggtgccaaggcagcattatatggctgcttgctacatgatggagaggcacagaaggcagcctatattaaggaccttggatactttcctttcttgctacttctccaaaagaagccaaaccacttgggtgatcatcgtcttttgaagtttcactatacacaggctaataaaaactatatgaaatggctgtaacttactgctttcatactctgaagattccctgaaatggaatcatctttaaatgtaatccaggaagcggttctataagctcattggagttaatataacttacttgggactagtaaaacaaaaataaggatttactatacaaatgtatgattaatccatctctcttgcttctttagttatagtcactaagtcctgatgattctaccatagataagtgttttcagtttggcttctttgctctctttctactgccccacaccatcttagtttaggcaaccctcccttacccttcaccttaaccagaccatcaccctctggtttccctcttaagtggcttccctgaaaagtttttccccctgcttatcccctacaaatttgctatcttccttaaaataaattatatatgtgttattttctgctttaaaaactgaggctagccctcgactgctaaaaagaaaagcccaaacaggccttagatcatagaagatgcttcaaagtatgatcacctgcaacttgtctttccttcttaacccccatttcttttccttttttctttctttttctttttttcttgagacagagttttgctcttgtcatccaggctgtagtgcagtgggcgatcttggctcactgcaacctccgcctcccgggttcaagcaattctcctgccttagcctcccaagtaactgggattacaggcacctgccaccatgcccagctaattattatctttttagtagagacgaggtttcaccatgttggtcaggctggtctcaaactcctgacctcaggtgatccacccacctcggcctcccaaagtgctgggattacaggcatgggccactgtgcccagcccctaacccccatttcttcttcccccttactccttatgttttagccacagtgaactagtcatgcccttaagcatgctatatcctttgtcactttgtgcctggggtagggcaggcagagagaagaagaaagcctatacaaatatatttatattatcacttttctcctaccttcttggaaatagccattgttaatcttgttttataggaattcttactgttgatgaacttttggccatcagaattccattgaatgacctttttagatgcaatagtttatcaactttggaaaagaatgatgttgtccaacactactgggatgttcttgtacaagcttttgtccaaaatggcacagtgagcacaaatggtgagtaaagtatatatttctctacttggatcctaatttaagagtagagtataccaggtagctttcattgaagtcattatctgaaagcatttatatattaaggtttattcatagcttctactaggctataaagtttttgtaaataatagcaattcttatttttgtgtatcttacaatttaaagtttttgatgtacatgttgtggaatggtattttaaaagacactacctatactgttctcagctgataaaacctaatcattgtttgaacagatcctcagatagcttgattatcagcttttttagcggttccaagaccaaagcttagaaatcagattcatattctaatcttgaatttttaaagttgattttataatttttatatagctttatggaaaggtaataatttctcattcaccagttctggaaaactatgaacacttcccaagaagaggttgaaatgcctatgatttgccatagggctaatgcaaataaatggttcatttgtatttaagtcctttgatgatttctaagcttttttctagtaaacagtatccttccttatggtgattgtatgtgggaataaagaaccaaaaaatttaagacttaactctctgaatttcgtatcagaggcaggcaaagttctttgggaataaaaagatttaagggtctgaaaaagacgagtatgtggccatgtgggagcagataaagcatagggatgtgtcctgagtttgctgtgtcataactcatgtagatattctgtatatgaagcagcagtttaagaacctctgcctaatttagtttcaaatatactaacaagatattctcttcccctaatataacccttttggacttctattatgagaattttttttggttttccctggccttatgaattaagaaaatgtccgctttggtttcttttgtcccttttcgcttgttttagagttcct

SEQ ID NO: 12612 - DNA, 6000 bp, Homo sapiens
agggtggggacattagccaagctgcattataggaggacaaaactgccatacaaagtgtccaaaatcattaagcctgcatttttattattgggagtaatatcaaacctcctattttccaattttcatttcttgtcctgtgctagctccatcctgtttggactgctcctcccatatgtaaactaagaagaatcaagcattctttgcaacaaatacacacgatgctcaaaaatgtccaggagcatccaatttccaaagtttcctccacctggaatgctcttcatgctaaaatcctgtctgacaataccagcatctctggcctgcactcatcccttcctggaactccaagtgcatttaccctctgttaccacttacttggctgcctgaattgttagttgaaaatattaggtctacttagctaattcttcctcaggaaattaaagactcccatatggcagagtctgtgtcttttctctcttcatatcccgtataacacccagcataatgctgggcatatagtgagtattccataaatagttgatgaatgactaaaataagcaagcaaacaaacagactagaacaataagaaagaagggactgatttcataatctctctggcttgctatttgaattgctgaattattattatttattaaatattttttaaattctggcaataaaaggtaaggatttattttctttctttctttttttttttcttgagacagagtctcgctcttactgcccaggctggagtacaatggcgcaatcttggctcacggcaacctccgcctcctcctgggtttaacagattctcctgtctcagcctcctgagtagctgggattacaggcatacgcccatgcccggctaatttttgtatttttagtagagacggggttttgccatgttggccaggctggtcttgaactcctgacctcatgtgatccacctgcctcagcctcccaaagtgctgggattacaggcatgagccaccgtgcccggccaaagatttattttcaagaatgaaacaaagtaaggattctgggtcaatctcacatgctgaaagccaaaacctctagccgctcctgctttttgacttcggagtgcccactatctccgagcctgtgagcacagggcctggcagaggggtttgagtggcatgagctacctactggatgtgcctgactgtttccccttcttcttccccaggcttgttagagtgctgtgcaagatgtctggtaggggccccctttgcttccctggtggccactggattgtgtttctttggggtggcactgttctgtggctgtggacatgaagccctcactggcacagaaaagctaattgagacctatttctccaaaaactaccaagactatgagtatctcatcaatgtgtaagtacctgccctcccacacagacccatcttttttttccctctctccatcctggagatagagaactcttcagtaccttagtaactagcaggggactggggtggagccagaccggattcccgagtcttccctctgtgcagatctctcctgctccacattcgaagcccattcagaaaggaggggtctgcctgcctgcctgtcagcccctcccacccccgcccccttgttttcttacacgtgttctgacttctgctaggtgtggttcatattgcccaagttggagcctccagcgtagtaggtatggagaagccaagggaggcactaagcctctcctgttcctagaacaagttaggctcctgttccttcacccacctttcttcttgtctagctccctactcctgtgagttagcatgtctgaagggtggggcagggagagtaggtccctggttctccaggtcccagggtaagcaaggtgtggcgggaggggcatatgtttctggtcacatacaccctgtcttcacttatttcaacaaagataaggtgaaagcatgcaggaggaacctggtgattcctctagaaaatccctagccttgttaaggtgctcgctctggtgtatacctcacttatgtcgggaaagaagccaggtcttcaattaataagattccctggtctcgtttgtctacctgttaatgcaggatccatgccttccagtatgtcatctatggaactgcctctttcttcttcctttatggggccctcctgctggctgagggcttctacaccaccggcgcagtcaggcagatctttggcgactacaagaccaccatctgcggcaagggcctgagcgcaacggtaacagggggccagaaggggaggggttccagaggccaacatcaagctcattctttggagcgggtgtgtcattgtttgggaaaatggctaggacatcccgacaaggtgatcatcctcaggattttgtggcaataacaaggggtgggggaaaattgggcgcgagtctgtggcctcgtccccacccaaggctgggtcctctctaggggcctggcatttgagtgaggaagcgatggctgcagccgaacgagaaggtcaggaagaacgtggtgcccagctggcttagcctcacctttcaaaggttccctaagcaaatttcttctcaaaacagaaagcatgagttttgtgggatgctttgtacaatcagaccatttctaagccatctgttggtatccctttgttcccttcctagtaggtaccacaagagtggatctaactggacaagagtctaaaatgctgctcatgtgattgagacttgggcacctgatctgagagggaggatggataataaaaattaaataattaactccaaggtgaaatttacaatgttctgggatcctgcacagttcgaggtcccagagggaattggagtagatctgcatgttgaatgttttattgcctgagggttatccatgctttgagtgaggtgcacatttgttttcagtctctggagttaaagatcctttggcggctgaacatgtgtgggttccagcaatgtctttttgtggccagcagttagcttagaaaggttttgtatctgaaattttaatctcctattggctttgttcaatggctagggaacaaaaatgttcctatggcaaggaacatgttctaagctcagcctaaggcacaaaatggcacgactttctttcaagatctgttttgatttctttacaccttatctgcccaaaaacatcctctgaagcctctctaacccagggatcctcctcactcttcccctacccattccccccaccctccgttatactggggccagttatctagtagatactgccaattacccttggcagaggtgccctgctcactaatttcatttgaaggagagccctggaacctggttttaatgtctggcacacgccactccaggatctcccagtttgtgtttctacatctgcaggctgatgctgatttctaaccaccccatgtcaatcattttagtttgtgggcatcacctatgccctgaccgttgtgtggctcctggtgtttgcctgctctgctgtgcctgtgtacatttacttcaacacctggaccacctgccagtctattgccttccccagcaagacctctgccagtataggcagtctctgtgctgatgccagaatgtatggtgagttagggtacgggtgctttggctctcctacccactatggaagcactatatatttggttattttcttagtgtaaggagggtggtgattatgagaaaaatataagatgatgaatgattgggtcttagtttattaatccttccctactgaaaccagagaggtttcttccccgggaagggaacttggaagtggtgggagttttcttggccattcacattggcctactctagttgactgctgttcacaaccccaaagcagcacatttcaataacaaacacaaggtttcaccactgttcaataccaccttctcttttttgtaaacctgtagaaaagaggatcctgattgttggtagaatccaactttacagccaggataattagagatggaagaagggctctgggggaaagtctccatgtggccccgtaactccataaagcttaccctgcttgctttttgtgtcttacttaggtgttctcccatggaatgctttccctggcaaggtttgtggctccaaccttctgtccatctgcaaaacagctgaggtgagtgggttatttgggttattttacaagggagtagctaataccatacaaattacacccatggccttcaattttaaggactgaaagtttccctttgctggattttgaattagccgattgccttctacaacatgttggctaagtgtgcctgagccaatgagcatagaaggtaaaacacctgttttctctagagttgcatagaaagacttcctttccaacccttcccctcttaaaagagaagtttgtagctttaggtaaagatagagcctaatggcaaaatcccccacatgaaaattttcattcctttagttaaaaaccatatcaagaaaatgggctgtgcacagaggcattcataggttttatgaaaacattttcaatttggaacttctttatctcaaatgagaggtaaaataagtacatttgaaagggaaagcactgtattgagaacagatattatatacaaatgaggcaggggaataaaagtaaatccgggggagacaggcagtaaattatttctttgacagcaaaatgttgactttaaattttgggcccctgggcacaactgtagggaaccagttaattattttggagtactgtactatttcatgactattctgtgatctgggtgttaatgggccaggtgctatggtgtacactgaagactgggaggcccacatttagggaagtgaaaacttagttagagatgtggaattagcacacaagaaagatatcaacacattcagaaagctgtattcatgatttacagtggagcatattactgctgttgcaagaaacagttcttcctctttcattttcctgcagttccaaatgaccttccacctgtttattgctgcatttgtgggggctgcagctacactggtttccctggtgagttgactttgaatgatcttggcaagtaaataggcctgagatagtgtgggtacagctattctgaaaggcaagaaggtagactgcttccatccttgaaatgctggagggaagcttctgggaagatagcaaagggtggaggctccgtacttctacttgcattggcaaggcagaaagacatcacaaattagatgggaacaagaaaagtggtatgaggaaagaggtaagagattcatagacacgaatgataatatttagtatttatagaacatgtaatgttgccaagtactttgcagtcataaattacggttaattctcaatacattttgatcagatcagtgacaaaacactgaaacatcacgaaacatgacttgctatagcctggaattctatatactatcaatatgaatccactttggatactctccagtggatttagttactcatatggaaatactgggaggacctcctaacattattagaattgttatgattataatacaatgctatgtcccaggtcttgctgatagtgctacagtgccctgtgaatgtagtgtgctcattgtgcagattaaaaacctaaggcactgaagggtgaagtgatttatctgaagttattttataagcagtgatcagacaagatgagctcacagaactcctggcccctactgctgaggtttccatacagagtcaagtaatttctcaccttgtaaaacgaattgattcattaaccaggggagagctctactgcatgatgtggctgtgtgtctacagcaagcaccctatgactctaagtcactcggacatattgatgtggcaaagccaaatattgttcacttccctgaggaaaactcagtgctagatcaaacagaggtgtggaataaatctttatgatttgattctctgggcctgggccatgagacccatgatgcctcagagacatcggacttccagtcaagtgtatatggagaaagcc

SEQ ID NO: 12613 - DNA, 6000 bp, Homo sapiens
gaaggccaagaaagggctgtcatttcaggggatggtgggtaataggactcactccttttgtgtctctgagaacagaggcaaatgcctctacctcgattttcccatgacagagataatttgatctttccaaatctgttcacactgatgcaattcagccatgtaaatcactaggtattcatgctctctgggctaaaaacaaactgtaactaatgttaacagaatcaggaaaaggagtcccctttccctggtaccctatagaaaagtgagtgtggcttggagaaatgcttgaatacaaaaatccaagcctaagtaattaatacaatttatttttattgtacaagctgtcacaacctgcttattcaaaaatagcagcttcccagtacatttgctgagtatttgtgtgtgtgcatgtgtatactgtgtttatagatatataaaatcagtgggtatatatacatatatttatatatatacatacatatgaattaagacattttttctgaagagcttaacattctcatttcttctacattttagggatctggccgagaggccagaggaagccattcttttcctcatctagtcagtcatctacttggcatttgctaaggttcactccatatgacatcttagagcatgggactagtacttggaacacagctgctttcagagcctgtgacttcttgtgtgcctctcctgtttctcagcaacactggcatagggcctgggataccaggtctggggatctcagggactcttagcactttaagacacatgtgttcccaggccctggtgtgttcctctagtgccagaaagatgtttcatgctttgctgactttgtataaagtctgtttgtagctgttttgacagaatctcagcgtataactgagggtggggacattagccaagctgcattataggaggacaaaactgccatacaaagtgtccaaaatcattaagcctgcatttttattattgggagtaatatcaaacctcctattttccaattttcatttcttgtcctgtgctagctccatcctgtttggactgctcctcccatatgtaaactaagaagaatcaagcattctttgcaacaaatacacacgatgctcaaaaatgtccaggagcatccaatttccaaagtttcctccacctggaatgctcttcatgctaaaatcctgtctgacaataccagcatctctggcctgcactcatcccttcctggaactccaagtgcatttaccctctgttaccacttacttggctgcctgaattgttagttgaaaatattaggtctacttagctaattcttcctcaggaaattaaagactcccatatggcagagtctgtgtcttttctctcttcatatcccgtataacacccagcataatgctgggcatatagtgagtattccataaatagttgatgaatgactaaaataagcaagcaaacaaacagactagaacaataagaaagaagggactgatttcataatctctctggcttgctatttgaattgctgaattattattatttattaaatattttttaaattctggcaataaaaggtaaggatttattttctttctttctttttttttttcttgagacagagtctcgctcttactgcccaggctggagtacaatggcgcaatcttggctcacggcaacctccgcctcctcctgggtttaacagattctcctgtctcagcctcctgagtagctgggattacaggcatacgcccatgcccggctaatttttgtatttttagtagagacggggttttgccatgttggccaggctggtcttgaactcctgacctcatgtgatccacctgcctcagcctcccaaagtgctgggattacaggcatgagccaccgtgcccggccaaagatttattttcaagaatgaaacaaagtaaggattctgggtcaatctcacatgctgaaagccaaaacctctagccgctcctgctttttgacttcggagtgcccactatctccgagcctgtgagcacagggcctggcagaggggtttgagtggcatgagctacctactggatgtgcctgactgtttccccttcttcttccccaggcttgttagagtgctgtgcaagatgtctggtaggggccccctttgcttccctggtggccactggattgtgtttctttggggtggcactgttctgtggctgtggacatgaagccctcactggcacagaaaagctaattgagacctatttctccaaaaactaccaagactatgagtatctcatcaatgtgtaagtacctgccctcccacacagacccatcttttttttccctctctccatcctggagatagagaactcttcagtaccttagtaactagcaggggactggggtggagccagaccggattcccgagtcttccctctgtgcagatctctcctgctccacattcgaagcccattcagaaaggaggggtctgcctgcctgcctgtcagcccctcccacccccgcccccttgttttcttacacgtgttctgacttctgctaggtgtggttcatattgcccaagttggagcctccagcgtagtaggtatggagaagccaagggaggcactaagcctctcctgttcctagaacaagttaggctcctgttccttcacccacctttcttcttgtctagctccctactcctgtgagttagcatgtctgaagggtggggcagggagagtaggtccctggttctccaggtcccagggtaagcaaggtgtggcgggaggggcatatgtttctggtcacatacaccctgtcttcacttatttcaacaaagataaggtgaaagcatgcaggaggaacctggtgattcctctagaaaatccctagccttgttaaggtgctcgctctggtgtatacctcacttatgtcgggaaagaagccaggtcttcaattaataagattccctggtctcgtttgtctacctgttaatgcaggatccatgccttccagtatgtcatctatggaactgcctctttcttcttcctttatggggccctcctgctggctgagggcttctacaccaccggcgcagtcaggcagatctttggcgactacaagaccaccatctgcggcaagggcctgagcgcaacggtaacagggggccagaaggggaggggttccagaggccaacatcaagctcattctttggagcgggtgtgtcattgtttgggaaaatggctaggacatcccgacaaggtgatcatcctcaggattttgtggcaataacaaggggtgggggaaaattgggcgcgagtctgtggcctcgtccccacccaaggctgggtcctctctaggggcctggcatttgagtgaggaagcgatggctgcagccgaacgagaaggtcaggaagaacgtggtgcccagctggcttagcctcacctttcaaaggttccctaagcaaatttcttctcaaaacagaaagcatgagttttgtgggatgctttgtacaatcagaccatttctaagccatctgttggtatccctttgttcccttcctagtaggtaccacaagagtggatctaactggacaagagtctaaaatgctgctcatgtgattgagacttgggcacctgatctgagagggaggatggataataaaaattaaataattaactccaaggtgaaatttacaatgttctgggatcctgcacagttcgaggtcccagagggaattggagtagatctgcatgttgaatgttttattgcctgagggttatccatgctttgagtgaggtgcacatttgttttcagtctctggagttaaagatcctttggcggctgaacatgtgtgggttccagcaatgtctttttgtggccagcagttagcttagaaaggttttgtatctgaaattttaatctcctattggctttgttcaatggctagggaacaaaaatgttcctatggcaaggaacatgttctaagctcagcctaaggcacaaaatggcacgactttctttcaagatctgttttgatttctttacaccttatctgcccaaaaacatcctctgaagcctctctaacccagggatcctcctcactcttcccctacccattccccccaccctccgttatactggggccagttatctagtagatactgccaattacccttggcagaggtgccctgctcactaatttcatttgaaggagagccctggaacctggttttaatgtctggcacacgccactccaggatctcccagtttgtgtttctacatctgcaggctgatgctgatttctaaccaccccatgtcaatcattttagtttgtgggcatcacctatgccctgaccgttgtgtggctcctggtgtttgcctgctctgctgtgcctgtgtacatttacttcaacacctggaccacctgccagtctattgccttccccagcaagacctctgccagtataggcagtctctgtgctgatgccagaatgtatggtgagttagggtacgggtgctttggctctcctacccactatggaagcactatatatttggttattttcttagtgtaaggagggtggtgattatgagaaaaatataagatgatgaatgattgggtcttagtttattaatccttccctactgaaaccagagaggtttcttccccgggaagggaacttggaagtggtgggagttttcttggccattcacattggcctactctagttgactgctgttcacaaccccaaagcagcacatttcaataacaaacacaaggtttcaccactgttcaataccaccttctcttttttgtaaacctgtagaaaagaggatcctgattgttggtagaatccaactttacagccaggataattagagatggaagaagggctctgggggaaagtctccatgtggccccgtaactccataaagcttaccctgcttgctttttgtgtcttacttaggtgttctcccatggaatgctttccctggcaaggtttgtggctccaaccttctgtccatctgcaaaacagctgaggtgagtgggttatttgggttattttacaagggagtagctaataccatacaaattacacccatggccttcaattttaaggactgaaagtttccctttgctggattttgaattagccgattgccttctacaacatgttggctaagtgtgcctgagccaatgagcatagaaggtaaaacacctgttttctctagagttgcatagaaagacttcctttccaacccttcccctcttaaaagagaagtttgtagctttaggtaaagatagagcctaatggcaaaatcccccacatgaaaattttcattcctttagttaaaaaccatatcaagaaaatgggctgtgcacagaggcattcataggttttatgaaaacattttcaatttggaacttctttatctcaaatgagaggtaaaataagtacatttgaaagggaaagcactgtattgagaacagatattatatacaaatgaggcaggggaataaaagtaaatccgggggagacaggcagtaaattatttctttgacagcaaaatgttgactttaaattttgggcccctgggcacaactgtagggaaccagttaattattttggagtactgtactatttcatgactattctgtgatctgggtgttaatgggccaggtgctatggtgtacactgaagactgggaggcccacatttagggaagtgaaaacttagttagagatgtggaattagcacacaagaaagatatcaacacattcagaaagctgtattcatgatttacagtggagcatattactgctgttgcaagaaacagttcttcctctttcattttcctgcagttccaaatgaccttccacctgtttattgctgcatttgtgggggctgcagctacactggtttccctggtgagttgactttgaatgatcttggcaagtaaataggcctgagatagtgtgggtacagctattctgaaaggcaagaaggtagactgct

SEQ ID NO: 12614 - DNA, 6000 bp, Homo sapiens
acagatgccttcctcttatctcaactgcaaagaggcattccttcctcttttactaatcctcctcagcacagaccctttacgggtgtcgggctgggggacagtcaggtctttcccttcccacgaggccatatttcagactatcacatggggagaaaccttggacaatacctggctttcctaggcagaggtccctgcggccttccgcagtgttttgtgtctctgggtacttgagattagggagtggtgatgactcttaaagagcatgctgccttcaagcatctgtttaacaaagcacatcctgcacagcccttaatcatttaaccctgagttgacacagcacatgtttcagggagcacagggttgggggtagggtgacagattaacagcatctcaaggcagaagaatttttcttagtacagaacaaaatggagtctcttatgtctagttctttctacacagacacagtaacaatctgatctctctttcttttccccacacagagtgaagaaaaatcaaagagggagcaattaagtgagtcaaacgctgccaataggtcaaataaaatgagaaacgggaactgaccactagcttagcaaattgtaaaaaatgggtgaagggagatctttcagacagaaggggtagcataattgtgagagaatgcacagtgatttccggcaactgcaaataattgaaaacagctaaagcataagaatatagcagggactggaaaggaaagcaacagatggatactcgcagcctggatcacaatgtcacactagacattttggatttaccctaaaggctatgagaatccacaggaaaattttatgttagggagtaaccgagccagatttggatttaaaagatcaattaggcagtggtatgaaaaataaggaacaaatctgaaggcaaagagactagtttagaggctgttaacaattgtctgtggagaaactcagccagtgaccatggggatcaagatgggaaggtgactcagataaatatttaggaaatagaatctataggacttaatgacaattttgacatgtaggaaggcagtgttaaagagacgaaggtgtcacaaatgactcaggttctggtttgggtaagtgggtagggagcggtgccattcacccaggaacccttgagaaagagcaagattgccagaaaaaaaaaaaatcacacactcacaaagcgcagaaagcagcctagtatcttagacttagtgcattctcatttagtcctgttaggaaggtggaaaaacaggcttagagagattaggtaacttacccaaggttacacagccagaaagtgagagtccagatgagaacccagttcccaactccaagcctactgttcattccacttctccaaaactgctgtgagaaaaactttgggacaaggagaaagagtatttttttaaatgaatagagaaggccaacaggtggagaaaagaggtggttgtcggctttttagggcaggtttcctaaatatatttttttctctgaatctgcctggatggaagatacagaaaatacaaatgtttactagcaacacatttggttttattaaattgaatggtttgtaatgtaaagtagggaagacaccaaggtggtgctttttcagaacctctcaatgtcttgttggcttgtcttcatcatcttaaggttatccacaataactaactactgatgggcccaggggtagtactgaatggtccatgctctggtggtattcacagtctagtgaggaagataaacacagcattacaatacaaggtgttcagaacatctagcaacatcgtttctttaaaaataaactttttattttggaataatttcagattcacagaaaagtagcaaagggtacagagaactgtcttatactccttatccagtttcagtttctcttaatgccatcatcttacatcacagtagcatatttatcaaaaattaagaaaccaacattggtaccttactttgaacaaaatcccagactttatttggatttcaccattttttttaaaaagttcttttcctgttttgcagtccagtccagggttctctgctgcatattggttgtccttagctccttagtctcttctgatctgtggcagtatcttggtcttttctagtttttcagaaagtatcaatttgaaaaaaatattttatatggtatatacatataatattactatatatagcagattgaaccaccttgattacctttgctcaggtatattaaaggaataggtttatttggtgaaaatcagacataaaacacctgaggcaatgcatcacagattattgtgtaaggattgcaggaaatgccacattaacacactgtgttattgtaatttctgcataggacattgaactacacaataccaaggagaaataaacattgaacatatctgtgttagcccattcgcattgctagaaaggaatgcctggagtatgggcaatttataaagaaaaaaggtttattggctcacggttctgcaggctgtacaagcatggcatccacatctgtttggcttctggtgagagcctcaggaagcttactttcatgcgcgtctgtgtgaagagaccaccaaacaggctttgtgtgagcaataaagctgtttatttcacctgggtgcaggtgggctgagtccgaaaagagagtcagcgaagggagatggattatcattagttcttacaggttttgggttaggcggtgaagttaagagcaatgttttgcgggcagggtggatctgacaaagtacattctcaagggtgggaagaattacaaagaaccttcttaagggtgggggagattacaaagcaccttcttaagggtgggggagattacgaggtacattgatcagttagggtggggcaggaacaaatcacaatggtggaatgtcatcagttaaggctgtttttacttcttttgtggatcttcagttactttaggccatctggatgtatacgtgcaagtcacaggggatgcgatggcttggcttgggctcagaggcctgacacttacaatcatggttgaaggtgaagggggagcagatgcatcacctagtgagagaagcagcaagacagacagtggaggttccgctcttcttaacaaccagctatggtgtgaactaccaagggagaatccattcattaccatagggagggcaccaagccattcatgagggatacgcccccatgacccaaacaccacccaccaggctcacttccaacactggggattatatttcaacccaagaattggaggggacaagcccccaaactatattaatatcatgcattataatgtaatgccaacaaatcattactatgggtaattgcctatgtttctgagctttatcgctaccctgtatgatgtagtgatttgtcaattgaacataataccaatgaaaatatcaacacagacgtttttttcattagacaagctcattttaagtttatataagaaacaaataagcataaatgaccaggaaatcctgaaaaagaagaacgttttaatgtctgtagttttacagacatttaaactgtaaaacgacagacattaaaacgttttaaagtgtgttttcacttatacgtaggtgctaaatgatgagaacacatggacacatgacagggggaacaacacacactggggtgtgttggagggtgggaggtgggaggagggagaggatcaggaagaatagctagttgatgttgggcttcatacctgggtgatgggatgatctgtgcagcagaccaccgtgtttacctatgtaacacatgtttacctatgtaacaaacctgcacatcctgcacatgtgcccctgaacttaaaataaaagttggaaataaaaaaaatttaaaaataaggccgggcatggtggctcaagcctgtaatcccagcactttgggaggccgaggcggacggatcactaggtcaggaaatggagaccatcctggctaacacggtgaaaccccgtctctactaaaaacacaaaaaattagccaggcgaggtggcgggcacctgtagtcccaactactccggaagctgaggcaggagaatggcgtgaacccgggaggcagagcttgcagtgagccgaaatcacaccactgcactccagcctgggcgacagagcgagactccgcctcaaaaaaaaaaaaaaaaaaacttaaaaaaaaaattaaaaaataaatgacaagcacctgaccaagaacgtcattctattattgctcttgtgttaataataattattattacattactgtgttattcattaacctaatacactacattgagaataaaggggagaaaacaaaggatgaaaaacattttaaagctttgataattaaaagcaaagggtagtgtcacataactagaaatacagaccaattaacagaatagaatatccataagtaaaaacaaataaatattgaagtttgggatatgatgaagatgtcatcttaaattggttggagaaaaggtgaacaattcagcaaactgttgtgacaactaggtagccatctgaaaaaaataaagtagattcatgcttcacactgtacatcaggataaaccagagaggaatcaattatttaaatgtaaaaaataataataaagagcattcaaaggaaacatgaaagaattcctttctaacctgagtttcagggaaagccttcctaaccacgattcaagattcaaatgccataaaagatgctctagaattagataaaagaccagcagcccagtagaaaaatgggcaagcctcatgaacagacaaaaggtagaaaaggaaaatataaatggcccccaaagacgctcatcctcataataagaaaaatgcagagagcagcccaagatggccgacattgaggactgagtgttggatgagaagaaggtgtgtatagctgctaaattcatcactcatgctcccccatgggaatttaatgagtattcaatgatgtttaatacttaataatgacactctcctcagcgaaggggcagcacatgcatttgcccagcataacatggatcagttcacgtctgtgaagacagagaaggatatgaagatcaggtcttaattgcagagcactctaacctaggtaatagcagatttctagatccaagaaacaaaatttcctttaaatttgatcacgtatggaaaaaagcaagtgacccccagccacaggaagtagatggaggtctgaagtcttggagagaatcctgtgaccctgctttaaaagcctatgtgaaagatcattattccagcggcttctgtactgtttatgttaaaactatagatgggcaacagactattcctgcatgcattgaaagccaccagtttcatccttaaaaattctgaagtggtcattggagtggaaggtcatcatcatacctcctacagcccaggtggctggagtgcttaagattcactattatgaatatggcaatgttcagtcggttagtcataaagatgtacaggattcactaactgtttcgaatgaagtccaaactgccaaggagtttattaaaatcatagggaatgcagaaaatgaccatcagacagcaaccagtgaaaactatcaaacaatgtcagataccacattccaggccttgcgccggcagcttccagttacccgcaggaaaatcgactggaacaagatactcatctaccagattggcaaagaaatgcagaatgcttaaaggctgaatgtagaattcttcagtatgaggaaagacaaggattcaacatgtggtcatacgataaataagtgatttataaacaagagtgatattttgctagggctttcaaatttaacaggttttctagcttcatagaatactgtagaatctatagcatggtcttgattcttttaagctctctgccttgtaattttctattatcactagatctacatgtaaatcttttttggttgtcgttaattctgctacacttaatgttggagaggagatctattttagagtcattttacttttca

SEQ ID NO: 12615 - DNA, 6000 bp, Homo sapiens
ccactctctccaagtgtacttgtacccacttttgattcaatggacctggaggtacacagacatactctgaaccccctcataatgggtcacaaacatataaaagctcccgcatgatattttttttgagacagagtcgcccgcccccccaacaccacccagctaatttttgtatttttgtatttttagtagaggcagggtttcaccatgttggccaggctggtctcgaactggctggacttcgagatccacccgcctcgtcctcccaaagagttgagattacaggcatgagccactgcacctggcctcgcatgatctttacaatcgatcaactcctccattcacgtctagtgcagggaaacagcaatcccagaattgtccatgtcaatctgtcatgattttaccctcataaaggcaaaatcaaaaatgattaacacggcttttctttcagcaggataatggcagtacttccacaaaatgaagcactgtaattgcaacctgctttcaaaaacatttttaacgctggaagatagctaaaacaatgaaaatcattccattgggtcaattatctgggtcaagggtatataatcttacgtacaaaataccttcccaattctaggagaccacagagtttaatagcaggttatttattgaactaggcgttgagttttacatacatttttctttttttgagacagggtcacactgttgcccaggctacaatgcagcggccggatcacagctcactgcagcctgtgaattcctgggctcaagtgatcctcccacttcagcctgctaaatagttaggactacaagcacgtgccaccaagtccagctaatttatatttttggtagagatggacgggggtggtctccctatgttgcccaggctggtctcaaattcctggcctcaagcaatcctcctgcgttggcctctcccaaagtgctgggattataagtatgaagcactgtgcctggtttatatatacttctttcactcttcacaagcaggtcccaccatcaggcaggacacagagaaacccacgttcaagtagatgtatcaaataataaaggacagtgtctagtatccagtaaacaaatggtaagcaattaactagcccataacattacaatgggtggcaattttcacatctaactagctaaatgaaccaaggaaataggccctcaactttagccctaagaagccacccctttaagtcttcttagcaaaccaatcccactagctttgccatacaagtcgaatcaagttctggctgggcgcggtggctcatgcctgtaatcccagcatgttgggaggcagaggcgcgtgaatcacgaggtcaggagttcaagaccagcctggccaagatggtgaaaccccgtctctactaaaaatacaaaaattagccaggtgtggtggcaggcacctgtaatcccagctacttgggaggctgagcaagagaatcgcttgaacttgggaggcagaggttgcggtaagccaagatcacaccattgcactccagcctgggcaatgagagcaaaactccatctcaaaaaaaaaaaaaagagaaagtgctttgactagcctgggcaacatggcgaaaccccatctctacaacaggtacacaaattagccaggcatggtggtgaacgcctgtagtcccagctactcaggaggaggctgaggtgggagggttacaccactgcactcagcctgggtgagagagcgactgctgaaccttgggcaactcttgctgattcttgatgctcccttcaaaacctgtctcaaggcccatcaggaccaaagagcgatgggctgaaaaagccatgcaggagactgtttcaggcctagctttccctggagttagtctagatgaccttggaggtccttcatagcaattctagtaatgtttttcctttgagatcaactacttctgcagtagaggacagttttccaatcttttctagtctctttttagaaaagagaaacatctaaaagactgggctaggtgtgatggctcacgcctgtaatctctgcactttggtagggtgagacaggaggattgcttgagctcaggagttcaagaccagcttgggcaacacagagagaccccatctctacaaaaaatttaaaaattagccaggtgtggtggcgtgtgcctgtagtcccagctactcagagagatgaggtgggagggtcacttgagtctggtaggtagggagaggttgcagggagatagtgtcaacgcagcatgtaaaacagaacaagatcctgtctcaaaaaacaaaaacaaaggccgggcacaatggcttatgcctgtaatcccagcactttgggaagccgagaggggcagatcacttgagctcaggagtttgagaccagcctggccaatatagtgaaataccatctctactaaaaatataaaacttagctgggcgtggtgacgcacgcctgtagtcccagctactctgaaggcggaggcaaaagaatcacttgaacctgggaggcagaggttgcagtgagccgagattgtgccactgcactccagcccgggtaacagagcgagactccgtctcaaaacaaaaacaaaaacaaaaacaaaaacaaaaagcctaaaaatactgactgggtcttccccaccaggatgtgtataagacagccttccaccttatgacctagctcagactgaagatgaccaggaaattaataagtattggagaattatctgcccataagcccagatgtgggctggatgcagtgcagaaacaaaggaagtacgtttttaaaaacgaatttgagaatgctgtcaaagggtggattggattgcatgcaattttaatcatgtatttatactcaaaaagtaaccctggccagacacagtggctcttacatttagcaaaatacaagcagtatgatggaggtcttacctgattttatttccagttttcatccgaatccactggggaatgggacgattttgcttttgtttcttggccaggaatcgcttaatcctgaaagtcttgtgagaagactgggaagaaaatgcaatcaatttagacaatattagagcctgcccgaatgattcaaagtcaagaactccttcaaaccaacatttgagtgcttaacacataccccagccccaaaatcttctcaatgctaagccatcaagccaagcaagtctctgaccctcacaacttctctgggggcagataccacagtttccatcgttcagataaaataagtggaatccggttaagaaacatgcacaaaatcagagcatcaatgtgcagaaccaggattcaaacccaggtcctttctgctccacagccagaggctacctttcaatttaccctgtggtcccccaaggactcagacgaccacactgggaatggctagggaatctggcttcctgggaagaacacagctttgagtcaaacagaaccacctacctaccatttgcaagtcaacgaatctcagtgctctactttgtaaaacaggggtacgtacttttcaagtgttattgggagggtaattaagacttagggaaagtccctgacattcagaagatctaacctactcaccatttcggtattaatcctaactctatctctactgctaaatttcactggctaaaaaaataaacttttaaatttaaaaataaatgaaatgtcacttttccaaggatgactgtctcaatttctagttgcatcttttggctttcatctaaggccaaccccaatactcccccaaatctacagaataatcttgcaaaattggcacggatgcaggtttaatgcctggccaacctggacgaacatacccttgcataataatgggagccaatacaaagaaggcaaagattacaccccgtcccccatccacagtagcagttgtaaattttgtcaagtaataaattacttgacaagtaataaaataccagtacttatcgcctccatatctagaaatcaacattttacatttcccagtaaagagtgactggttcgctgctgccatttactaagaaggccagaatgacacacaggttcgcaaaacaccccttgttctaggcgcttccacggggtgacgctcaagtctctgaataaacgtcctctaaacaaaagtcctgggatctaaaaatgcggttcgcttctccacgccaagctaaacccttttcgaaaaccagtagcccacaataccctcctgattaccctccacgttgcgcatgccacgggcagcccacagtcaggccacgatttcgggggtggctgccacctcccaccccccgcctccagaacgagttcgctacaagcgaagggaaaccggaatccctgcccgactcggcagcggccgggcaaagaaagagcccccttgaatccgcggccgcagcgcagcccgtccctctccaggttgctcgctggctcactagcttccctccaggccacgaaagacaacagtggccgaactggatattttcttgaaaaagcctttaaaaggctcccgcccctcaacgctccgcgcggcccaggcatttcctggcagcggcctcgggttttgggaagccaccccggggccgatgggggccgatggacttaccatggcgagcagcggagtcaagaacacaccacgatggcggagaaaggaagaggagggaagctggcggaagaacgagcttagaaggcgcttccgatgggcggagtttaggaggtgacgctatgcaccgaccgcctcttctagtgccttctctgtctagcggtgcgctcccgtggcgccgtgggaaagcgcgctggtttctgccaaatgcagttagctttgcttcgcttccctaagtgcgttcccccaggggcccggcagtgtgctaggggcaccctgcttcgtaagtgaggcagacagcccgtgataaatgccaaagtagaagcccctccgaaaaattaaggagccgattgggcgggactaaccctaagggagggcaggggaagcgaccgtcacctccgggcgccggggactcggaacgccgggtcggagctcggcaggcggagagtaagtgccattttcccagagggttacgagtcatttcggcctggctgggaggtgtgggaagggacagtcgtgtcggaggaagccggagaagttggagggggttggaccacgtggacgcttatgtaagcctaggggttttcgactaggcggaaggttgccaatcaaagttttcaactcagaaagttagggacagaacctcttccttggctgctagaagtccagcctgacattgtagcccgcctttggcaagatgtacaataattaataacatgcgtttgggatgctagtgttccccattttcatccttttccccatttaaaagcaaaaacctttcctttttgatgagtaaataaaataaacataaaaataagctgggcgtggtggctcacgcttgtaatcccagcactttgggaggcctaggcgggcggattacttgaaacgaggagttcgagaccagcctggccaacatggtgaaaccccgtccctactaaaaatacaaaaaaactaaccaggcgtggtggcgggcgcctgtaatctcagctactgcgggggctgagacaagagaatctcttgaaccctgaaggcggaggttgcagcgagccgagattgcgccactgcactccagcctgggcaacaagagcaaaactccatctcaaaaaagaaaaagtaaataaataaacgcaaaaacctccatgtatatttgcagtcacctcaagcatttttacaccaacggattacagcaagggtttttaacctggagtccacaagagtccatgtatagaattcagaggatcccatgaacttgaatgggaaaatacaactttattttcaccaaatttaatgaaatgtaatgctttctttatttaggaatgtaggcaacagaccacagtggcattagcagtactcgtgacttggtcactaatagaaaccatagatggcttcatgttacattacagttgatgcag

SEQ ID NO: 12616 - DNA, 6000 bp, Homo sapiens
tgggaggctgaggtgggaggattgcatgagcctgggaggtcaaggctgcagtgagccttgatcttgccactgcactccactgtgggtgacagagtgagaccctgtctcaacaaacaaacaaaaccagttgttaaaccagctgtttaacaaccagtttgcaaaatttctgaaaattgaacagctcctcccaacctgtataagttggctccagcatgtccttccctttgttcattcattttaatcctggcaacatgcatatgagtattagccaggggcggcggcatgtgcctttagtcccagctactccagaggctgaggtgggaggatccctggagcccaggggtttgaatctagtctgggcaacatagcgagaacccatgtctctttaaaaaataaaagggctggatgcagtggctcacgcctataatcccagaactttgggagggcgaggcggggggatcacttgaggtcaggagttggagaccagcctggccaacatagtgcaaccccgtctctactaaaaatacaaaaattagctgggcgtggtgatgcgcacctctagtcccagctactcaggaggccaaggtgggaggatcacttgaacctgggaggtggaggttgcagtgagccgacatcgtgctactgcactccagcttgggcgacagagtgagaccctgtctcaagaaaaaaaaaaaaaacagaatgattgattccttagcacacgagcttcaccaggcagggattcctgttctgtcatgttcactgctgcctcccagtgcctggaacaggggtggcgcacagttggtgttcaataaatgttggttgaattcatccttttgttgcttcgttccttaattttttccccagtggtgcgtcctgcatttctatggagccctgggtggaggcgtagagactctgagaaccagggaagaagccagagctttgtcagcagaactcaagggcattgtgggactgtgggaacatgactcccctgcagaggcgagcgagtgtgagaaaggaagggttcgagccaccaggcctccgctccacaagagaggagggggtgccaggcattgggggcccatgttcaccctgtgggacgcttcccacgtcctgttttcttgtcgctcacgaagaggatgtttaacttttagcaaagaaacttgcttcctccagcaggaccgggggtttgggggacaggagccaggctctgaactctccaggctcttcccgaagtagggtgtcggcctgcagctcccacccggcaccccactgagtgtaaaggtgtccttcccttggcctcctggaggggtcaaggaagggggagctgccaggccagctctttcccggtgggggcatcttagcagtgtgagggaacgaggggggtggcccaggggcaggggactaggactttgctgcccaggggctgctttgaggaaaggaagtgactggaaagagttactccgtggggagcctgcatgaaaggacagattggaatcccatatgcagcccagcaagtgggactttgctttcgcagagaagaaatcattaattcctcccacaaatatgtattgagcaataactatgtgtaaagcattgtcttaagtgctctgcctgtgttaattaattcaattgtctcgatagcccaatgagttaggcgttattaggcccttgaggaagctgagactcagtgaggtttaggaatttgcttgtttagccacacagctaataagtggcagagctgagaaagcttttgctgttaactgcttcactgtgtccctccctcccctggatgctaccgggaagtgagctgttttcatcaaatgtctccttagaactgatgataacccaaagtgacttttaacagatttcacgggactcccatgtgtcacacaagggtctggtttactgaaccaacagaaaccttaaatgaccctgagaaggagccctactttgatgaactaacaaagtgttcttatccctggcacagcctcaaggcctcggtcctgcttaaagacatctgttccttctaaagcaaattcctctaagcagccagatcacacattccctttgttttcccgctgccataccggcttatgttgagcacctgctatctgcagtgccctgaaacttagcagagctgtcgggttctcagagctggatggaggttcatctctcccgtagaagagttcctttggcagaaataaaagtaatgataataatacgacattagataagtggcctttgttgagcgcctgctgtgtgcctggtagccctgtgttggtccatgttggaaggccagtagaggcaggccctgggagggaaggggagcaatcagagcaggaggctgtggcagggaggcggcgaatggatgcagaggggaggggggttgtcttttttttttttttttaaatccaaataaagtatgctagttatttggacgggacacttcagacttgaaatatggatacctgcatcccccccaccccccgacctttagccatctgggtcaaagcctctagtgacaggtgtctctttccctggccagctggtagcacagatgtgtaatggctctgggtgggggaggggtatgaggggagagagaaatcagagtagataggaaaggagacagaggctggaggaggttgggcaggagtgtgtgcgcacgtgtgtgtgaatatgctgagtgtatctcacctgcccgttctcagccacagccacacgtatgtgagctgtgcctgcgtcttcctatgtaacttgcctggtgctgcgttctgtctatggccgcctgccaaacttgtgcttttttttttttttttttttgagatggagtctcactctgtcgcttgggccggagtgcagtggcgcgatcttggctcactgcaacctccgccttccaggttcaagcaattctcttgcctcagcctcccgagtagctgggattacaggaacccgccaccacgcccagctaattttttttgtatttttagtagagacggggtttcgccacgttggccaggctggtctcgaactactgacctcatgattcactcaccttggcctcccaaagtgctgggattacaggcatgaaccactgcacccggcccaactcataccttttttttttttttttttttggcaaccgtgtgcattggtactgtctgtcggtgcagttcatctatatgttgttgtgtgtgtgtgttgcttgggtgtttgtctcctttgtaatggtcgtgggtgacaagtgtgtcagagtacttgtccctcctatatgtgtatctatgcgcacgtatctttctttgtgtgtctgctgctgtatttgtgtctcttcttagcgagtggctgcaggtatgtgtgccctcggggtgtttcttctggtgccatggtatgagtactatctggttctcttgttttttccttgtgtagctttcagtgtggtttctggattttttctttgcaacgatagtaagcgtactctgcattcctgtgctttgtgtttgtgtgcaggtatatgctttccctatatgtttcttttctgacttgatttgtgactagctgtgtgtgtacacggctgtgtgcagccatttgctgaaatgcagttgtgtgtgtgtgtgtgtgtgagagagagagagagaggagagagagagagaaggagactatggcttttctgtttgtacaaaaatcatgtcagcctatgagtgcctctctctgtgactggagctgtatgtggttacatgtggtcacaagtgcacattcaagttcacatacacagagatatcattttagggcttgaacctggaagtttgcctccagggtcatctgaacctggattcaggttcagatccagggccatctgaacctggatcgtgtgtgtgggaaagacccaggacccacacacaatgtcatcagctgtgtgtaattgtgtgctctgtgtgtggctgtgaatctgtgtgtgtgatttgcctgttgattgtctttggcatggctgtgggtccacgggcggtgaggttcaggagtctcgagtgtctggaaatcggcacaagcctatccctgtgttagtctgtgctctctgtgagcggctctgagcctgtcggtattgatagctgtaagactatcgtcactctgtgtggccacgtgtgtgactgtcccatgagccattgctcttaacgtgcagtggtgagtctgtgtgtgttcatgtctgtcagtctttattctcttgtgtggctgtgagtctttgtgcacctctgtgagtgatggcgagttggcccccgtatctgagccccttgatggggctgtgatgggtcctgttgtgtagctgcgattcctgagtgtgcaggagtctctctcccgctgtggggaagtaaacgccccatcccttgtcctcctccaactgtgggtggggtgagggcatctaggccagctttgaagccccagccagctcctggcctttccgggaattctgtgttccctgtcgggggtgggcaggcgggcgaggggcccagacagaggcctcttgtccacctgggcttcaagcagcccagtcgaggtggtcccagaccccaagtccaccctgcctgacatcctgtagcggacacgtggcttgcctgggacaggcatgcctgtcatatgcctggaggggagtgaacagacggactcccatagaagacagacggacagacagatagtgggacttctcagggcttggacaagccccaccccacgcttggggtggggtccaggactacagtgcccgcccagtttgcggacagtgtgagttcacagtccacattccccacccagccacaaatgccctccctgcctccctctgggggcccccaagatctagggtcctctcgtgcctaggctgtctgcctgaggtctgcctggaatagcctggctactacccctgcacctgttcccctgctgtccccaggcctctctgcctgaatctgcctctctctgcctcttttctcctgtccctccaggagtctctctgcctcaaccactctctctgccccttcatctctctgagctggtgtgtctggtcctaccctctgtttggggagctgtctggctctgtcccccacctcttggccagcctgtgtctcctgtctatgactgagcccaattgcctgttgcctttctgcaggtgtttccacgagcctatccctacccacctgtttgtttctgagtctgcctgtgtgtccctttctccctgtctctgcctgtcttccaagctcccctagcatcccctcctcccgcccatctgtctttctgtcccttctgtggtctgtctgttcctgtgctgtttctcatgcctgctttctttgtaacttcagttctcctactctctctctgtctcctctctgcacctttttctgccatccatcccatcctgctgtccgtctgctctgtgagtccatcccctctgtctgcctgtcactctctctagctgtgggtctacaccctcaatctttcaggccatttcccccaccatcaacacacaaacaaaccgctgtctccctccaagtgggtccagatagggggcgccccttctccacctcttcccccgcccagggccagaaggagggaaacgaaattaaaattaacatttcttctcaggaaaaaaaaaaaagtaccgctccagagcaggagcctaggcagccgagagggtgcccgaacctgagtctgagttgcggccacttcaggagctgagaggagcaggtaggtgaggagggagcgtgggctgcggggatggtgttcctgggggcctgagatatgagtaggggtcctgggagggggctcggggttccttggagacattttagcactagtggggaatggaatggcgtgtatggggaggtcctttttgtaccctgatcccaggaagtgaattcaggtgtgggtgggaggctccggagggtgctggtggtgggggatgggactccttgagaccctccctgtcccaggaacgggattcaggacttgggaaaaggattt

SEQ ID NO: 12617 - DNA, 6000 bp, Homo sapiens
agtaacaccattttaagttcaggttcatcttgagatgaacaaggcccattccttgccagtcacgacccacattcataatatatttacagctgaggaaacaacctaaagacacctacaaggggacactcctataacagtggaaagtctcaatgtcccaacacccataacaatacacattttcaagataattatagttatgctttgatgtcttcacacactaaaatgtcaaggatagttttctttaaatcaataaaacaataaattttgccatgctgtctgctcactctcacatagacacagcttggtttagtctttacgtggacaagactgctacataagaaaaacttaagacaaagacagtgcgttcatctgcctgctttctgaggacatcctactctgtaacagagcagtttctagtaaacttgcttccttcactgtgctgtgtgactcaccttgaattcctgcacgagatctgagaactccctcttggagtctgtattgagacccctttctggtaacagtttttaaccagaagaagaaataaaatgaactaaataaataaacataaattaaactaaaataaacattaaaagtgatcaatgacattcatattcaagaaaataaaaattaaaagatgccctatatttatatcaaaatttaaaatgcacatttccaaaacacctctatgcattcacaagaagacatatatgtatgctcactgaagtactgttttcaggagttctaatggggaaacaaactaaatgcttatcaataaaggaatgcctatataaatcatagtttatgaggtaactctatgtaataacaggactagatcttcatggtataattttgagtgaataaagaaatatgcaaaatgtaggtacagtataatacagttcatattaaatgaatacacagaaaacaacactacatatttcatatgcagttctacatatatatgtaaatccatagaaagaaatcaagaaggatacaaaccaacccaatagcagtggttacctttgggaagggagataaaggggactgtgacggagggtgatagacatacggaactttagtctaatcttcaatatttcaaaatttttcattgagaatgcattcatatgttacctgtataatcttaaaaaaaaatcttaaaaaaataattcttaaacaaagtgaatgggaaataatgaaaaggaaatagtgtatggactatttttttcaagacattaaataatgaattatttttaattatgatgagaataagcaaactgtagaacatctactagaaggaagattagtacagacattaatgtaaaatgcaaaatgcttataatgtgaagttttaaactttatgaattttaagaaattggtatgatgaaaaaatttcagtaatataagggagcaacaagaaaattgtctcaggaacttggaaatacaattttatttgagagtcacactataaagtgaatgtacaatgaatcaaagagaaaaatcaccttcatgaaacataatgccttccactggcaagtcttgtctataagtcgtttgatgattttgacatatgtaaggaaagaatgtgccagtaagccatggaagtggagaaaagagagaatcagtgaggccaacatggacacagcagacttgtcagtttctccatctttccaatgggattagcaatagtgcctacttcatagagttagtgtacaaagcaaacagcacctggtatgtagtgaggctgcacattattaaagggagggaatgtggtggtcaggccaatataaacggtgtcatagttctatttctcattatcaaacagcatcctggttttcatacatcaggctcccgtgaggtaatcagcacgagtcagcctcctgactctgactggttctgggacactgaacagatccagtttccgagactgcaagactcaaagtccagcctggaccgaggttgaaaaagcaccaaggcaatgccatccagcaagacctcttgatagccagccagtagtcttttgtagtgacaccctacctttgccatacctaatctactcaaacttctaaatagcttgaaggggagtggggaagatctatgcagaagaaataaaagagctggaaaaataaattaaaatattaacaggtgtttgtgcgaaggaattatgggtgattttagtattttctttgttttacttttctatactttccatgttttatttagtgtgtattactttaatatttaatataaatatatttaagatttaacataaatataaatatttaatgtttcataaacatgtttaaatcatggtgaagcgaagaaaaagagaggctctagcttgaaggaggcacaagggtggagaaacggcttctgaggctacagctgaggggaagatgtcagcgagttaggggcagagcagggatgatccagatgctagttcaagttcgagaccagcctggccaacatggtgaaaccccgtctctactaaaaatacaaaaattagccgggagtggtggcaggcgcctgtaatcccagctattcgggaggctgaggcaggagagaatagtttgaacccgggaagtggatgttgcagtgagcggagatcgcgtcactgcactccagcctgaccgacagagcgagactccgcctcaaaaaataaaaataaaaaaagatgcaagtccaagatgcacttgctttccatggagagactttttcttccactgtgcacctagattttgaagtggcttgttatttgccagtcattgcatttgcgtggcgaatcactgcaatggaaagcatctccttgagaactctaagtgtgtcacgatatctaactatatcactggctgttgaacctgaaagtcccatatttgagttcttaaacattccctccttcctcatcatcattaccaaattactagtcatctcctaggtgcctgcctctatgctaaattgggcggaggttttggggtggaatggagggagcttatgaggagagaaataaaaagataaacgaaaatgcaaagtcaccgtggcctggatgaggtggctaaggaaggtttagaacttgaagtcaatcggtctaattttcttatcccgcgattcagggaataggtggtacttaagcagagccttgaaaggtttgcaaggtttgaataagcagagagcaacaggtgggggatggagggaggagccggagatgaacggagcaaaggcactggggtccaagccgggccgccccaagggttgcagactgattccacgaggccagtaagcagcgttatctgcaagctgctgccttttttttttctttttttgaaacggagtttcgctcttgtctcccaggctggagtgcagtgacgcgatcttggctcactgcaacctccacttccagggttcaagcgattatcctgcctcagcttcccgagtagctgggactacaggagcgccccaccacgcccggctaatttttgtatttgtatcggcggcgggggaagcgggggggggggtttcctccatgttggccaggctggtcttgaactcctgacctcaagtgatccgcccacttcaggctcccaaagtgctgggattacaggcgtgagccaccgcacccggccactacaagctgcttttattattttatttttattttattttttttgagacggagtcttactctgtcgcctgggctagagtgcagtggcacgatcttggctcactgcaacctctgcctcctgggttcaagcgattttcccgcctcagcctcccgagtagctgggattacaggcgcgcgccaccatgccgggctaattttgtatttttagtagagatggggttccgccatgttggccaggctggtctcggactcttgacttcaggtgatctgccctcctcagcctcccaaagtgctgggattacaggagtgagccaccgcgcccggcctccaagcttcttacgcagccttccttctccactttattttcagctgaatatttgttgcctcagccttgtgacctacgtgcgcacgagggagccatccaaagcagttataggatctcttccagctcgagtcctgccaacgccgccttctggggctgccagctcccagctgttccccgcactggcttcctcagagtgcaccactgcctcctccctcccaagcccgcagactcgccagttactaaggagtaaagtaccctagggagttcctgtttggttggtctggctggaagtgaggcgtgtaatctgagcttttaaagtcaaaatctaaaatacaataaagacccagaaatccaagtcttcagacctggaacacaagcgtgtctttcagttttgaagttcactgtaggttcctttataaaactagtcctgtagaacgaaggagagcctccccaacatcctgtgtgcacagcaagtgtggaaaactgaaatagtgatctgaggtgtttcgaaaataaacctcggaaagcacattgcctacggtgacacattctcggccccggggcgggcgagccccggggtcgcagcgcgcagctgccagaaccagtcgcgcccgccccgcctcccgctcgcgtctcccgcaaggtggaggcggcgcagcggtcgttgacctgttggcggcggccgggcgggaggctgtgggccgcggcggtctcccggggttgaggggaggatgcaggagtcacacgcggaggccggactggactaagggggcaggagcggcgcctggggcgctgcggcggggctctagaccgcgggaagccagtgctagcgctggcgcgtggtgggcccctgaggccgccggagtccggagaggtacgcggaatccgcggcgccaggcctgagcggtgggagggctctgcggggcctggtgttcaggcgtcccaccacgagggtggagcagcgttggatacttgttccttagggaccgaaggctccggtggcacccgggctatttctcagaggacaattagtaacgtgtcgccatgaggagccggagtaactccggggtccggctggacggctacgctcgactggtgcaacagaccatcctgtgccatcaggtaactgcaggggtgtctctcgtaatcaccgagcgaggatgtagcttgtcatagcttggacggagaccttggatgaactccgtgcgtgcgtgcgtgtgtgggtgtgtgtgtgtgtgtgtgtgtgtgtgtgtgtgtgtgacggagaccttgcatgaactccgcgtgtgtgtttgtgtgtgtatctgtatctgtctgtagcaggttctcccgcccctgttaattatatattttttctgctggtttttcattgctagttcgctagttcattctaactagaaaggtaaaactttcttttaataatacccattataaatgcacttaataatacctttaattgtgcctttaataatacccacatttcagactcgaaaggcttcagccaccgcttaccccttattcaagatagtatttgcaaagggcacaaagtttcagttataagatgagtaagttctggggatctgatgtacagcagcatggtgactgtagttaatcatactgtactgtatacttgaaatttactaagagagtagatcttaagtattctcaccacaccaaaaaaaaaggtagctgtgaggtaatagatgtgttaataaacgtcattttggtaattttccaatgaatacataaatcatcatgttgtactccctaaatatacacaatttttaatgtgttgaatatagctcagtaaagcttgggaaggtgggaagatagcatttgcctgcaataggtcagaagaagaggaggttataaaactcaagagtggagaagtagaagaaagaccaaagtccctaaaaaacccatttggaagattctgtttcctgatgttaacacctatggttaccttcctgccctctttttcttgaccttgcagaatccagtgactggcttgcttccagccagctatgatcagaaagatgcttgggtccgagataatgtgtac

SEQ ID NO: 12618 - DNA, 6000 bp, Homo sapiens
tcaaaacagatcatggactcaaatgtaaaacacaaaactatcgaatcctagaggataacatgggaacatcaggtgacactgggtttggtgatgacttctttagatacaaggccaacagcacgacccatggagagagagaaaacaaagcagcaaactcagctcatggccaagtaaggaaagggcaacccggttactccaggccaaggctcccaggagaagggagctggacagagtttctgggtcgtggtctggcttcagcctccctgacagtcccttctggaaaagccagtgggcaaggtcgttagagactcctgggaaacatgggtccccactcacacatctgacacggctgggctggggactggggattgcacgcatccagtggaaaaaatacagttggccttcatatccgtgggtttcacatctgaggattcaactggccatggatggaaaacacttgaaaaataaaaaatagcaatacaacaataaagataatacaaattaaaaaacaaatcaggccgggcacaggggctcatgcctgtaatcccagcactttgggaggccgagttgggcggatcacgaggtcaggagatcgagaccatcctggctaacacggtgaaaccctgtctctactaaaaatacaaaaaattagccgggcatggtgacaggcacctgtagtcccagctactagggaggctgaggtgggagaatggtgtgaacccgggaggcggagcttgcagtgagccgagatcgcgccactgcactccagcctgggcgacagagtgagactccatctcaaaaaaaaaaaaaaaaaaaaaaaaaaatcattacactataactgtttatgtaacactgacattgcatccggtaatacaagtaatctagagaagatttaaagcattagagaggatgagcaaaggtcctatgcaaatagtatgtcattttagatcagggatttgggtgtccatggattttggtatccccagtagggggaagcctggaacccatgccccgtggacaccgaaggacaactgtagtcagaagggtgggatcttctgtgtgtcctgcttctaagagcaccatggcctttttgcagctctctatggtgggtcagagtggagcccttctgtggggtgtcatggcatcctcagtgggtccaagctctgggacgtggagggagagcagggacctacctcatcagcacagagtaagataggacccatccagataggaatctgggccagactcacctgggtacccatcttcaggttaaagaatgctggagtgccccggggagcatggtggtgccgccctcaccctgtctctatcttgagcgcaatcgcccgctccagcctgactgctgtgctgggatgtcactgcactgtcctcaagctgcactgtcaagcgcagtaactgccccatgatcagctgtctctcatgtccttcctcccggacgctctcccagggctgtatatttgttagggttttctgattacagggagaagctgactctaactttagcaagaaaatggatttatctggcatgatgctgggtagatcaccaaactggtggaatgtctaatggagcggggtttcggacacacaggcgagaccggttctttttttgttttgttgttttagagactgagtctcactctgtggccccggctggagtgcagtggtgcaaccacagctccttgtaacattgaattcctggggccagccatcctcccgcctcagcctcctgagtagctgggactacaggtgcgtgccaccacgcccggctaactgagacctgttttgagtgggatccagagcaagaaaggaccctgcaggaggactgggctgcggggcaagctgctctgccaccagcagcgagagcccgccaacctaacggtgctggagggatctgtccatggtaggccaggatgctgtgcggaaccctcaggaagcctcaatggaaggatcccagcagggaccatagaggctgtggcagggccacaccttcggtggcagagctactcactcaccactgaaaaaagcatagctgtggccatgctactgggacctaggagagacttacagcctgatcatggggcatccagggcctgtgtgacccaagccacccattgtgaactgaatattgaggtggagatggcacattgaggcccaggcagtccagacccccggtcacccggctctttcacactggtatgccccttcagctcacacctatggcctcatgggaggtggtgatggggtgtccccatgactgactcagacccaggtcctcgactggtcatctcatgtcaccactaggaaaaacacctgctgtcacactgaggccctttgcagggtggccctgagagacagcagtgaggggacatcctctaggggagcaagacactaggttgtctactttgtagagggagaaatggcctgagatgaaggtgtccatgacccccgggcagtggaaaatggctgggctgactggtcagggacccgggtggaggaagattggaagaagagacaggtttggcgaagaggtacctacgggagtgctcagggagagtgtggggccccgtgctcgtcttcgcgcccatgccgctggggagcatgcagtgtggagggggcgcgccagaagctagcgaacagaggggaccatctggtggaggtcagccagcttctccccaggatgcgatggacccacgatgccagtggccatggtgggagggctggaggctctgtataagcccaacggcaagggcttcctcttaccacggctcatctagacactgccgctagtgaatgttcttccatccaccagctgcagagaccgatgctgagccctcaatatgacgccattcctcaagactagccagccattgggtggcaggttgcaacctgcacaccagcccttgtctcaagttctgctttctgggagaagccctggataagaaactcgcctctcttctccacattctgggcaggcccgccattcttgatttctcttctaacgaggagccagggaggaaaggaagggctccgattcaacagccccgtgtggctgggggttccctcacttgcccaaacctggaaatgaagcatgtagcaatttctccaagtgatctcctgcagccggggcagcctctgggaacgcagacttccacccgctgctgctttccaggcaaaggccttctccctccaggcttgtccaagaagacggggaggtggtgggagagaagaggaagagatggaagggctgtgaaagcggggaccgggtgagggctggggctgaggaacaggtaggcggcgggcccaggctggccagtgctgtgtgcaggcccgggtcccaaggcctccgaggccactctccccacgacccaccccctccccacgcttcgctcatccttttttctttctctctttcttttctttcctccctttctctctttctttcttgttttaaacaaaggtgtccgtttcaaagacagcagggaatggctgagttgaaggagggatgcagtcatttaaggcgaagcccgaggaaggagcagaggcgtgagggctgctgcgtccaagaccggggagaggggctgaaatcgcggactctctctgggggacccaggagactgctcctcctggcaggacccctctctcccagagcggcatcgcgcagacaacgcgcctggtgcccgcccctcaggaccggacgccgggtgtcgtggggtgcctaggacccccgcccgcttccgtcgagcgcccgcccccggcttcccgcgccggctccagcgcccccgccgctccctcccgcagccggccccgctcccctccccgcccctcccggcgcgcgtgcgccccgtgcccgcgcccctcccccgccgccgtgggcgcgctcgcgtgcccgtcgtcccgggcgggagctggagacggccagcggctgctggacgaagagcgggcgccgggagctccgagagcgcggccgggcgaggcgggagcgcgggcgctggcctggccgcgggcgggggccgccgccgcgccgctgcccccctgtcgcgggccgggccgcggcgccgagcgcgagggccgggctcccggggctggcggccatgggcaggagccggaggcggcagcggcagcggcgggccccgcgggcggggaggcgcgcggcccacggcccctgacggcccctggcggcccggcgcgcccccgcgctccctggggggccgtagcctggcaacgcccggcgcgcccgcccatcccccgctgccctttttctcctggccgggtgcgagggagcatgcccgcgcctggcctcggccagcgaagagttaacctgaggggcgagccgctgcccccacctcgggggcgtgcccccctcccccgctaggcggcccgccccccgcgccagggtatggcccctggccccggcccgggacccgaggtcccgcgcccgggtcagtgaaaggcgtcttcccgttcccgccctccgcctcctctcgccggccagcaacatgggatgtaatatgtgcgtggtccagaaaccggaggagcagtacaaagtgatgctgcaggtagggccgccggcgctgcggcgggggcgcggccctccgcggggaggagcgggccagtggggaggcccggagcggcgggcgtgggagagcgggagggctcgaggaggacaaggtagggagccgtccgcaccctcccatcctggggctgttgggtgttggcgctccgtgggaaccagccacgggtggggtgggaagttggggttggcccgggtggggcgcgcttccgtcccgggaggcgcggtgcggcgggcgcgggatggaggttgcatagcaacgagcgcagttccccgcacacgctctccccgcaggacccagggcgggggagggagccaggctcccgccgtgcggggggcgccgaatctagatcccggcgggcctggagcgtgggagtgcgtgggcgtccccgggcgcggtccaagtccgtccgggggctgggtgcccaccccgacacccactcccgcctggccctgcccgaacgatgggctcccgggccttaggcgtctcgggtgagtgggcgccgccgggatcagcgggttgggctctctgcgggtggcagtgcctggccgggctttgcggggcgtggaccagcagggccccgcggggagggaaggagacgcggggcccggagctcggacctggagcccagccccgcggcccggaacggggcttcttgcctgtgcgtggcgtgactacgtgagtgcgttcctgtgccccgtctctgtgtgcgcggaggctcccccggccccgcatttgtgtactttctgtgtgcaccctgcagactgtctagagaaatgtcccggatgctgtgggctgagacctcctagggctaagtggagggaggtcaaggtcaaggcacccaggagcagacagggctcagacaggtatgcgtttagtggcctggattcaactcccgggtttattggtctggactgggaaggaatcaagtgctttgcaggaggggtgttggcttgggagaacgtgggggaacccgtgcagggatcggcgagaactccggggcgggggcgggggcgggggaaggaggggctgggcacgggggagaattcccaggaatccggggactgacttcacgctgtgagccgagctcctctggccacctggtgcgggagccgaggggcagggcggggacgcaaatcttgccccaccctggcggagctcctggtcctctctccccggcccttctccgggggtgcgcggggccctcggcttctcccgttcgctgtcctccgccttcttccctctcagttcccggctgccactcctcgtctcttgttcccgctgtttggaaaccttgtgtggccattgccagccccctagcgggataggaatgcgaccgagagggcgtcctgtggaatccgtgttggattccagggctgggatggttggttgacggggactctggatccca

SEQ ID NO: 12619 - DNA, 6000 bp, Homo sapiens; identical to SEQ ID NO: 3497

SEQ ID NO: 12620 - DNA, 6000 bp, Homo sapiens; identical to SEQ ID NO: 3488

SEQ ID NO: 12621 - DNA, 6000 bp, Homo sapiens
ggtgggagcggtgggggggcgggggggtgccacacacttaaccagatctcaggagactcactatcatgaggacagtaccaagccttgagagatctgcccccatgacccaaacacctcacaccaggcccaacctccaacactggggattataattcaacatgaaatttggcagggacatatattcgaactgtatcaggtgatgaggaacaaaaaaggatttttaaaacaaaaaagaattttcaattctttggagtttgagaaagtttaaagttaatttgaagaaaccatctcctctcaaatgtgaaccatgaagttacccatatattcatttgaattcttaccctctttccactttagttaatgagacacctccagtagactagtatgcttttaaagctcaatacactttcagttattacctaatgaaagaatagaaaattgtctgttatagaaattcttgtaattcctagatttttgcctctcaaggaggcagcggatagctgaaatcctcttgtaatgtagctggataatgtgtgatctgggaaccttgcactgtttactgcagaaccggtctacaggattcctataaacatattaaaatactgagcagtgctggagcactcattagataattgccactccttgtgtccctgatgtgatctgtcgtggagctcaccaggtgagttcacaaacgctcctgtcctaccactatggggaagtggatttgggtctgctcagaggcatgatgttgaatagctcttaggaactttcaagcacctaagaatgcagagacctttggtctctaaaactttgaacttaaggcatttcagagagagattgcttctttcttcacgatgtttgtgttgtcattaggcgaaacaatgagaagtgattttttcatgatgactaccttagccttgaggctcagccagcccctcatgctgtgtaccaatacttaaaggccactccctgctgtatattctcaacagattttctcatttacccctcaggactgctctgtaaggttggtatagtcaatcccatttcacagctaaccaagctcaggctcacagagcctaaatcacttttccaagtaagtggcaggattggaatgaggttccatccctcaccttccctagaggaccctgagcacccccttttagaagatggctttccagggtttgagaaatggtcagattccactcccctgctattgtagtcccatgggttcccactcaacaactcctctgaagatgacaggggaagtgaaatcctgtgctttgtgccatgagatctggttgtagggccacatgagagggctgatccttaaagtggcaagtgggctcaggcagaagctcaggtgttggccttgggacaggtgagctgcagagaaggaaagaaacatgcactgaattactgtaagcaaatgcactttacacctcatctcctttaatcttaactgctacccaaggtcattatcaccattattcaaattaggctgctgcctttagaggagtttacgtaaatcagggagacaactttgttgtttcctgataagcacaaactctgtaatactctagacttttatcatttctcttcattcctccagggccctgaatgctctaatctccctccaggctggcagtacctgctccccaggtgtttttcaatgttttttctttgaaatttaagatctgtgtaattttaaagtcaaattttgaagtttaattgggttagtatccatgatttgtgaaacatagtaacaaaatggcaactatttcaacagagaatttaaatgaaatgtacatgaacaataaacatactaaaatacgccaaccccacaagaactaataaaatgcaaatattttaaaatcttgagaatttataatgacaagatgcaaaagataagtaccatgattgcacttttggagaagacaatgtgtgtgtgtaggtgaacgtgttgatgtgtacctcaccttcagggacatgtctggagagtatgcaccatcctaggaacagcagaccccttggggttaaggagtgggagttgaccagtgagagctcaggttaattttgatttatcaatatgctcttgtgtactgttcaaaaactggtatttgggaataaaagtattctgatgaaaatttgaacacacaaaatactttggaacaaattgtcaaagttaaggtgtacataatgtccattaatttgaaaaagcattccttatattctattttattgtgaaagaagtaaataacaagtccaattgacagaggttttgtgtgtgtgtgtgggtgtttgtgtgggtgtgtcctctagctctaccaccccaaatacaaaatcatggatgcaactttagttccagcggggattggaaccaatatcagtttcatatattctggaacatgatggatacatggaaattgctaccattaggtgaataattccagaaaactgtggctgatacattggagctaacctccaacctccatgcctccctcttcctgagtccctggtttgagattatcagagctgcgtttctgtctctggccactaggaggcatcagagctatctctgtttttgtacattttgcagagtaacatgtttcaaaatgacttgtttactttgattccagttctgtttggaaaattcacatgtatattaaagcaggtccatttgctgttgacccctaaatctacatcgcattcactgatttatcatctcttcccttctcagtgtaggttgaagtgtccacactgtcggagggggcgggggcgggggcgggggaggaggggtccctccagagagcaaggcattcactctccataactctatccctgtacaggcttctcagaccttctcacactctctttcagtcttcccctctccaggacactatagacacagttccccagatgctgctccagtgcctccgacctctctccgtcacctttctacagccccgtcactgctacctggtgtttcattttgtggatgccctggagcatatgtttttacatttacaccgatcagtttttttcttaccagcatggggaactggttttgtgtcttctcggaggcatgatgttgaacagttttcgtgagattatgaaacacacaagaatgtagagaactccatctctaaaactctgaaatcaaggtgtatcagggagatttgccttctttatatggatgtctgtgttttcattaggagaaacaatgagtaatgatttttcacgatgcctgccttggccttgaggttcagctaacccctactgctatgtctcaatatttaaagggccattgaagcctcccattccatgccatataccctggacaggttttcccatttatgcctgggaataactccgtgaggatggtatagtcagtcccatttcacagatgaccaagctcaggctcacagaacctaagtcgcctcttgaggtaagtggcaggattggaatgaggttctatccctcaccctccctagaggaccctgagagcacctcccttttagaagatgcacttccaaggcttaagaaatggtcagattccaccattcagatcatggcgatgtctttaggggagtttgtgtaaattagggagacaactttgttattgtttgttctgtattgatgagtatttagaatgcttctcattttttcctttttaaaaagatttcagcaatactgtagcaaataacctcttacctggctattttgtacatgtgaaaaatgtttcatccattacatgcttacacatctatcccttggggcttgatttcaataatttaaactcccttatatgtgtctgagcattctcattcctttaaccatctttatacctgttgtagttacaatatttaaatgcatttataactgagaagtgtgtttccatttccttgatgtatttggtccctcatcctgcccccatacacagacacacacagagccacttttacctttttcttttgcaaattaaaaaaaaattcttattcagttttttctacattgaaattttgtcaaacgataggtgataaaagtatatttagatagttgcatttgcattccttatatattagtgagctagaatgcattttcttatgattattggccatttgcatttcatcatccatgaaccatttatatattttgtcagttttgctgttttgttataggatctgtacgtgtgttaaatctaaaacccttcattgatctatgcatgcgttatttcaacacatctttcttggctgaatattatttatgagacactctagaaaaatccatatcctagatgtttcttctgagatcttggctcttatatttatgggagatgtccccctgcagcaaaaaatgtgttagtgcccatgcaaacatgcgtggcttgtcaaggatcacatgcacagacagttcacacttactcctaaacccggcatggccacagagtagaaaggatgtgtggggcattatataaggagagcactggctcaggattgtgatttctgtgatctctatactaacggcaagatttttaaaaattacgtaacatttctgagtttgccttttctcatttgtaaaatgaaaacaatcatagctaccaaagacaattgttctgagaagtaaaagaacaaattattttaagcgtcatacacagcgtagggtacatacggtactcaacacatcttagtctgcttcctatctcatacccgtccttcctttaaaggagattcctttgacataatccaaaaggcatggttccataacgatcacatgaaagttttaagggaaatgtataggtttccatgatgaattaactgctgtgtcactactctgtgctgggtaagaaaaaggaaaacaatcgctgaaccggtttcccagggtttgtaaaagaaaaccatcaaagccaccacctcatttcactttatttcgtagacttccccatcccattttttatgttctatgctaatttctcaagaaaaataggcccggcaccgcctctgcgcacaaccttgctggtctggcccaggcggggggcggggccagcacgatgagcgccccgggcagccccgaccaggcctacgacttcctgctcaagttcctgctggtgggcgacagggacgtaggcaagagtgagatcctggagagcctgcaggacggcacggccgagtccccgtacagtcacctggggggaatcgactacaagacgaccaccatcctgctggacggccagcgggtgaagctgaagctctgggatacgtcggggcagggaagattttgtaccatattccgctcctactctcgtggtgcacaaggagtgatcctggtctacgacattgcaaaccgctggtctttcgagggtatggatcgatggattaagaagattgaggaacatgcccctggtgtccctaaaatcctggtggggaatcgcctacatctggcattcaagaggcaggtgcccagggagcaggcccaggcctacgccgagcgcctgggcgtgaccttctttgaggtcagccctctgtgcaatttcaacatcatagagtctttcacggagctggccaggatagtgctgctgcggcacaggttgaactggctcgggaggccgagcaaggtactgagcttgcaagacctctgctgccgcaccatcgtgtcctgcacacctgtgcatctggtggacaagctcccgctccccattgccttaagaagccacctcaagtccttctccatggctaagggcctgaatgccaggatgatgcgaggcctctcctactccctcaccaccagctccactcacaaaaggagcagcctctgcaaagtgaagatcgtctgcccaccccagagcccacccaaaaactgcaccagaaacagctgcaaaatttcttaaggaaggcaccaaaaggaaacaagctggaatcgctccaggaaaaactctgaatggttacacctggaagagggaagatgcattctagattcaaagaaatacgttttcagtttctcatg

SEQ ID NO: 12622 - DNA, 6000 bp, Homo sapiens
tagttcccacctatgaaatgaagttgtaccatttaattaaaggtgatgaaaatattcctgaactgtagaaaatgtaatcataagcttgtaaacatgaaaagtactttgagtacactattgatttaggtgcttttatggagttacggtcccttttaagaatctgctgaatgctacggactccagaataatgctcatttgcaagtacattgtatactttttcaaaattcacagaaaaggctgggtacggtggctcacatctgtaatcccagcactttgggaggccaaggcaggcagatcacttgaggccaggagttccagaccagcctggccaacacagtgaaaccccatccctactaaaaatacaaaaaactagctggacgtggtggtgcatgcctgtaattccagctacttgggaggctgaggcaggaggattgcttgaacctgggaggcagaggtagcagtgagccgagattgcgctactgcactccagcctgggcgacagagtgagaccctgtctcaagaccaaaaaaaagaaagaagaaaaaaagattcacagacaagtattaaaaaacgtcatgtggagagtagtgcacaaacgtcatctttctcttgccctctcaactctttaagactgatttatgctcttaattctgtcgcttctctgttctacctcctagaatttagtcatcagcagcattctttcaccttttatcatctgtgttttctcctggaccttttctctcagcttatataatagataacaattcaaagtatatctttttccataacactttattctacttttgaataactttttttatttttattttttagagatgggagtcttgctatgttgcccatgctgttctcaaactcctgagctcaagtgatcctctaatcttggcctcatgaagtcctgggattacaggcatgagccactgtgcccaaccctgaataacttttttagtataaattatcagaaatagttaaaaaaatgaacattttttctggttcttttgctactcattgccatatttttctctctttttttttttttttgagacagggtctcactcctgtcacccaggttggagtgtagtagcgcaatcatggctcactgcagccttgatcttctgggttcaagggattctcccacctcagcctcctgagtagctgggactacaggtgcacatcaccacacccagctaaaatttttgcttgttttttgtagagacgggggtctccctgttgcccaggctggtctccaactcctggcctcaagtgatcctcccatctcagcctctaaatgtgctgagattacaggcgtgagccactgcgccttgcctccgtgacacttttcatttatttccttttcgtccgaagctttgtgtaggacatgacacttttccaaatgctttcctaggccaggtatggtggcttacgcctgtaatccctgcatgttgggaagctgaggcgggaggattgcttgaagccaggagtttgagatgggcttgggcaacataggagatcctatttgaaattaaaagaaacgaaacaggcagggcacggtggcctgtaatctcagcactttaggaagcccaggcgggtggatcacatgaggtcaggagttcgagaccagctcaggaggctgaggcaggagaattgcttgaacctgggaggtggaggttacagtgagctgagattatgccactgcattccagcctgggtggcacagcgagactctgtctcaaaaacaaacaaacagtcattatttaatgtccagctccatgagggcaggggctgtgtccatcttgttcactgctaatatcccccatgccaagcacagtgcctgatttagagtagctactcaaagaatatctttaggccaggcgcagtggctcatgcatgtaatcccagcactttgggaggccgaggcgggcggatcacgaggtcagaagttcaagaccagcctgaccaatatggtgaaaccctgtctctactaaaaatacagaaattagctgggtgtggtggtgcacgtctgtagtcccagctactcgggaggctgaggcaggagaattgcttgaacctgggaggcggaggttgcaatgagccaagatcgcgccactgcactccagcctagacaacagagcaagactctgtctcaaaaaaaaaaaaaaagaatatctttaaatggattaatgaatgtgaataaaaaccactaacccagaatttattcttgcatctgtttcgtgggattagcccaaattctagccatatcaataaaaatttactaatcatttggcctaactggcctcccggcctcgtgttccatctcccttgtgagccatcctatagccgcaaccacagtaacactaaaacaaacaaacaaacaaaaaaacccaagtctgattgtgttctcttcccaaacctctgctatctcccccgctgcctacagaatacagtcaacgctcctcagcttggattcaaggctttggccccaatctccctttttaaacctctctaggcttatttattaagtgcttattatatgccaagcactaggctagtcactgagttcataaaccagttggagagacaggtacattgactaattttaataaggtgtgatcagcactattacagagactgtgagaacacagatagtttcaggtaatggatgataaaatattgtttttgacctctgcaggttcacgagttctgtctacaatagtaatgtccaatacagtggtcagacacatttcaagtgctcaatagccacctggggctagtgtctgtcacactggatagctgagcacagatacttttatcacccatggacgtgggggttaactatagctgcttccaagacagcaagggagccgggctcggtggctcacacctgtaatcccagcactttgggaggccaaggcaggtggatcacgaggccaggcgatcgagaccatcctggctagtatggtgaaaccccgtctctactaaaaatacaaaaaaaaaaaaaaaaaatagccgggtgtggtggcatgcgcctgtagtctcagctacgcgggaggctgaggcaggggaatcgcttgaaccggggaggcggaggttgcagtgagctgagatcgcgccactgcactctagcctgggcaagagagcgagactccgtctcaaaaacaaataaataaataaataaccaagacagcaaggaacatttcccatatgtgaagcctgtggtgctagctaccagttccccaaacacaacccctctccccaacaccttggctcgggtatattttgtagtacaggctcccaagagaaagaatgcatgaaagtactttgtaaactattaagtgatacagaaatgtgatataataaacaggctcagaggtcttgctttcatcatggctttggttacttcgagcaaattatagctcttttctcaaactactcccacccctataatttatgccaaagtgttctgaaaagaaacacaggcaaaatggttatcctagggctaaaaatcctgattatacctaccttgaagcttttaatccaggaccctacttcaccacccgcctgctctgtcactttctctacaaaggaaggacacgaagtaagacttccaaaagaacaaaacgtttattttttaaatttaagaattatgggaaacctaagtaatgggaattgcatcctcatcggggtcttctggcaagtcggaagcaccaccctctcctgtagctcgatgcttctctagtttagcaatcaattctttcgctggattgaagacgccattggtctgctggtcacagacatagcagcgcggggtggtgcggaaatgctgcagtgcacagctctcgcagaaataatgcctgcacttggtgacaactgggttttggaagctctggcgacagatgaaacacttgaatggtatttcctcatcatcgcttcccacttcatagttttcatcctcatagacaccatagcgaccctcatcaagctcacgttcgatctgccacccatgcttgtaatctgaacggtcatggaggaatttgcagctgtctccgaagccgcagaagccagtctctttgtagtccttacagatgtcgggctggtaatcccagcgcacggtggcacgtagatgctcgggcgctcggatggggcccttcctcaccatcccggaagaggcattgcccatagacgtatccttgggcttcatgtatttctgataattgttgattccccgatagatcttgtcatcctccttgcccctcagctcctcctggatcttctggctgcgctcaaagatggcttgtgcatcgcgctctttctctgtgtccagctcatagacagctgtcgctcccatatcctctggtcccacgggtttcgccgaacgggtggatttataaaccacgccgagactctcgggctcattttcctcttcctcttcgctgctcaagtcgccgtaagccgccttctgtttaccactgtcacgggtcttctgtatcattggattgtgggtcacccgcttcttttccggtcgaaccacagtgcagccttcgtcgctactgctgccgctttctccgggctctgggtcgcaggccgggcgctttctgcgtccagcagcccctttccgcccaggctttttgaaaaggaaggtgcacacctgatccaccgcctttcctggagaaagctgctctgccattttagagtcctgagctccgaaacagccgtggctgcctgggttgcacttggcccctgcacgtcactccacgttgcgcgctccgccgggagtcgaagcaaaagacactgacggaagaggactgcgagagcccgagcgcccgtctctcttgtgccctagcagattccgtcgcttcttccggagccgtacgtggcaccgccccgctcgcgggcggccgcggggcttgctgggaagagaggcgaagccaggtcacctttcaaggacccagaagtagggttttggcctaggtaacggggcagagatgtggttcgagattctccccggactctccgtcatgggcgtgtgcttgttgattccaggactggctactgcgtacatccacaggttcactaacgggggcaaggtaagccggcttcggcccgggggccgactccacgggctgatttccgaaaagggtggtgggcagggagaccgtcagcctgcgaaccctctctccgaggtcggccctctacttgcttccggttgcctagaagccgaggcttgcgaaacgaagcccgatagaaactacatcctgctctagtgaaaaacagcgtttctgggtgtatcagagtgggccttagggcagagtagcgacgcgggggccgggaaggtagattagaaaaggtggctcaagcctgagaatcgctcactgcaacctccgccttctgggttcaagagattctcctggttgggcgcggtggatcacgcctgtaatcccagcactttgggagaccgaggcgagcggatcacctgaggtcgggagttcgataccagcctgaccaacatggagaaaccccgtctctcctaaaaatacaaaattagctgggcgtggtggcgcatgcctgtaatcccagctactcgggaggctgaggcaggagaatcacttgaacccaggaggcggaggttgcgatgagccgagatcgcgccactgcactccagcctgggcaacaagagcgaaactccgtctcaaaaaaaaataaataaagaaagaaattttcctgcttcagcctcccgagtagccgggaccacgcctggctttttttttttttttgtagaggcggggtttcatcatgttggcgaggctggtctcgaacttctgacctcggttgatccacccgccttgatctcccaaagtgctgggattacaggcgtgagccgccgcgaccggccacccttgacttttttattccccactttctcttgcaagcctttaggaatttactgcgagatcttgtttttttacatcaggattcattttcccc

SEQ ID NO: 12623 - DNA, 6000 bp, Homo sapiens
cctgccaaatctcatgttgaattgtaatcctcagtgttggaattggggtctggggggggatgtttgagtcatgggggtggatctctcatggtttggtgctgtctttgcattatcaagtgagttctcacaagatctggttgttagcctgaccaacatggtgaaaccctatctcaactaaaaatacaaaaattagcggggcatggtggcatgcgcctataatcccagctactcaggaggctgaggcaggagaatcgcttgaaccagggaggcagaggttgcagtgagccaagatcacgccattgcactccagcttgggtgacagagcgaaactccgtctcaaaaaaaaaaaaaaagtgtatagcaccttcccttcactctctctcttgctcccagtcctgccatatgagatgcctgttccctctttgccttcttccatgattgtaagcttcctaaggcctccccaaaagcagatgccagcactatgcttcctgtacagcctgaagaactgtgaaccaattaaacctcttttctttataaattacccaatctcaagtatttctttatagcaatgcaaaatggtctaacacaatcaccaacagatttcacaagaagaaggaggagccatgggcagctgtgagctgctgaaaaggagctgaccactggatccaccaaccacagcgaaggacgtccaaccctcgccctgaggacagaaactcccttctctgatgcctggctgtctgggtgaggtcttgggcctcatagcaccaaagatcaaatgccatgaaatgagctctttccccctgctgtgtgaccacaccctacacacacacacacacacacacacacacacacacacacacacacacagaggcagggtagctttgtatcaaagcagggcagatgtgatggatgaggcacccaacagcaccacagcagccttctggggctggaaaattgccctccattcagagtattcctttcgggttaaggatggggaggctaggccacacaatggtggggttttgcatcaactccacaaacttgtgctgagcccactctttgctgggctctgtcctggataggacctgttccaggtctaaacatttataaaaagcaagctcctgcccttggggatgggtgacctacgacagaagagttgttgagaaagaaaaaggtcaatgtcagggtttgaaaacagaagctcccataaaatgttatgggagtctccaagatgaatttgaggtgatgagggcttggtagacaagatgaattttgagctggactttgatggatggagagaatgtggacaagaagagatgaataatgttagagaggaagaccttggccactaagctgaagagattgaattctgccctgagggcagtgggagccatggaggatcttcagattggggtgactgtgaggtccaagggacagagcatgggcttttaagttccccagacccaggtttgagtcccagctctgccacaggtcagcttggacctgggcaaagccactttttttctccaagcctgtcttctcttctgcttctgagagccctgcctatctcccagcatgagatgctggaacctgatgggagggtataacgggaattcggaagcagcaatcacatgctgtgcccacaaggccaagagtccccagtccctcagcctgtgaggtcacatgaagagttagattgggcatgtgctagctcaaaagcctccttcccacctgcagaactgcagaacctcaggtatcatttcatgatttcatcctcagtaacttgggacatccccaggggatgctctgcagtgctcatagcccccttgggtctctgactttcctattgccaccggctattccagtccatggcgctgtccacctgtgcttcctcaggctgcttttcacattattgccgccagtctgcccctagactgctgtccttccctgtgaccacctcctgcaatgccatctctgcacctctactgccaagattcactccacctctctgattcctggccttcctccaggttctacccttccccggggctcccacagcaaagctgtttgtatccctggtgctagagttccttgcttgctcgtcactttatatgcattttctcattcacactcatgacattagttgttattgtgacctcagctgcgattcaggacacctagtggttgtcacctggtgggagaacatgtaagtcaggaaggtgtattctgatggaagtcaaggaggcattggtgcccagagagggcaggctcaggttggaagcctggggtggcatgagggtgcaaaataagaggcacagacaggaggtactctagagaagatcacctctgatttcagaatttggcctttaggctagctttggaccaaaaagtaaaacaagcagaagtccactgcctgagtaggccagagcgagactccagtgatgcatgcatcttccaaacaactttgatgcaaagactcggccattcaaccctccccacgttgaatcatttctttccacttcaagcctgttgccaacttgggttgaagtctctcaactgataagagtaaagacagtggtttcgagatagggagataaggaaggagctgatgaaggcaagtgaagttatctttgccaccagggctaaggctgggacccagaggtatgaaaccagagggctgagtattatgtggggaccatccctgggcagagtccggaagatgggggtggaatccccgtttagtttgtttgcttcgggggttggcccttcagctcagctgatctttgctctaacaactgctatttcagcagtgctggatgccagggagagaaagaacaaagtacagatgagactggctttatttagttctagtatgtgaattaacaaacatttgtagaacatttactcttgtctctgcgaggcatgttctgagagcatcaccaacattagcccattgaatcctcataacaaccctaagaagctagtactattattatgccaactcacaggtgaggacactggggactcagggagataaagtcacttgcccaagatcacacagctagtgggtgccagagctgggattgaaactcaggctgattggctcccaagtcagtgtttcaaggctcagttcactgacagaaagacaggaccatgtttgtcctcaaaggctatcttcaggggtcttcccctgcaaaatcccatcagctctacctgcttgcttgcccttcaggatggctactgcagcaaacagaggaggcaggagtctttgagggggcattttccagtgctctggtctctgggaataatttcattaccagtcctggaaggggtgggagagaggagcctggggaaaaggctgcgggagcttcagcagttattgaatgacagcattctcatgttctccttgtccctggtctgtcctctgaggctgtgggctcctgccctctgcttttattcctgagaatgaagttcactgggccacctcactcattttgactctgccccttcagagactcccatgaaggtccgttttccctcttcaaaatggcctattttgtcattcttgaatggatggttgaaagttgctttacacttgatgtggacataagcagactgtaaatccattaaaaatagaaacaaaaggaatggtggccaggcatggtgacacgcacctgtggtctcagctactcagaaggctgaggctggagaatcacttgagcccgggaggctgaggttgcagtgaaccgagaacatgccactgcactccaccctgggcaacagaataagaccctgtttcaaaaataaaaatagaaacaaaaggaatgggcagtttgcctctggggcctccaggctaggtgagcatccatccccattgggtctgtttgtctctctaaagcattcctctctgggaaatcaccttcctcgaacccaaagagcaagggttctgtagagcatttactaggagctgccttgaagctgccctctgattcagctgggcgtgaagacaaggcaggcctcagcttctccatttccctcattgggagttgtgttgtttacgagtgactcacacttcagggtaaccaaatccctgttctagaagctacagcagaaacagcatttccagttcaccaaattagtcttctcagagcgcccaaactcccctttctgtgtcttcttccctattcagtggcatcccccaaaccctccagataggggcatctttgggctttcatttcctcccaggtgtgagtggctctaacagcctcggttccccagagtgcaggttcagaaaatgcaggggaatgggactccccagatcccaagggaagagctggcatcacttcttcagagtgggcactcctggggggactcatcccagctcaagaaagtaactctccagtcacaaccaactttcccaaggggtacagtgggacttgccaagcactacaagaagagaggacactggcttttccagtcagcttggaggaagagagggaggaaaaaaggagggggaggaagagcaaaaaggaggaggaggaggaaatggacaaggaggaaaaaaaaaaaaaggaggaggatgaggagggaaaaggaggaagaagaagaggaagtggaggagcccagaaaaggaggggaaggaggaaaaaggaggaggagaaggaaaacgaggaggaagaagaggtggggaggaaaaggagcagcagcaggaggcaaatctccatccccacagcaaaagcagtgctggagccagagcccagagtgtgggagctaatgggaatcagcttgctggagggaaggggaccgaattaaggaatggctggggctctgccgctgagagggggctgggaaaagcaggctgattgagaccagctgttgtgcctctgtctctgagatctttggactctgcccaggatagcctcacaccctatcctacacgactaggaacttgcacagtccgcctcgggcagcccaaagctcctctgcccaccctggctcccagagccctccaaaacaaaagaccagagaagcactctccacccagcagccagacgcctccttcttgacgccagcccccaccctctgtctgctcgagcccaggaaaggcctgaaggaagaggccggggaaagagccctccctctctcccttgtccctccatccacccagcgccggcatctggagaccctatggcccgggctcactggggctgctgcccctggctggtcctcctctgtggtatgtgcatcctagcttccactggaaggcagctctgacctctcccctctgagctcagaaagggttggagtgagggttggggcccgagtctctttttctgttgcttcctctctctgacttgaggaagagacacctcagggccagtgttgggggccctcataacttggatcgagtctggtttggcacctttccattccccccgttatagaaaaaaaatattctgacactcgttaaaacggtaaggaaaacttaatttaagactaccgcattgcaatagaggagagaaatggggctcaactctgattacagaaaagacttccagggatctgtagccaaggagcagagtgagggggtcagtggatggaaaagtattaagaggagatagcaagggtagggggattcttgctaaaccgactgaacagcattcttgctgacggcaggccagagtgatcagatatcaagggtgtctaaactgacttagcaagattcttgctaagactgggtgatgcaagcctggcaagggcaggacagacacagaaggccaaggtcaaggccaagtggagaagaggctttgggggagcctaactaaactttggtcaggaagagagtctttcctctttgtcattcctgcggcaccctctctgtcctcaactaggtgcccagcccagcgctcccaccctagccttcctttctttgttgtctgtcagcagggcctgatcagtcactcaatgtccagttcctgagcacctacccagtgccaggcc

SEQ ID NO: 12624 - DNA, 6000 bp, Homo sapiens; identical to SEQ ID NO: 3491

SEQ ID NO: 12625 - DNA, 6000 bp, Homo sapiens
aaaaaaaacttaaaacagaaccaccattcaacccagcaatcctaatattgggtatatatccaaaggaaaataaatcattctaccagaaagacacatgcactcatatgttctttgcagcactattcacaatggcaaagacatggaatcaatcaacctgggtgcccatcagcagtggattggataaagaaaatatggtacaccatggaatactatgcagccacaaaaaagaacaaaatcatgttcttcgctgcaacatggatgcagctggaggccattttcctaagtgaaataatacaggaacaacaaaaaaaaacccctcatgttctcacttataagtgggagcttaacattgggtactcagggacataaagatggcaattgggtagcctgcttactacctgggtgacaggattaatcataccccagccaaagttctttacaactctaatatcatatatttattcctttaaactgacctcccccttccaacttctcagtatgcaatggtatcatattcaactgaaaacatctcatccttacttcccattctcactgtcaattccctaaccaggcccttatcatcttctgtttagattactccaaaataccccaatttggctgacctgactctagtatctccccactcctatatatcatgcccagtgtatctttcttaaatgtggcttattttcatattttattcctttgttctaaaatttatttctaattcccagagcattaagtctaaattgcctgtcattcgagttattctccagcactatatattccaatcctctcttcaatatacctcttacataagacagtttgaatgtttcactctttgcagactccatgcacattgctaccaatccagatttccatgtgaattccttcatgtgaattatatatggttattcattttctgcccagatctcaattcctctttgaatccttacctatctaatttatttcaacatttgtaactccttcatcactttcacccatgccctagtctctttttcagtatgctctgttagatatactctcccttctttcaatatgtttttgagttaactgtcatatcagaaatgatctgaacaaccggttactacaaagcatggaaaggtgtattttattcattacaaaatcataactcagaggtttctaaaacagacttagtaaagaagatatttccaaggcagggtgacttttctggtgtccttcaaggttacttatttatttattgaaaatcaatggctttcagaaatagatgtgttgatctgtgctgagacaatatatccaaattcaactggaattgaattaatgtcagcaaggtgccttaaaaagagaaagaaggcattggattgggaaacaggagacctgtgttcactactaggcccaatgctgccacttactagctgtatgatcttggacaactcaatgaatctgtcaaaatatgttttctgaagagtacaccattaactaaggagctaagaaaacaaattttctgaagtgcactgctacaacaatctaacaagtttgtaaaagaagttgtctggcaatacatagtgagttttgtaatgtctcaacatcaaatttctgtatataattgtactatagtgatagcctatcaaaaatcacggaacttcgagttgtcttttagaaacaaaacagcttaaagaacaaataaagatattcatgtagatttccaaaaattggttatccattcattcaataagtattaatttagtgatcagtatgctaggccttggggatgtggcagtgaagacaaatataataaatattatatctgccctcaaagagatcactgtctaaattgggagacagacaattataataaagtgtgataagttctgcaatgatggtaagcacaaagggggcctctggagcacaaagaagaggacaaatctgttctaaactggtcttttgaagagagaggtgattaggcaaggcttttcctgcaataagtgactgctaggcctataggatattcaggaatattatcttagtcttattgggctactgtaacaaaatacctttgactagataacttataaacaacagaaatgtatttcttacagttgtaaaggctgggaagtccaagattaaggtgttaccagtgtctgggggagtccgacttcctcatagacagcaccttctcactgtgtcctcacatgatggaagtgccaaggcaggtcttcggggcctcttttataagagaactaatcccattcatgagggctccacatacattatttagtcacctcccaaaggccccacctcctaatattatcatattggtagataggtttcaacacaggaattttggagagacacaaatattcagaccatagcatttaccaaataatttttaaaagttagaacaaaaatccctgaagggatttgcagatggttggatactgtggtatagtggttaaaagtacaagctctggagtgagacagcctgagtcagcctgagttaaaatcctagatctgcaaactgccaactgtgtaaccttggacaagttacttaaggtctttggaccttggtttctcattttaaaaatcagtataattcattaatatgcctcataggtttgttgtgagaattaaataggttaaaacatgtaaaattcatagaacagcacctggcaaagagtaaacatgtcaccctgcccacttgaatgtcaattccaggagcgcaggaaatctagctgttgaattactagcctttagtgagtggcccatagcaggcatggttgaatgaatgaatgatcatcaatttaactttttttgtcatgggtatcatcctaagaggtaagaaggctgaataatcccaattgttttcattgttgccttaatataggcccacagagtaaaggagggaaaggaattaggcaacccagctattcaactttaaagctagactttaaaacataaaagggcttcaaattgaaatcatctcttgcctctcctatgggttacattagagcaagaacaatttcttaacattcatagctactattcatggggtgcttgctatatgccagagaggttaattgaattgcctcaagggaggtagctcccaggttgaggagcaaaaatttgaaccctgatctatttgacctgaatctagttagtacagtgcttgacacatagttaatgtgcaataaatatttgttgaataagtgtagatgaacctacagtgaatcacaaaagagaatttacaggagatttcctgactagaaattccaaatgggaaaagagagctggatttgtttagaaattacacacacgcacatacacaggcatgcacgcatgcacacacacatatacctacatacatgtcatcacaactgtttggagcaccttaaacacatacatacacacaggagcatgcagacccacacagccgtacttttttaaatctcattatttcttttgtcttcttaacacatctgagagagggtaaatgacagagtgtcagaggtagaaaggacgttagcaattacctaatcagatcccctcatgttaatgtaaaaattgacactctagaggggaagaaaattgctaaggtcacacaaggagtcagaataagattaagagtctcagtttcctgactcacacagtttgttttactctgaactgtcaccatttaccatctcaattttatagatgaggtaaccaaagcatcctaagaatgctgatggccaagctcctgccacttgtccattgaaataggacttgaaatcagatctcctttattttaaatataaagctgctgtcatccaagttcttctgtctggatgcccagaagaaagatcctttcctattgaattaaatagtggactgagggtaatttacagaaagctttgtccttggctttaagagaaaatgtccaaggctgctttattttcagtcccagggaggctgcatgaaggcaggaatccacaacacctagcacaaaggaaggtactcaataaatatttgttgttgaatgcatgccatgctaaagggaaagtaggttgggtaatggtttcccagtggcaatggatgggctgaaaaagtgggaacacatgaggaagaggtgggaggaacccttaaacaaaggagaagctctttctcttcatcttattgaagctgcaatcactcggcacaggctgagtagattggtagaaatgtgattggcaaagatatttaaatgagacctccttaaaattgttactctccaccccacccccacgttcctttaaattttgtttcagtcattacccagggaccggatacagagattcctatggggagttttaatgggtcgattcaatttcatctggatgacgccacttcgccaagcattaagagctacagctccgggaaagccaacgacacgcggggggaggggggagagaaagaaattataacgaggagcaataaatcccttctttcccatcctcccctataacccattcacaagacctccagaaatcatctacattcacaaaacggccagctagctaagctgaacacactgccaactcactccctgcccccactgcagattatataccaacacaccctgagccatataaataatcacacactggcggtatctattgctccgttgagataccctgtgtctacaactgcagtttctgctgcttcggttcatctgtcagattggaggagagggagaccaaggtggaggcggaggcggaggcgaaagaggagggggaggaggtaaaggaggaagaaggggaggagggaaaggggagggcaagaggaggggaaggaaaatactggagggggagggggaagagaaacaggaggaggaggagaagggggaggagaaagaggcggaggaggaggagaaagaagaggaggaggagaaagaggaggaggaggagagagaggaggaggaggagagagaggaggaggaggagaaagaggaggaggtgaacaacttaccctgctgagctttctttgggaaatacgtccatcaagatttagatctgcctgtaaaatctatacaaagtatatgccactacaggtttgactcgccccctcccccgtttttttgttttgttttgttttgttttgttttgttttgtgttttctctgctgtgtcaaagaacaagacagaactatctctgtttctggctccactgcctgccagtgaaggagttttcattcagactttccgaagagaggtggagaaacctaaagactgaggagaagagatcctttgagccagatggggcattagttcttctgcttttctcagcatggataaaccatttcctcaaggtaagccatagaaattagctctttaaaaacccagaattctttctatgcaatgcacagattgccattcattccagccatcctgtgctgtctctgtgtgcgtgtgtgtgccgcgcgcttgggcgcgcgcgcgcaagcgcatggataaaataaaatgaaaaccctttaaattatatttaaataaatcggctctcgcagaaaactatccacattggaaatgtgtaaatccaaataggacttcaaaataatatttttctaggcgaatgtcaatttaatttctagcctgttaacctttaaatgcattttggtacttgcctaaacccctcaaaacgcagcctaaccacccaagctgaggacagagagagagcccgtgctaaggccagtctggctgcccagcgggcatcctgtcagcatggggctagcctctgctattggctcacaagtctgggctgtgcatcgttcagatttcatcacatcaccttgccctgggtagacatggcgcaagctgacacggcagaaccccccacttacattgagtcagagcagtgatttagaaatctctgtatccgtgcctgggtacgtgtgcacatgtctctgtgtggcatatggagattctgtcaaaagtgagaacctgtgagcacgtctagttagccaataggcatttgataagacctaggg

SEQ ID NO: 12626 - DNA, 6000 bp, Homo sapiens
gtagagactctgagaaccagggaagaagccagagctttgtcagcagaactcaagggcattgtgggactgtgggaacatgactcccctgcagaggcgagcgagtgtgagaaaggaagggttcgagccaccaggcctccgctccacaagagaggagggggtgccaggcattgggggcccatgttcaccctgtgggacgcttcccacgtcctgttttcttgtcgctcacgaagaggatgtttaacttttagcaaagaaacttgcttcctccagcaggaccgggggtttgggggacaggagccaggctctgaactctccaggctcttcccgaagtagggtgtcggcctgcagctcccacccggcaccccactgagtgtaaaggtgtccttcccttggcctcctggaggggtcaaggaagggggagctgccaggccagctctttcccggtgggggcatcttagcagtgtgagggaacgaggggggtggcccaggggcaggggactaggactttgctgcccaggggctgctttgaggaaaggaagtgactggaaagagttactccgtggggagcctgcatgaaaggacagattggaatcccatatgcagcccagcaagtgggactttgctttcgcagagaagaaatcattaattcctcccacaaatatgtattgagcaataactatgtgtaaagcattgtcttaagtgctctgcctgtgttaattaattcaattgtctcgatagcccaatgagttaggcgttattaggcccttgaggaagctgagactcagtgaggtttaggaatttgcttgtttagccacacagctaataagtggcagagctgagaaagcttttgctgttaactgcttcactgtgtccctccctcccctggatgctaccgggaagtgagctgttttcatcaaatgtctccttagaactgatgataacccaaagtgacttttaacagatttcacgggactcccatgtgtcacacaagggtctggtttactgaaccaacagaaaccttaaatgaccctgagaaggagccctactttgatgaactaacaaagtgttcttatccctggcacagcctcaaggcctcggtcctgcttaaagacatctgttccttctaaagcaaattcctctaagcagccagatcacacattccctttgttttcccgctgccataccggcttatgttgagcacctgctatctgcagtgccctgaaacttagcagagctgtcgggttctcagagctggatggaggttcatctctcccgtagaagagttcctttggcagaaataaaagtaatgataataatacgacattagataagtggcctttgttgagcgcctgctgtgtgcctggtagccctgtgttggtccatgttggaaggccagtagaggcaggccctgggagggaaggggagcaatcagagcaggaggctgtggcagggaggcggcgaatggatgcagaggggaggggggttgtcttttttttttttttttaaatccaaataaagtatgctagttatttggacgggacacttcagacttgaaatatggatacctgcatcccccccaccccccgacctttagccatctgggtcaaagcctctagtgacaggtgtctctttccctggccagctggtagcacagatgtgtaatggctctgggtgggggaggggtatgaggggagagagaaatcagagtagataggaaaggagacagaggctggaggaggttgggcaggagtgtgtgcgcacgtgtgtgtgaatatgctgagtgtatctcacctgcccgttctcagccacagccacacgtatgtgagctgtgcctgcgtcttcctatgtaacttgcctggtgctgcgttctgtctatggccgcctgccaaacttgtgcttttttttttttttttttttgagatggagtctcactctgtcgcttgggccggagtgcagtggcgcgatcttggctcactgcaacctccgccttccaggttcaagcaattctcttgcctcagcctcccgagtagctgggattacaggaacccgccaccacgcccagctaattttttttgtatttttagtagagacggggtttcgccacgttggccaggctggtctcgaactactgacctcatgattcactcaccttggcctcccaaagtgctgggattacaggcatgaaccactgcacccggcccaactcataccttttttttttttttttttttggcaaccgtgtgcattggtactgtctgtcggtgcagttcatctatatgttgttgtgtgtgtgtgttgcttgggtgtttgtctcctttgtaatggtcgtgggtgacaagtgtgtcagagtacttgtccctcctatatgtgtatctatgcgcacgtatctttctttgtgtgtctgctgctgtatttgtgtctcttcttagcgagtggctgcaggtatgtgtgccctcggggtgtttcttctggtgccatggtatgagtactatctggttctcttgttttttccttgtgtagctttcagtgtggtttctggattttttctttgcaacgatagtaagcgtactctgcattcctgtgctttgtgtttgtgtgcaggtatatgctttccctatatgtttcttttctgacttgatttgtgactagctgtgtgtgtacacggctgtgtgcagccatttgctgaaatgcagttgtgtgtgtgtgtgtgtgtgagagagagagagagaggagagagagagagaaggagactatggcttttctgtttgtacaaaaatcatgtcagcctatgagtgcctctctctgtgactggagctgtatgtggttacatgtggtcacaagtgcacattcaagttcacatacacagagatatcattttagggcttgaacctggaagtttgcctccagggtcatctgaacctggattcaggttcagatccagggccatctgaacctggatcgtgtgtgtgggaaagacccaggacccacacacaatgtcatcagctgtgtgtaattgtgtgctctgtgtgtggctgtgaatctgtgtgtgtgatttgcctgttgattgtctttggcatggctgtgggtccacgggcggtgaggttcaggagtctcgagtgtctggaaatcggcacaagcctatccctgtgttagtctgtgctctctgtgagcggctctgagcctgtcggtattgatagctgtaagactatcgtcactctgtgtggccacgtgtgtgactgtcccatgagccattgctcttaacgtgcagtggtgagtctgtgtgtgttcatgtctgtcagtctttattctcttgtgtggctgtgagtctttgtgcacctctgtgagtgatggcgagttggcccccgtatctgagccccttgatggggctgtgatgggtcctgttgtgtagctgcgattcctgagtgtgcaggagtctctctcccgctgtggggaagtaaacgccccatcccttgtcctcctccaactgtgggtggggtgagggcatctaggccagctttgaagccccagccagctcctggcctttccgggaattctgtgttccctgtcgggggtgggcaggcgggcgaggggcccagacagaggcctcttgtccacctgggcttcaagcagcccagtcgaggtggtcccagaccccaagtccaccctgcctgacatcctgtagcggacacgtggcttgcctgggacaggcatgcctgtcatatgcctggaggggagtgaacagacggactcccatagaagacagacggacagacagatagtgggacttctcagggcttggacaagccccaccccacgcttggggtggggtccaggactacagtgcccgcccagtttgcggacagtgtgagttcacagtccacattccccacccagccacaaatgccctccctgcctccctctgggggcccccaagatctagggtcctctcgtgcctaggctgtctgcctgaggtctgcctggaatagcctggctactacccctgcacctgttcccctgctgtccccaggcctctctgcctgaatctgcctctctctgcctcttttctcctgtccctccaggagtctctctgcctcaaccactctctctgccccttcatctctctgagctggtgtgtctggtcctaccctctgtttggggagctgtctggctctgtcccccacctcttggccagcctgtgtctcctgtctatgactgagcccaattgcctgttgcctttctgcaggtgtttccacgagcctatccctacccacctgtttgtttctgagtctgcctgtgtgtccctttctccctgtctctgcctgtcttccaagctcccctagcatcccctcctcccgcccatctgtctttctgtcccttctgtggtctgtctgttcctgtgctgtttctcatgcctgctttctttgtaacttcagttctcctactctctctctgtctcctctctgcacctttttctgccatccatcccatcctgctgtccgtctgctctgtgagtccatcccctctgtctgcctgtcactctctctagctgtgggtctacaccctcaatctttcaggccatttcccccaccatcaacacacaaacaaaccgctgtctccctccaagtgggtccagatagggggcgccccttctccacctcttcccccgcccagggccagaaggagggaaacgaaattaaaattaacatttcttctcaggaaaaaaaaaaaagtaccgctccagagcaggagcctaggcagccgagagggtgcccgaacctgagtctgagttgcggccacttcaggagctgagaggagcaggtaggtgaggagggagcgtgggctgcggggatggtgttcctgggggcctgagatatgagtaggggtcctgggagggggctcggggttccttggagacattttagcactagtggggaatggaatggcgtgtatggggaggtcctttttgtaccctgatcccaggaagtgaattcaggtgtgggtgggaggctccggagggtgctggtggtgggggatgggactccttgagaccctccctgtcccaggaacgggattcaggacttgggaaaaggatttcctgagccagtttgagctctaatggggaccttgaatgggggtttctgagatacctccttcccaaggagtaagcgcgggagggagctggggtttcttcagagacgctgtacctacaagacaggggctccaggctcgggtggggattgcagagacacccccaccccaggaaactcggtaggccacgggagggggtctttgatgaaggtctcagaaatagctcttcctccggaggggaaatgagggctcgggccaggttcctgagacaccccacaccccacacctaggaagtttctcaagtctggcagtgtctccaaattgacttctgccagaagatgagtgtttaagacttgctaggggccctggaaaagacctctaggccctagaattggggtcaaatgggagtccctgggtcatttctgtccctgggaaggggctcggttcgggcacttgtctttggcttctagtgaggatattcagagtcgtggcagagagcagtttgcagcgtctggggcaggggtctccgagtctgtccccaaccctcagctcactcaacaggttgcattagctctggtctcgggcttgggggcccaggcgggaaggaggggggtgagggcattaggaggggtggggcagccaggccgacacgtgtccctgcaaggagtgagccgcctggccacgcggtgagggtggagggaaggagagggggtggcgcgggggaccggggaatgaaagacacagatggcaagagagacagcgtgagtctggggtctgggaggagaggctatcccttctccacgtggtcggctcatctgcgctggggtccggctctctctgtagctttctgtctctctcttccccactatttctctctcactggctctctctgtgtctctctgagtaactaac

SEQ ID NO: 12627 - DNA, 6000 bp, Homo sapiens
agaggattgagagtcctaaatttgcattactttcttatttctaaatattaacttccatcctcacctgcctgtctggtattttgtattgttctaagccattttttccctatcactcaagaatgccctcttttctgattatgaaaaaaaaaattataagggtatttttatttcttttcccttcaccatggcttctagggtaaagctatttcatcagctttttaatgattatgtgctgactacatactgaaatagtctgtatttttactccactagtgacttaaaagtacaaataattgtttcctggcctcatatcttttaaaattttattttctcaatttgttctcatagtccaatggtggtcatcccctgggtatagatttgatgtcaccgtcttttatggtaactgctgtgatcttctcgtatatgccattcacatgtgctttgaatatgctcttatataaatcatgacatatactggttgattaaaaaaaaaattaatcaagaattaaaataagtataaagcaatttcatatatgggggtgaatcttttcatttattttccaataacatagggaagggagttcaactccaacctctttgcgatttcagaaaacaaaattcaatttgctaagtattggttaagtataaattcttggtcccaccctaagtacacagagtcagaaagactgcggatgaggcccagtaatctgttttatttagatgattctgatgcatttttaagtttgaaagccactgggttagcttttcttctgattatgaattcatttagtaaatattaattgagtgccagttttgtgccaggcactgtgaacaaaatggatgtggtctttgccctcgtgaagcttacaatttaggaggactgacctctaattaaatttatttggtttaaatcaaagactcataatggcctatgatttcagatttctcaagctgaagagatttaggctagacaattaccaaacaaaaaatggaaaattattcgaaacaatattagtatttaggttaacctaaatcaaataccctgtaatgaactaataagacttggccaactctatcatatccacactaacataggacaggggtatagaagaaaatttaaaaactcaaaatgattgatatttggctttggaaaacagtctgaattgtactttatcagatctataccctttctggtttgacctcacaatcaacagcctaggatcttggtggtataaacaagacaatgaagataattaaatggcagttcatctactcaatagatcagtgcgatagtcacttgccagtagaaatgtttgggggctcttttcttttttacattgcattggttggtgatttaggcatttggcccaaattaaaacgtgagaagttattttctcagaaaatatttctattatcttctatcttatatttatttctgaatttaaactgttaaccactttgcccaatgtattttatcctttacttagtataagtttttcaaagttcattatgttttagcatgtatcaaaagtttatttttttcattgctgaataatatcctactaaattaatgtaccacattttatttatccattcatcagttgatggacacctggattgtttccactttttggctgctatgaataattctacaatgaaccttcatgcacaagtttttgtatggacatatgttttcacttctcttggatatatatctaggagtggaagtcctgggtcatatggtaactatgtgtcgcattctgaagaactgccagacatgtccaaaagggctgcaccattttacattcccaccagcagagtatgagagttccaatttctttacatcttcaccaacccttacaattgtcttttttattatagccatcctgatgggtgtgaactggtatctcgtagtggttttgatttgcattgccctaatagctaatgatactgagtgtcttttcatgtgcccaatggccatttgtttatcttctttagagaaatgtcaattcacatttgtacctattttaattttttttgtctttttattgttgagttgcaaggattctttatatattctggatacaagtcccttttaagatataaaatttgcaaatatttctcccatcctgtgggttgtcttttcactcaataccattaagtattcttcaaacaacaaaaatttttgatttccacaaagtccaatttgtctattttttcttttgttaatcatgatgtttttggtgtcatatctaagaaggctttgcctaacccaaggtcacaaagatttattcctatttgtgttctaagggttttatagagttagctgttttatttaggtctatgattatgtatggagggatccccaagatcaccctcagatttaatgattcactaggaagactcatagatctcagcatatagtcatactcactgctacggtttattacacctaaagggtacaagatgcattgggcacagtgtaactacagtcaacaataatttattgtacattttaaaataataaaaagtataattggattgtttgtaacacaaaggaaggataattgcttgagataatggataccccatttaccctgatgtggttattatgcattgtatgcctgtaacaaaatgtctcatatacctcataaatatataaacctactatgtacctacaaaagttaaaaaaaatttaaaagagtcattggtcaaagtctagggaaaacagacacaagcttccagagtactctgtcagtagagtcaccctgcaatgagttgtgacaagatgtcattgccaaccaaggaacctaataaagactcagcacccattgttcttgttgagggctggtcacgtaaacagcctctgtctggcgtgtatcaaaactctggactcccagaaagaaagcaaacgttcaacataaaccatagcgtttgtacagtttaggcatggtaagccactgttattagttctgggaatggtgagaactctcccagaatccaagtttctaagtttctaaatgccagccaagggccaaccttgtaagcaagcctttccaagaatagcagttctggcctactgtcttaactcttttctgcacaatgggcttaatttttgtgtgtggtataaggtagagttcaacttcattcttttgcatgtggatgtcactgttccagcaccatttgttgaaaaggctatttttccctcatttaattatcttggcgtccttgttgaaaattaattgaccaaaatataatggtttatttttgaactccctgttctattccatcgatctatatgtccatcctataccaatatgacacagttttgatagttttgtagttttgatagctttagagtaaattttgaaatcaggaagtgtgagctctccaacttcagtcttctttttaaatatgaatgttaggatcagcttgtcagtttctgcaaagatcccagctggtatgttgatagagattgtgttcagtctgtacatcagtttttgaaatattgccatcttaatgatgttaagtcttctgacccatgaatatggaactatatttcaatttatttaggtctttaatttttttcaacatgttttatagttttcagagtatttgttttggacttcttttgttaaatttattcctacatattttgttattcttaacgttattttttaatggaattgttttcttaattttattttaatattgttcattgctgctgtttacaaatacaactaatttttttattatagtaagacatttaacatgagatctatcctttaaaaaatttttaagtgtacaatatagtatcattaactataggcttgatgttgtacagtagatctctagaacgttttcatcttacataactgaaactttatacccattgaatagcaagttcccattttcccctctacccagcccctgacaactaccgttctactctctgcttctatgagtttggctgtttcagatacattacataactggaatcatacagaatttgttcttctgtgactggcttatttctcatagcatagtatcctgcaggttcatcgacactgtcatattttgcaaaatttccttcgtttttaaagtctgaataatattccattttatgtattaccagattttcttttgccattcagttgttaatatatatttaggttgttttcatatcttgactattgtgaataatgctgcatttgaacatgggcatgcaaatatctcttcaagattctgacttcaattcttttggataaatatccagaagtgggattgctgaatcatatggtagttctatttttaatttttgaggaacctccataatgtgttccatagcggctgcagcattttacattcccagcaacagtgtacaagggtcctaatgtcttcacattctcaccaatacctgttatctttgggtgtttttttaaccacggtcatcctaacaggtgtgaggtgatagctcattgtggtttgatccgcatttccatgatgattagtgatgttgagcatctttacatgtgtgtggtggctatttgtatatcatctttggtgaaatgtctactcaagtaaaatttaattgatttttgttattgatcttatatcatgaaacttcactgaactcatttattagttgtagttgcttgttagtgaattccttagaatttctatatacaagatcatgtcatctgcaaatagtttttacctcttcttttccaatctggatgccttttatttcttttcttacttaatctccctggttcaggccccccataaaatgttgaatacaagtgataagagtggacattcttgtcttgttctgatcttcggggggaagccttcagtcttcaaccactcattatgatgttagctgtgggttgttgtaggaaaaaaatctaaacttttattagattgaggaggttcccttctgttcctagtttgttgagtgtttttatcatgaaggtgtgtcgaattttgttatgtgtttttttctgtatctattaagatgatgcgttttttatcttttattctgttgatgtagtgtattacattaattgatgttcagatgttaaaacagccttgaatttctggaatcagtcccacttcatgttgtataatccttttagtatatcactgaatttggttttctagtatttcctggaggattttcgcatctatattcataaaggatattggactgtagttttctggtgacatctttgtctgattttggtatctgggtaatattggcctcatagaatgacttgggaagtgttcccttctcttttctggaagagattgtgaagagctagtaataattcctctttaaatgttttgtagaattaaccagttaatccatctgtgcatgggctttactactatgtgggaacgtttgtttatttgtttgtttgttcgtttgagacagagtctaacgatatcacccaaggtggtctcaaactccggggctcatgcaatccttccgcctcagcctcccgagtagctgggaatacaggcacaagccatatgcccatgcaccacgagccaagaacccatactttgaaggaagttttgtacttactaatttgatatatttgtttgtaatagttctattaagatgttatctttctttatgagttggtttgggtagtttgtgtctttctaggaatttgtctgtttcattgagattatgtaatttgtccgcatatggctgcggatggtatgcccttataatcctttttctttctgaaggtcagaattgaggtctttatttcccctttttttcttggtctttctatctaatgatttgtctattttgttgatattttcataggaaaaaattggggattcatatgctttccctattgtgtttctagtctctatttcatttctttccactctaatccttattatttccttccttctgcttgctttcaatttagcttgctcttctttctttattgtcttcaaatggaaagtttgtttattgat

SEQ ID NO: 12628 - DNA, 6000 bp, Homo sapiens
aagggcatctcctctcatctcatggctccaagtgcttgctagtgggtcccctttgccctgagcacctgttgatatcctttgcccatgttcttcttgagttgtttgtgtctgtgttttcttgttgttttgtaggaattctttgcatattctggaaaacccattatgaggtccatgcattgtaaggctctcctctgagcccgcctttttactgtgtttagggtgtcttttgtcgtctagaagttttacatctcttccattattgcttccccatttgaaatattgagaatttcgtctctatcccacaccataaagatattgttctcttgttttgctttgtccctgtaggtctttgatccaattggaattgcttggccagggcttggactaggtcttctgtcttggtggggcgagctcccagggtgtggaaacgtttgcaggtggggcaggagggagagtctggtgggaagcaagcctggggttggccatgttgagtgtttgtgccttttagagactggagtggtcgagtaggcaatccgagggttggggcattacaggggtggctttaccagtgtgctacctcaggatggttgggggtggggcggggaggcaaggctctgagcaggactggaagagctgctgtcatcagaagggccacagtgtggctccttaccatgtgcctggccctatacctctttgctcatggccccatattttcccaccttgttggtagcccttagcccttccccagaggggagctcatttcttccttgggggtccagcatgaccgatgaggaggagagagagagagagcgagaaggcttcaggagcccgtggcttccacccaaatacctgcctggctgtcacaggcgatcactctggttgctgctgatccgaggtgctgaggctgtgcccacgcccatccccctcttgacatcccagcctccgccagcccgcccagcaagcgctcctcagtttccatagcaacactgctgctcggtaatgattccgggtagaaaggcattcgtgcgttctctgtcatctctgtcacctgagcatcccactgcctgcttgctgtcctgccccgggagttcaggaagaaaccctgaggacagctccgagcccttctgcttgtgtgttggcttctcctcaagggcagtggtaaggtggtaaatgttcccagacaaaaagccctgatttggagcatttgccgatttccctggtgtaaatgctgccactatagccgatttcaagccaccactgcgatgtcactgaacttggagttgggggaatgcacacatagtatttccatctcccataccagatgtgaataaccccaaaagcacagatgacagaaaagtgtagtaagataattagacagtgatgtgttccgaggatttattgcctttgttgttaatatcattcagttacctgtacatttctacggttaaaataccaataatcgctgtgtttgacaactggcttccaaatttcccagcttcagttggctctagccactgctgctgagagtgtcgaggccattccatcatgtccctttgtctacagccttcctgaacccacactctgctgccgcccaccctcttccatcctgcctttctaactgtagcctctccaccaagcacagcatgccctgtcctgactgacattcttacggtcttccaacaaataccttcttggctgaaagctgtttcctttatagtatttgatccagaaattccacctcaagaaattttctccaccttgacaaccactggttacacaaagatttaagtatgaaaaatgtataaaatggaccccagaatgtgtctttgccacattctttataataaaaaatcaaagccacccttactgatgtgatgatgaacatgatggtccactggtgtgttggtgtggatggaccttaaggggcctgcagctgcaaaatggcacacatagaaaacagactggaaggaaacaggccgcatggccaggtgcggtggctcatgcctataatcccagcactttgggaggctgaggcaggaggattacttgaggtcaggagtttgagaccatcctggccaacatagtgaaaccccatctctactaaaaatacaaaaattatccaggcgtggtggtgggtgcctgtaatcctagctattggggaggctgaggcaggagaatcacttgaacccaggaggcagaggttgcagtgagccaagattatgccactgcacttcagcctggatgacagagcaagactctgtctaaaaaaaaaaaaacaacagctgggtgtggtggcacacacctgtagtcccagctacttgggaggctgaggcaggagaattgcttgagcccaggaggtggaggttgcagtgagccaagatcgtgccactgcaccccagcctgggcaacagagcaagactccatctcaacaaaaaaaagcccccaaaaaacaaaaaaatgaactgtgtttcttttataatcggacaaaactgattttgacaaaaagctcttttcagaatatgaaaattttggggagaagggagacatagaaaacttcaatgattatctacaaggacatagtcaaatagaaaaaaagtaatgcaggagccgctgctgaggccacaggggttccgaggacaagctgggctctcctcagatagctgtcttcccgaaaagactcgtacagcggtggttctactgtatcgcgggcactaagacaagattttgccgtcagaattgacatctctgtgagaaacccggggtgggaggtgccgccgtgagaatgcaggacagagagttcttctaaacttgctaatattcgcacaactcggaaaagcagagggctccgtgcaggcgcagccacctgcgcccatgcccagggcccttctgccctctcatctggcacaagctcccagcctgctccatccctaggcggactctgggtctcctcgccctgccctctctgtgctgactgggggctttgcttccaactgcaaaccagcctccctgggtcttttcttggccctgttccctttgcctgatggaggccaggtgtcccctgctccagaagccttccccgcctcccaccgaggcgtgcatggccagccgtgtgctcccttagctgtgggtaaggtctgtccccacgctcacctgcggggcatagccatttgggcataatgctagtgtgtagcctccccaggcccagaacagcccttccataagccgctgagcccatgaggagaccctgcacgcctgcctcgagctgcctcctcctagaagtgcttcctgctgacccttgctggccccatggcacgtgccctgaattctggtggagtctgttcagtccttcttggtccttagtcattcgtcccttctctacttgcctcccttccccaaggaggacttgaaggtcgcagcatactgtcccagggtgctgcggaagcagccttcgaccttgtgggcactgcttgccccaccacctgcgctgtgcgtaatgggcttccttctgctacccttcattgtccttccttcacccctacagcatcccgcagagctgcttaggtcctacttccgccttgggccctggcccgcgatggcctcctcctccctgacccctccttctggccaccgggcagcctgtcctggctcatgaccttgactcagtgccacaaccttgctgagcttgctgacatggtttcctcatctgcaataatggcatctccctcaaggttgttgggggttaggattttgtggagacccacatcaggggtctttcccagaatgtagcacatggcacgtgcccaaaaaacagtagtggcatttttttttctttgagacggagtctcgctctgtcgcccaagctggagtacagtggtgcgatctcggctcactgcaagctccgcctcctgggttcatgccattttcctgcctcagcctcccgaggagctgggactacaggcgcccaccaccacgcccggctaattttttgtatttttagtagagatggggtttcactgtgtttagccaggatggtctcgatctcctgacctcgtgatctgcccgcctaggcctcccaaagtgctgggattacaggcgtgagccaccgcacccggcctagtggtggctttataaggaccactttcttggcacctcttttaggctactttgcagttccagggggcttcttgtacatcaaggccttttctcttgggcaagtcagttgtcactgtgaggacacaacactgtatctttaggcatcttcctacttgtcccccaacctgaccctggccctccctagtgagtagacatttgttgagagactcggctcatctgaagagtcaaggtcatcctcttgcttgatgctgaatgagcacaacacagatgctcactgagtgttggctgttatggtccagtcattgccaaggaactcaatgggatcttcatgctagctctggcctcagtgccgccctagaaagaagtgggtccggatggggagaggccaggagagctcaagcagtgtctggaggacgttgtagggcggtatcacagcctccagacccagtgcacagaggctgggtcccccagtccttggtgtgacttggtgatccccagctggccttcagtgggatgaaggctgagcagtggggcttgcctgggaacaggggcaccaaaggtagccagggctgcagacagcagattccttgcttgagtggcttggggtgctggttgtcagcccaggtcctgccagctagggcctctgccttgacctcagaggggaggagcaagcctttgagggttcttacggaggcgtgtctctgccgcaggtgaacgggaaggagctctccaagctgtctcaggagcaaactctgcaggccctgcgctcctccaaggagcccctggtgatccaggtgctgagacgcagcccccgcctccggggggacagctcctgtcacgacctgcagctggtggacagtggcactcagaccgacatcaccttcgagcatatcatggcgctgggcaagctgcgtccgcccaccccgcccatggtcatcctggagccgtacgtcctctctgagctgtgagtcgccctcaggagggccccgggccctgcctccagagaggacaggccacctggagcggccatccgcacgccaccctctcgggcaggaagcaggcccctcggcctccagaactgaccgtggtacccaagggctccaaaacctccaggcctctagccttgggccgggctccagcaggcgccccgttgtatctacccccagggccgagggaggaccctcctgtccgggacgtcgctgccggaagtgccagggttgagggcctcagctcctcctcctccatcctctctcctctgccgcctcacaagcatcactccttgaatcttcttgcatcccttgtctgtctcattcctctacctgctctgaatttcctccatctcttcagcttctttctttggcccgaccggaagaagggcctttcatccaggcctggtggctcatgaccgcgtgagcgctgcctcattctgctaatcttagcccgggctgcggggaggtaggccacagggccatgagcagccaaccttagttttggggccaggagggcagcccctggaggtagggtgggcccccctctgctctgcagaagtcctccagggcctggataactcctgggggcgttgcatgagtggggccagtgctgggcgggcgggtgggcacccggagattggagaagttggtccctgccagctggcgtggttggaggagttctggtctgggggacgggaacgctagaggcatgcgcaggtcctctgcgtggacgctgcacactcaggtgcgagaagtgcccccggtctttgcatggctgcatgttgcccaggaaggggctctgcaggaggcaactgggccacccacccttgagagcacaagcagagcaggcctccgtgccaggcacgctgggatcggcctgcctgggagctggggctga

SEQ ID NO: 12629 - DNA, 6000 bp, Homo sapiens
acactcacttccatgaagctaattataattatcattcttcacctctgcatgctgcaaaccaagttggatgaacagaaaacagaccttgaactcttaagcagaaaatctattttgaaatggaaactattgttgcttttctggtaatattaaaacctcactgtatcatgatgtgttatcacatgaatttggatataccaggtgttaaatcatgttcccaaaaagtcggctgcattcataaatacaaataaggcacaggctagccgtttatccacaatgaaatattggtcttgctctccttgcctctaaacaaacatatacaaagacattactataacattctatatatttgtctctttgtgttctgtttttaggtctctctagctgtgaaacagtctagatagtgatctgagtgacttagatttgaagatatttattaagagttgaggagttgagtagtgaggaagtaaagaacctaaaggaaaggacactaattcttccttaaagacttttgaaacagagaaatgcaaccaacaaacccaacataaaatttagagcatctggacaagaaaggcctttaaaaaccctccttttattttgcagatgaagaaactgaggaccagaacggaggtcatttgcctacagccacgcagcaaagtagagctaccattaggactagaccttaaatttcttgtgtcatataaaaggatttgagtttttaaaaaaaaaatcctacttcttagatgaacaaccagcttcttcttacaattttcctcaggattagatgtgaattcatttggtattacaaattttccctgtatcattcatcactaaaagacctatatcttttaacattcaaggtcttaaaactgcaagactccctggtttgaaataaactgctatgagtcttaatgaaaccattaaagtaatgaataggactagggtagcaaagtgacaagttaagagttaaatgtggtgagaacctggcagctccaacaagatgtatgcggtaggagggaggcccagtcagtggcagagaggttagtaatgtaaactatatacaacttggtatttgtaaggggggagtgctttgatagagatgcaaatgctttttgcacagagagggatttttagagagcagactttggaacagtagaactaagaaaacatataaagccaaagcagaaattccccctatgtttgctttcagttattctgagtaggagtgtatataacagcagagcatagaaaaaagcaacacacctaagagccgttacacagtagggtacaaaacagcattgaacccgtgagactgggagaaaacaagagccaggatctcctcttcctcactccactcttctttgaaatcaacgttgagtcatactgtatcggaaaggatttaccatagaaatcagaactgtcttgcggtgttagcatagaagggctttagataggaaagttttcaactttattctcaacatggcagattttaggttccagggagaaaatacattttctttcattaacaaacattagcatttcttgaatgggcttagctttctagtccctaaattggcataagaaaagaaatttttttcaggttgaacatggcaaattcagggctacagaaaaactgtttagaaagctatgagcacctggccagagagactgtgatgggagtgggtttacaatgcatcattcattactgcagaggcactacgtgacaaaaatcactagatcccatcaatgtgcagccaagacctgtaatcacctttgctcttatttaataatatgtgatgtgtacattctctctctctctctctctctctctctcatttgatagactatggaattggccaactgcacagtttcttaactgttgctgctcacaatgaatggctctttagtgggtggatttctgaatcataaacattcacgtagtggtactttttcatctagcctatgtgctacagcagtgtcttgcctgttcctttctcaacatatttttccctcttaccttcctgtacagtatctatttcagttcatcctgttagccagatcagattcagcatgtccagaatggcaaacaatttattgtcattcaatccttaaatcctactcaacactctgattttattcaggtcctactgtccacttactgcaggtctcccacattagatcccagagtccatttgaataaaagattctacagagcaggaagaaaccttctaagttcatcctgtcagttcccttacttgtaggcaagacagtgcatcattatttcagactgaaataatgcccacagcttcttttaatcatccaaccaagcatctcaatttatcagtcttgcagaaatcgaatcaatattgaaatacagcttttcaacctaaacaccatgtacccttctgctccccagacaggatcccctttgaacataattctcattattgtttctgagtcatttatattatgacctagattcctcccagattagctttcaaccttctgggcatgtccctgaggttcctagtgacatccctagaatcctgtctttggaatctcacctgtttatctcctgtaactttgagaccttgtataacttcctttaaattattgcttcctggaattttcaatatgttttgaatctagtttcctttgggaaatcaattagtctaaactgcattcagcatgtatattattgttcttacagtacaaaggacttgcagggctccacatattctttagccgatcaatgggacataaatctatttctcataaatttgtcaaaagactcctcccagtcccaagttcctacatctacataccctccaagccaaatgaacaatgtgtccttttttatttgggtgtctacatgaaagctgccagttcctttccaatgctgagactatgaatctataaagatacagcaaaggtagaggtggcaggttgcatgagcctttgagtgcaagtaaataaaggaaacatacattttgcttttgaatgccccaataagtaagggcacattgcccaccttaccctcaaggacttgaagatgtagaagatacggatgaaaagaaatattttataaaattgtgtagttatagaaagaaatacagaccataatggctcaaggtccttcaagatcaccttgttcacatcacatatccttcagtttcacatagatagtgaaactgaggcccaaagaaagcaagtgatttgacaaaagtgacataaatatttgagtctgagagtttccataatatttatttgcattctcttatgctgcatttatttaacaccaaaacaactagttaaaaagtgaaatttttgtcagactggttctttgatgtgatatgccaaaaaggttatttgtaaccaaattaaatcttttcaagtaatgagcagatgtaaattcagcttatcaggtttgcatgaggatatagcctcaaaagtcaactgagtctggtcatattattagccactgagtcctttatgaactgcatccttgtttttcctgttattgagctttgggcccatttcagtgtcatgtttgcttgcttatggaaacgtaatcaagcaccatcctctctcacttgttcatttctattactcattcaagctatccatcacatacagtagtgtgagtaattgatctattttgagaaggcctgaaatctgatggatctcaaatatatactttattcatgctagtgttttgctacgtcctaatgcctccaggatgtttcctggatttgtgtttaggtttcttcatgtacacctttttgactcttcagtcttctaggtggtgcaatacagcagtctgctatttgtacagtattttccccatggtcatcattatcagttctaggcttggtaaaatccttcagggaatgaccaaccacctcttcctgactgtagtacaatggaaatgcaagcatatgctttctagacattcaacttagcttaaatatggtataagaatatcactttcctttaagaaagtcagtttattgtgtaaggtagtgatagagaaaagaagtccaagcagattctgcttggtaagtctcatcaatatggaggtgacttaggatagtaataggtataattacagatgatttttgaaataattcaggacttgtcttctatagttccttgatccccagtattactcccacgtgtacaaaagtttgattctggagcctccattccatttaaaaagaatcacttccttagtaagttaaagcagccagtaaggtgaagagaactgcaagatgattagtcttggtttccttatactcttgggaagcctttttttttcctactacactgcagacagcttaattcctaccttctgtgtgtttgctgtatctctgcctttattgcattctccttgcttgcctgtattcactgaatcaagtaatgtcctttcttatctgtttatttctgcttatcacaaattcacactgaaaagataattttgattggatatatatatatatatatatatatatatatatatgagcaacttctcatgggagacttttgaggctttctcttttccttcagcattgcttcagaaaatagcctttgcagttaatattaggttccatttgtattagaattctgatgcccaaggcttggatgtctctgctagcaaatacctgaatgagctagctgctcctgtgaaactaggcatttgatggaatacaaaaagaatcaactatctgatatttgttcccaaacttctttatagtctggaggggatgatgagatttgcctataaagaagtaagtgaggttaattacagaataaaggtgtagcatgaagattactgtaaagtaattgaaggtagtggtggtgatagggcctgagctttgttggtttcttgcaaagtacttatgcctgtgtgttctcatttactgtttttatgccttctctcctaggattttctcatgtgccctgaaatccatgtaactacaagggctcctctttatcaccataagtgccaccctgacttaaaaccactcagagctaaaaaatcaaggcaaaatggatgctgcggtgacagatgattttcaacaaattctgcctattgaacagctgcgctctactcatgctagcaatgactacgtggaacggcctccagccccctgtaaacaggccctctccagcccttcccttattgtgcaaacccacaagtctgattggtctctggctaccatgcctacttctctcccccgcagtctcagccagtgccatcaactgcagcccttgcctcagcatctgagccaatctagcattgccagctcaatgtcccatagcaccactgcctctgatcaaaggctcttggccagcattacaccctcaccttcaggccaatccatcatccgaacccaacctggagcaggggtccacccaaaggctgatggtgctctgaagggagaagctgagcaatctgcagggcaccctagtgagcacctcttcatctgtgaggaatgtgggcgctgcaagtgcgtcccctgcacagcagctcgccctctcccctcctgctggctgtgcaaccagcgctgcctttgctctgctgagagcctcctcgattatggcacttgtctctgctgtgtcaagggcctcttctaccactgctccactgatgatgaagacaactgtgctgatgagccctgctcttgtgggcctagttcttgctttgtccgctgggcagccatgagcctcatctccctcttcctaccctgcctgtgctgctacctgcctacccgtggatgcctccatctgtgccaacagggctatgatagcctccggcgaccaggctgccgctgcaagaggcacaccaacactgtgtgcagaaagatctcttctggtagtgcacccttccccaaggcccaggaaaagtctgtatgaccttccaacaaggtggatccagagcttttctccttcgagtccccaacagcaaagcataggcctcatctttggagagggggaggagtg

SEQ ID NO: 12630 - DNA, 6000 bp, Homo sapiens
ttgctgttaactgcttcactgtgtccctccctcccctggatgctaccgggaagtgagctgttttcatcaaatgtctccttagaactgatgataacccaaagtgacttttaacagatttcacgggactcccatgtgtcacacaagggtctggtttactgaaccaacagaaaccttaaatgaccctgagaaggagccctactttgatgaactaacaaagtgttcttatccctggcacagcctcaaggcctcggtcctgcttaaagacatctgttccttctaaagcaaattcctctaagcagccagatcacacattccctttgttttcccgctgccataccggcttatgttgagcacctgctatctgcagtgccctgaaacttagcagagctgtcgggttctcagagctggatggaggttcatctctcccgtagaagagttcctttggcagaaataaaagtaatgataataatacgacattagataagtggcctttgttgagcgcctgctgtgtgcctggtagccctgtgttggtccatgttggaaggccagtagaggcaggccctgggagggaaggggagcaatcagagcaggaggctgtggcagggaggcggcgaatggatgcagaggggaggggggttgtcttttttttttttttttaaatccaaataaagtatgctagttatttggacgggacacttcagacttgaaatatggatacctgcatcccccccaccccccgacctttagccatctgggtcaaagcctctagtgacaggtgtctctttccctggccagctggtagcacagatgtgtaatggctctgggtgggggaggggtatgaggggagagagaaatcagagtagataggaaaggagacagaggctggaggaggttgggcaggagtgtgtgcgcacgtgtgtgtgaatatgctgagtgtatctcacctgcccgttctcagccacagccacacgtatgtgagctgtgcctgcgtcttcctatgtaacttgcctggtgctgcgttctgtctatggccgcctgccaaacttgtgcttttttttttttttttttttgagatggagtctcactctgtcgcttgggccggagtgcagtggcgcgatcttggctcactgcaacctccgccttccaggttcaagcaattctcttgcctcagcctcccgagtagctgggattacaggaacccgccaccacgcccagctaattttttttgtatttttagtagagacggggtttcgccacgttggccaggctggtctcgaactactgacctcatgattcactcaccttggcctcccaaagtgctgggattacaggcatgaaccactgcacccggcccaactcataccttttttttttttttttttttggcaaccgtgtgcattggtactgtctgtcggtgcagttcatctatatgttgttgtgtgtgtgtgttgcttgggtgtttgtctcctttgtaatggtcgtgggtgacaagtgtgtcagagtacttgtccctcctatatgtgtatctatgcgcacgtatctttctttgtgtgtctgctgctgtatttgtgtctcttcttagcgagtggctgcaggtatgtgtgccctcggggtgtttcttctggtgccatggtatgagtactatctggttctcttgttttttccttgtgtagctttcagtgtggtttctggattttttctttgcaacgatagtaagcgtactctgcattcctgtgctttgtgtttgtgtgcaggtatatgctttccctatatgtttcttttctgacttgatttgtgactagctgtgtgtgtacacggctgtgtgcagccatttgctgaaatgcagttgtgtgtgtgtgtgtgtgtgagagagagagagagaggagagagagagagaaggagactatggcttttctgtttgtacaaaaatcatgtcagcctatgagtgcctctctctgtgactggagctgtatgtggttacatgtggtcacaagtgcacattcaagttcacatacacagagatatcattttagggcttgaacctggaagtttgcctccagggtcatctgaacctggattcaggttcagatccagggccatctgaacctggatcgtgtgtgtgggaaagacccaggacccacacacaatgtcatcagctgtgtgtaattgtgtgctctgtgtgtggctgtgaatctgtgtgtgtgatttgcctgttgattgtctttggcatggctgtgggtccacgggcggtgaggttcaggagtctcgagtgtctggaaatcggcacaagcctatccctgtgttagtctgtgctctctgtgagcggctctgagcctgtcggtattgatagctgtaagactatcgtcactctgtgtggccacgtgtgtgactgtcccatgagccattgctcttaacgtgcagtggtgagtctgtgtgtgttcatgtctgtcagtctttattctcttgtgtggctgtgagtctttgtgcacctctgtgagtgatggcgagttggcccccgtatctgagccccttgatggggctgtgatgggtcctgttgtgtagctgcgattcctgagtgtgcaggagtctctctcccgctgtggggaagtaaacgccccatcccttgtcctcctccaactgtgggtggggtgagggcatctaggccagctttgaagccccagccagctcctggcctttccgggaattctgtgttccctgtcgggggtgggcaggcgggcgaggggcccagacagaggcctcttgtccacctgggcttcaagcagcccagtcgaggtggtcccagaccccaagtccaccctgcctgacatcctgtagcggacacgtggcttgcctgggacaggcatgcctgtcatatgcctggaggggagtgaacagacggactcccatagaagacagacggacagacagatagtgggacttctcagggcttggacaagccccaccccacgcttggggtggggtccaggactacagtgcccgcccagtttgcggacagtgtgagttcacagtccacattccccacccagccacaaatgccctccctgcctccctctgggggcccccaagatctagggtcctctcgtgcctaggctgtctgcctgaggtctgcctggaatagcctggctactacccctgcacctgttcccctgctgtccccaggcctctctgcctgaatctgcctctctctgcctcttttctcctgtccctccaggagtctctctgcctcaaccactctctctgccccttcatctctctgagctggtgtgtctggtcctaccctctgtttggggagctgtctggctctgtcccccacctcttggccagcctgtgtctcctgtctatgactgagcccaattgcctgttgcctttctgcaggtgtttccacgagcctatccctacccacctgtttgtttctgagtctgcctgtgtgtccctttctccctgtctctgcctgtcttccaagctcccctagcatcccctcctcccgcccatctgtctttctgtcccttctgtggtctgtctgttcctgtgctgtttctcatgcctgctttctttgtaacttcagttctcctactctctctctgtctcctctctgcacctttttctgccatccatcccatcctgctgtccgtctgctctgtgagtccatcccctctgtctgcctgtcactctctctagctgtgggtctacaccctcaatctttcaggccatttcccccaccatcaacacacaaacaaaccgctgtctccctccaagtgggtccagatagggggcgccccttctccacctcttcccccgcccagggccagaaggagggaaacgaaattaaaattaacatttcttctcaggaaaaaaaaaaaagtaccgctccagagcaggagcctaggcagccgagagggtgcccgaacctgagtctgagttgcggccacttcaggagctgagaggagcaggtaggtgaggagggagcgtgggctgcggggatggtgttcctgggggcctgagatatgagtaggggtcctgggagggggctcggggttccttggagacattttagcactagtggggaatggaatggcgtgtatggggaggtcctttttgtaccctgatcccaggaagtgaattcaggtgtgggtgggaggctccggagggtgctggtggtgggggatgggactccttgagaccctccctgtcccaggaacgggattcaggacttgggaaaaggatttcctgagccagtttgagctctaatggggaccttgaatgggggtttctgagatacctccttcccaaggagtaagcgcgggagggagctggggtttcttcagagacgctgtacctacaagacaggggctccaggctcgggtggggattgcagagacacccccaccccaggaaactcggtaggccacgggagggggtctttgatgaaggtctcagaaatagctcttcctccggaggggaaatgagggctcgggccaggttcctgagacaccccacaccccacacctaggaagtttctcaagtctggcagtgtctccaaattgacttctgccagaagatgagtgtttaagacttgctaggggccctggaaaagacctctaggccctagaattggggtcaaatgggagtccctgggtcatttctgtccctgggaaggggctcggttcgggcacttgtctttggcttctagtgaggatattcagagtcgtggcagagagcagtttgcagcgtctggggcaggggtctccgagtctgtccccaaccctcagctcactcaacaggttgcattagctctggtctcgggcttgggggcccaggcgggaaggaggggggtgagggcattaggaggggtggggcagccaggccgacacgtgtccctgcaaggagtgagccgcctggccacgcggtgagggtggagggaaggagagggggtggcgcgggggaccggggaatgaaagacacagatggcaagagagacagcgtgagtctggggtctgggaggagaggctatcccttctccacgtggtcggctcatctgcgctggggtccggctctctctgtagctttctgtctctctcttccccactatttctctctcactggctctctctgtgtctctctgagtaactaactgttggcttctctccttctctgatttttgttcttctctctctctcatctctttctctgtcagtctgcctccatttctatccctgtctgttcctgctcccctgccttgtctctttctccgtctttccatcggtctctatgggactcccctccccccttcttcagctcccctcactttgaagcatgctcgttccatctctgatccccccaccccatttctttgcccacaggatggaactgcaggatccaaagatgaatggagccctcccttcggatgctgtggggtgagtcaggggtccaaggaggtgggctcagggatcaggggttaggatttccctcttatcggcccctatttccctgccctatccagctacaggcaagaacgtgagggcttcctgcccagtcgtggtcctgctcctgggagcaagccggtccagttcatggatgtgagtggccccacaggatctgtcctggtggcaccttccccagctaatctcctcccgcactgctccctcttccccactcctcctcctccctgctgttcccctgcccagctatctccccagcacagctacacactacttggtcgctcccctctccagatactcctcttccccagatatgccctttccagctctctccctggccttgtttctccccacccgctcttcggcccagtgactgccctccctggctgctcccctcccggcctgcctttctcctccagctgttcttcctcctccagcactccccatcctcagcctatccccacccgcagcgtctcccctccccagctgttttacctctggtggctgcttcaccctcccccggtcctctccacttccagct

SEQ ID NO: 12631 - DNA, 6000 bp, Homo sapiens
tcccccaacccaggatgccctcactgtgaacagtaccctcatcttggatgcctctgcataggaggctccctgaaccatctcttccctatctcagggggtaccctgggcatcctcagtcctggaacccactgtgccctgtgtgtcccctgggctcccccgtgcaggaggaggtgggacacagtgagtaggtccagttgccaagtatatccatctgtcccccacagggcctgggggtgcgagccttaaacttgctctttggagctctggccatcttccacctggcctacctgggctccctgtttgatgtcgatgtggatgacaccacagaggagcaggtgaggtggggccctgggctgtgtggttaaccaagggtggcgctatctggcggggggaaaccatgaggacaaaggctgggaagctgaggcctgagctcctcagactgtgctgcttcgcctgggcagccagtgctcctcggtcctttcccatagtccctctgcttgagtcacactgttaggtcttttatttgggtgaagtgtgcaaaatatgtttatttattttacttataaaataacttttaggctgggcatgctggctcacgcctacaatcccagcactttgggaggccaaggtgggcagatcacttgaggtcaggagttcaagaccagcctggccaacctggcgaaaccccgtctctaccaaaaatataaaaaattagccaggcgtgatagcatgcacctgtaattccagctactcgggaggctaaggcaggagaatcacttgaacccaggaggtggaggtcacagtgagcccatgccactgcactccagcctgggcaacagagcgagactctctcaaaaaaaaaaatcactttatagagatggagtggaaaatccaggttttacttgtgttaattatttcacttcattattgtttaggtagaatttgcaagacttcttaattttttttttttttttgagacaaggtctgtcacccaggctaaagtgcagtggtgtgatcacggcccactgcagcctcacattcctgggctcaagccatccttctgcctcaacctcctgagtagctgggactacaggtgcatgacactaagcccggctaatgtttttttaattttttttgtagagacagggtctccctatgttgcccaggctggtcttgaactcctaggctcaagcaatccccttgcctcaacctcctaaagtgctaggataacaggcatgagcaccctgttttatttaatttaaatatatatatatatttttagacggagtcttgctcttgttgcccaggctggagtgcaatggtgcgatctcagctcactgcaacctccgcctcctgggttcaagcaattctcctgcctcagcctcctgagtagctgggattacaggcacgcaccaccatgctgggctaatttttgtacttttagtagagatgggatttcgtcatgttggccaggctggtcttgaactccaggcctcaggtgatccacccgcctcagcctcccaaagtgttgggattacaggcgtgagccaccacgcccggccaaaaaaatatatattttattttacttaggttgagtgtacaaaccctggattctgcactttaaaatttttcgttaaaatgtatgcactatttttgttcatgttgagtatgcaaataccagattttactcctttttaaattaagaacaatttaaaaataacatttattcatatggctcttgcagaatccaggtttttgcttctcttttagttaggtttcagtcaaaaacaaaactttgtgttttttgatattaaaaagtttttaattcaggttaagtgtgcaaaatctgggatttgcttttcttttttttttttgagacacggtctcactctgttacccaggctaaagtgcagtggcacaatcatagctcactgcagcctcaaactcccaggctcgagcagtccacccacctcagcctcccaagtagctgggactagagatgcatgccaccacacctggctttttgcttctttttaaataaagtttttgttttgttttcattaaaatattttaaaatagtgaatgcctatcatgtgcttcaaaaaccaaacagtattcaagatatttagagaaaagatttgctcccaccctctgccccctaccctcttacaggttacatggtgagacggggtttcaccatgttagccaggctggtctcaaactcctgacctcaggtaatccactcacctcagcctcccaaagtgctgagattgcaggcgtgagccaccgcactgagcccacttttatccttttattaaaatatctttccaaaatttaagcatatcaaacaaatataaaaatatattttaattctacccccttgccagtttttaccctaaagataacacatgaatgatactgttctgcaatttttgaaaatcttccacatcaggatatagtgtcctcattcattttttccactatgaggaagtgacacagtttattttttctcttatttgtggacatcaggtaatttctagtcctttcctattgcaagtgatgttgcagcaggaactctgtacccaagtggatccacacaggtgtggacagatctgtaggatctgttgatagtctcaatggagtagtacttttgtgctctcccaccagcaatgcctgaatgtgcctgctgccccaccagtacagagtgcctctcagacttcctggatatgtttgccacttcaataaagaggaagatggccgggcggggtggctcatgcctgtaatcccagcactttgggacgcccaggcaggcagatcacttgaggtcaggagttcgagaccagcctgaccaacatggtgaaaccccatctctactaaaagtacaaaaattagctgggcatggtggtgcagcatctgtaatcccagctactcaggaggctgaggcaggagaatctcttgaacctgggaggtagaggttgcagtgagctcagatcgtgccactgcactcaagcctgggtgacagaatgagagcctgtctcaaaaagaaaataaataaaatgaggaagattattaatgaggctgagcatcttttcatatgtttaagagccatttgtttttcctttactggaatgacctattcaccttctctggcaatttttctttccaaaaaattaatttttaggagctctttatatattagggagataacaggtcagagaatgggatcactttgtttttaaaatgatttttaaagaagaagacaaaaactatatctggtcacctttcatatgtacctaggcccttctgcggggcctcgcctagagcagtcacagaaatgtccttgggcaaaggatgggttttcctaagaacttctttgtccttgctaagtgggaccatcacctctttctctcccacagggctacggcatggcatacactgtccacaagtggtcagagctcagctgggccagtcactgggtcacttttggatgctggatcttctaccgtctcataggctgaggcacatctgtggaccctcataaccctcttaagacccctctcagggtgccactgatgggggatgagggaaggccctctctctactccttgaccccctccatccttgacccccaacacctcaacacacacacacacacacacacacaaaatcacaccattttcatgcctgtcaatccccaccccaccacaaggcaggaagggggtggtgcctgctggggcctagagggggatgcttggggaaacagagaaggggagatccagggcctccccgccttccttcttcctttttatatacaatttgttattgtcaaataaaagtaggaaatattcaataggcttcttcttcactgctcagaggggaataggaatgagtgaggaagggagcacagcatggataaaggtttggaagctggaaaccatgaagagagagcagactgtgattggttcatggttagtttatgattgattagatgatgagcctgaagatggcaggatcctggtcctgcttggtttgatcagggcagggacagattgcatagttggatgtgggggaggcctgattggctggaaaactgaaggatccccattctgattggttgctctgagtgggacacagaggagagaaagcaagagagatgaagggttggtgcctatttatccttaggactgagggttgtgggttctaattggatgggaggtctgggatgggtctggattctgattgattgctccatctgggggcccactggtggttaggcgtttgattggctttttagaactggcatatggagattgagggtcttcatgccaattggtcagtaggactgagaggcctgggttctaactagttcttctgacttgaggtcgggagaagagagaatgaccgctgctattaggactgaggagttctgagcactgaagagctggggagggggtggttgcagtgtatagcgtgtgatctgcttgtaacagtttcgttgcattatactaagggttactctacctagaaaagggcggaggtgaaaggatgcaacgcaacgctaatttcaccagcggaagaagcgggtacagaccttaatgagtccccgttttgatcgactgataagggaatggggaaattgaagccaggactcgatgcagattggctacggatccaaaacgcccactaaccttggcgcgtcccagtctccaccccaaacctaactcaggtgaaaatggcgccacgcgcgggggcggggctagaggtacaaagagagtgtctattggttgggagcggcacgggccgccttcttcgcttcaccattggctcgctccgtaaggcaagagaacccactaggggatgagcccgaactagggatgtgacagagcgcgagacccagcctaaagagagcccggagccagcgtgggaggccgctgccgtcgcgcgccttggtgagtgccctccacccggcccctgctccctcccccagctctccccggctacgcggccagccctcggcgtgccagcgcgagaccctttgccacccgccccccccaccgcccttttgcgcctgcgcgagacccccagctaccgcacggttgtccagaggacagaagatccgtcttctcattgggcagcgggactggagggttctggttcggattgaccggctttgtgttccgttctagcgctgcacgccagacaccggcctttcaatatccgtctcttccctgcaggttgacggcgttgcacgctctcgcggggaggctctggctttccaaacgctggcaccgagggttgtagttctgattcgttttctttcctctgtcccccagttgcagttttcaggactacgtgggggagggaatagctttttgttgaacggtttaagacgctgacctgtgcaactggaccacgcctggttcctgtgtctcttaccaaaccgtgaccccggagcacaggactgggtttggtggtcgtgagcagtttgtgacccttgaaggaagacaccaggcctggtcctgtatctccctcgccagactgtgaccagggagggctgggatcaggtgttgttcccatgtgcctcccaccagactttgacccccgagggctgagaccgggactgtttctaccacatcataatatggcttctaaagggctggaacaagctttcagcctttctgtggccttgtgtttcagtcatgttctttttcttttcttttttattttattttgagacagagtctcgctctgttgcccaggctggagtgcagtggcatgaccccggctcactgcagcctctgcctcccaggttcaagcgattctcctgcctcagcctcctgagtagctgtaactacaggcgcacgccaccacacctggctaatttttgtatttttagtagagacggggttttgccatgttggccgggctggtcttgaactcctgagctcaagtggtccactcgtcttggcctcccaaagtgctgggattacaggcgtgagc

SEQ ID NO: 12632 - DNA, 6000 bp, Homo sapiens
ataaattcagcacaatccccatcaaaataccaccatcattcttcacggagttagaaaaacacaattctaaaattcatatggaaccaaaaaagagccctcatagccaaagcaagactaagcaaaaagaacaaatctggaggcatcacactacctgatttcaaactatagtataaggccatagtcaccaaaacagtgtggtactgatataaaaataggcacatagatcaatgaaacagaatagagaacccagaaataaaccccaaattcttaagccaactgatcttccacaaagcaaacaaaaacacaaagtggggaaaggacaccgtattcaacaaatggtcctgggataattggctagccaaatgtaggagaattaaactggatcctcatctctcaccttatacaaaaatcagctcaagatggattaaggacttaaacctaagacctgaaactataaaaattccagaagacaacattggaaaaacccttatagacattggcttaggcaaggatttcatgaacaaaaactcaaaagcaattgcaataaaaacaaagataaatagctgggacttaattaaactaaagagcttttgcacggcaaaaggaacagtcagcagagtaaacagacaatccacagagtgggagaaaatcttcacaatctatacatctgacaaaggactaatatccagaatctacaatgaactcaaacaaatcagtaagaaaagaaaaacacacaaaacaaaacaaaacaaaatcaatcccataaaaaagtgggctaaggacgtgaatagaaaattctcaaaagaagatatacgaatggccaacaagcatatgaaaaaatgctcaacatcactaatgagcagggaaatgcaaatcaaaaccacaatgtgatactaccttagtcctgtaaaaatggccataatcaaagaatcaaaaaacagtagacgttgacgtggatgcggcgattagggaacacttctacactgctagtgggaatgtaaactagtacagccagtatggaaaacagtgtggaaattccttaaagaactcaaagtataactaccatttgatcaagcaatcccactactgggtatctacctagaggaaaagaagtcattgttccaaaaagagtcttgcacacacatgtttatagtagcacaattcacaatagcaaaatcgtggaaccaacccaaatgcccatcaatcaacgagtggataaagaaactctggcatatatatacgaaggaatactactcagccataaaaaggaatgaattaacaataatgacctggatgagattagagactagtattctaaatgaagtaactcagcaatggaaaaccaaacatcgtatgttctcactgatatgtgggaactaagctatgaggatgcaaaggcgtaagaattatacaacggactttggggacttggggggaaaagtgcaggggggcaagggataaaggacaacaaatatggtgcagtgtatactgctcgggtgatgggtgcaccaggttgtcacaaatctctattaaagaacttatgtaaccaagtaccacctgtaccccaacaacctatggaaaaataaaattttaaaaataatatatataaagatatacaaatgcccaagaaacaaggagaaggtacattacaagtcatcatagaaaatctaattaaaactataatcaaatatcactacacattcacaagaaagggaaaaacgtcaaattacattcactgattgtcaatagaaagtgttgtcaaggatgtgaagcaactggacctgtcatacatgaaaggtggaagtttaaaatagtgcagccactttgaaaaagtctgcgtcagtttctcaaacatacctacacctataatccagcaattctactcatatgtatataaccaatagactggaaatcatatgttcacaaaaaaacttgagcaagaaagttcataacaactttattcacaatagctaaaaattgggggaaaaaacaaagtccacagcagtgtaatcgataaacaaactgtggtacagtcatacaggctctatttagtactaaaatgaacgaactactgataaatgcaacaacaggtatggatctcaaaactgtgatgatgagtgaaagaagcgacacaaaaaggaatatataccctatgatttcatttatatgaagtgcaggaataggcaaaattcatctatgatatgagaatggtcacttaaaggatgggatagtgactggaaagggcacaagggaactttctggggtcatggaatattctttacctcgatcagggtgatggtcacattaatgtattcatttgttaaaattaatctttttgtttaagatttgtggttttcattacatgcgattatatctcaataaaacagtgagaaaaccaaaacaagaggatcacttgaatattcctataactatcaaagaaactaaaaactaaacatctcccacagagaaaatctaggccaaaatggctttgctgcaatttccagcaataattcaagaagaaagtaattacgatctaacaaaacctcttccatagaataaataaaggtataacactcccaaaattattttttttgaggctagcataaccttgagatcaaaacctgacaaggactgtatgaacaaataaaattatatgccattctgactcatggccatgaatgaacaaatcctttaaaatgttcataaatcatatccaccaatatctaaacagcctaatacatcacgacctagctggatttatcccaggaaggcaattctggttaaaatttttaaaatgtaattcagcacattcatattttagagaacaaaattttgattatataaagaggcataagcaaaaagttcttgataaaatttaatatataccaaaaaatacaaaacaaaggatacaagggaacttaatatgatacaatgtatctagaaatatctattcaaaatattacacttatctgtaatatattaaaatactggcctttgagattggggatgtaacaaaatggctgccatcatcactactattcaccattatagtggaggtcctagacaattcaacacattaataagaatagaagtatgcaaaaagaagtgtaaaactgtcgtttatatattatataattgagtacataaaaattctttaaaaatctatggataaactgttacatttacagtgggactttagtaaaattgctggatacaaaaacaatatatgaaaaataattttttagtcctataagtgaataagaaacatttaaatcattgaaagatcctagttataatagcatcaaaaatatctattcaaaggccaggtgcagtggctcacgcctgtaatcccagcacttttggaggccgaggcgggtggatcacctgaggtcgggagttcaagaccagcctgaccaacatggagaaaccccgtctgtactaaaaatacaaaattagccggggtggtggtgcatgcctgtaatcccagctactcaggaggctgaggcaggagaatcgcttgaacccgggaggcggaggttgcggtgagccgagatggcgccattgcactccagcctgggcaaaaagagcgaaactacatgtcaaaaaaaaaaaaaatctattcaaatatgcttctgaataaaagtatgtgagaggcaacaatcttctacaactacaaaaaactggatgatttacaaaaatcatcatgttaaaggtaccaaatagtggtggaaacaaagattaaataaattaaaatttcaaggagagagaatcttttccactataagctgacaatcttcaactatttttctcctttggaaaatttaccaactctgagaataggctgaggaccaggcttattcagacaaagagcctctgctcgcagagagaaaaaacagcaaagcttttagcagtttgacaaggctggtatgacaaatacaaaagctgatgatactcaagtgctcagcagattttccccactgaacatttgctgacttctggcatagttgggtaaaatacttgtaaaaaggtgaagcaaaatcttcagcaatcacccagttcttaggaaacaagcatgtgccagaatttgaaactccaggaggctgcaagttgtgaatagcagatctggattttccaggctttcagagattacaaaatagaaatctaccatgctcttacatcctagggaaaagaagcaaaccagacgtagactgagttttaataaaactgcactctagccctcatcatgaataatttctgactggattaaattaagcatatgctcaacttatgtgcctaaaaggggaaaagtggaactgtctctggaatatctcatctgaagcctctacaattttttatacatggtgcgtgacatgcaataaaaatattactagatacacaaagaggtaaaaaatatgacatgtaaatcaaaataaaagatgaaaaaagatgcagaaacacacatgatctggatagtatctggatagtgaaatcacgagaaaatgactttaaaattaactatgactaatatttttaaaagaagtaaagaaaaagttaaataaaatatgtgaaagaaccaagaactgtaatagataatttgaattaatggaactaaaaatcaactggatatcttacaatgaaaaaactaggaactcagtgcgtgggattaatgggagatgtgacacaaaagaacaggtttgtataactccaaaattatagaaaatattaaaattgaagcacaagaacaaaaataatcgggaaaaaaagatagagcataagacatatgtaggacagagtaaaaaaacaactaacaaatatggaatgggagaagagaaagaatagggcaggagcaatacctaaagaaataatattcaaaaagtttacaaaattaataaaagacatacacccacagaatcaaaaaactcagtgaatcataaacaggataaataaaaagaaaaccacacctaggcacatcatagtcaagttgttaaaaaaaacaaagagaccaagaagcagcttctctgctccttctggaatctctgcctggttcagcccacctgcctccactcctgcctccaccatgtccatcagggtgacccagaagtcgtacaaggtgtccacctctggcacacgggccttcagcagccgcttctacacgagtgggcccggtgcccgcatcagcttctccagcttctcccgagtgggcagcagcagcttctggggtggcctgggcggaggctatggtggggccagcggcatcggaggcatcaccgccgtcatggtcaaccagagtctgctgagccgccttaacctggaggtggaccccaacatccaggccgtgcgcacccaggagaaggagcatatcaagaccctaggcaaatttgtctccttcatcgacaaggtaccgttcctggagcagcagaacaagatgctggagaccaagtggagcctcctgcagcagcaggagatggctcagagcaacatggacaacatgttcgagagctacatcaacaaccttaggcggcagctggagactctgggccaggagaagctgaagctggagacggagcttggcaacattcaggggctggtggaggacttcaaggacgagaatgaggatgagatcaatatgcgtaaagagatggcaaatgaatttgtcctcctcaagaaggatgtggatgaagctgacatgaacaaggtagagctggagtctcgcctggacgggctgactgacgagatcaacttcctcaggcagctgtatgaagaggagatccgggagctgcattcccagatctcggatacgtctgtggtgctgtccgtggacaacagccctccctggacatggaaagcatcatcgctgaggtcaaggcgtagtacgaggtgatcgccaaccgcagcctggctgaggctgagagcatggaccaggtcaagtatgaggagctgcaggtgctggctgggaagcagggggatgacctgcggcatacagactgagatctccgagat

SEQ ID NO: 12633 - DNA, 6000 bp, Homo sapiens
gtgggcagatcacgaggtcaggagttcaagaccagcctagccaacatagtgaaaccccgtctgtactaaaaatacaaaaattaactgagcatggtggtgcatgcctgtagtcccagctactcgggaggctgaggcaggagaatcacttgaacccaggagacggaggttgcagtgagccgtgagctgagatcacgccactgcattccagcttgggtgacagagagagacttcacatcaaaaaaaaaaaaaaaagaaaaaaagaaaagaaaaggctgggcacggtggctcactcctgtaatcccagcactttgggaggccaaggcaggtggatcatgaggtcaagagattaaaaccatcctggccaacatggtgaaaccccgtctctactaaaaacatgaaaattagttgggtgtggtggcacacgcctgtagtcccagctactcgggaggctgaggcaggagaattgcttgaacccgggaggcagaggttgcagtgagccaagatcgcaccactgcactccagcttgggcgacaaagtgagactccatctcaaaaaaaaaaaaaaaaaaggaatgaccatgtcatccagactgggccaatcagagcacagagtgattagtttaggagtatatgacccagacagagtattttctggaactaggaaatggatactatggggtgggggtggtattttgcagctaaatttaaaacatagaagccaggagcagcccaggtgcaaactggataaactcatttgctcctcataaaagcactacatttatcatctccatttcacaaataggaaaactggggcccagaagggttagggtcacacagttaccaagtggtggggctaggatctaaactactcaggcagtttggcagtacagtcagcagccttaaccactaatgaaaactaagccgcaggaaaaatgacagaggaaaggcaagtgttgcagaggaaaggcaagtgttgcagaggaaaggcaagtgttgcaaaggaacttggttactttgtaaaagaggaagaaagaggatgtgtgcattaggaggagggccactcaccatgcaggcctgagccaggctcatggccaggcggaaccgggcagacatggcaagaggcagcagagggctgaggccagagcccaccgcagggttgatcacacgcaggcagcggaccacagcctctacaaccagctcagtggtgaaggcgcgcaaggtctgcacatctggaggaactgccctgaagaaggggaccagcttgatcacaggaatagtcaggcaacagggatcaggctgagccctgcagccttttggaaacactagtaccagggtcggggcagggaggatgcctacagttcagacagatcctggatgttggtgactgtgacttccatttggaaaaccaggaactagggaaatcctcaagtcctaagatcttggagtaggagaatggtgggtggaagagaactcagtttagaaaaatatcaaaatttgggagtctgggaaggtgaaagggtccaggtggcacaatctctgggtttcttggttcccagatagtatgttctttgcatacatattgagctgctagagttttgagaagactagattttaggaggctgctgttttcagaagttccaaatgtcagggtccctgggtatcaagatccctgaatatcaagaccacctagtttcaagcaatacaaaaatcagactccctagatgttggcatcctgggtttttagggcctctgaacggaggagtcttcgtgcgtcagggtgaccaaatgctgatgtcagattttagaattctgggtttttttggctgggcgtggtggctcacacctgtaatcccagcactttgggaggcggaggcgggcagatcacttgaggtcaggagttggagaccagcctgaccaacatggtgaaaccctgtctctgctaaaaatacaaaaattagccgggcaaggtggcgcacggctgtaataccagctacttgggaggctgaggcaggagaatcacttgaacctgggaggcggaggctgcagtgagctgagatcaccccactgcactccagcctaggcgacagagcgagactccatctcggaaaaggaaaaaaaaaaaaagaatcctgggtttttttaagccccaggtgtttggggaactggagtttgaaggatcccaagtatctggtccagggattttttggagtccccgagtgccagggtcctggggttttacgctccctggttcttagggcacaggtgtcttagggtctccagataacagggtctcagggaactgatgttaagattccccagattacagggttccgggtcttgaggtttcaaggttgtaacgtctcaaggtgtctgggtcccagagctttgggtgtaccaaatatcatggttaaaggatttgggaggcctctgatgtcggtgtcagggagggcggtgtgtgtgtgcgtgtgtgtgtgtgcgtgtgtgtgtgtgtgtgtgtgtgtgtgtgtgtaagggggtgagggtcttaggatcctggagttggagccctgaatgtcaggatcccgggttttaaggttcccgggaaacggggtcctgggctttagagtcccggatgtgggcttcgggggtgggcgggggctctgtccttacgtgccggcctggcgcagcgaatggatgaggattcggtccgcctcctccatggtggagccgtgtcggagtcgggggctgggtccaggaccgggtccgagaaagtggggagcagctgtagaaaccctgctccgtgctcgcggtccacagagtgtcacgggtcgtgtggggagagttggaaagtgtagttctgtgagcgagcacggcgcatgccggatgtgaggcctggggtgagtgtgcacggaggttgagcttgcaatagctgctgggaactgtagttcttccacctgcagtccagtgggctcttccaagggaaaaaggaacaacccgtgtggtggggagtggaggggccggacagaaaggggcttcctgactcattcgtttaaggcggcattcatcttctaggctataaaagtgtacacattaagggcagaattttaacacaaagcgactacttccctgtgtcttagtctcctcatctgtaaaatgggactattgacagtacctgctttttaggattaaaacagaattaatttatataaagcacgttgtactatgtgcctgacacataagataagaaagcactatgtaagttatagttactagtgtccatgcattcaataaatgctttaatatgatacacatttgtacactccaaagaataattacacagcaaatatctatgtaaccggctgggtgcagtggctcacgcctgtaatcccagcactttgggaggccgagtcgggtggatcacctgaggtcaggagttcgagaccagcctggccaacatggtgaaaccccctctctactaaaatgagaaaaattagccaggcatggtggcacatgcctgtagtcccagctactcgggaggcttaggcaggagaatcacttgaactggggaagcgaaggtggcagtgagctgagattgcgccattacactccagcctgggcaacagagcgagactccgtctctaaataaataaataaagcaaaagaaatctatgtaaccatttcttgaacagccgacgcgcacctgcaatcccagcagttttggaggccaaggcgggaggatcgcttgaggtcaggagtttgagaccggcatgggcaatacagcaatacaccatctcttaaaaaaaaaaaaaaaaattgacacttgtccaagcagacgtccccagcagagccagccagcatgaccgagcgccgcgtccccttctcgctcctgcgggaccccagctgggaccccttccgcgactggtacccgcacagtcgcctctttgaccaggccttcgggctggtcgcagtggttgggcaccagctgctggccccgctacgtgcgtcccctgcccccgccgcggtcgagagccccgcggtggccgcgcccgcctacagctacgcgctcagccggcagctcagcggcggggtctcggagaatcggcccacagcggaccgctggcgcgtatccctggacatcaactacttcgcctccgacgagctgacggtcaagaccaaggatggcatggtggagatcaccagcaagcacgaggagcggcaggacgagcatggctacatctcccgatgcttcacccggaaatacacgctgccccccggtgtggaccccaccaaggtctcctcctccctgtcccctgagggcacactgaccgtggaggcccccatgcccaagctagccacgcagtccaacgagatcaccttggagtcacgggcccagcttgggggcctaggagctgcgaaatccgaccagtctgcagccaagtaaaagccttagcccggatgcccccggccgccgccactagccgtgcccccgcacccacctgtgtgttcttttgataggtttatcttctgttgttctcaaataaagttcgaagcaacccaaaatttaaaaaaaaaatagttgggcatggtagtgcacacctgcagtcccagctacagaggctgaggtcagaggatcacttgagcacaggaattcaacgctactgtgagctatgatcacgccactgcactccagcctgggtgacagagcaagaccctgtctctaaaaataataataattgataatatttgatcttttttccatagagatattgcacatatattaggtttttcctatatacttcgaattccatatactactggaaaatgacatcgtttttcttattttagtttgactgtttgctgcaggtatatatttggtaaatatttcatctgttgccaggctctggcccacaaacgtcccatttgcacccccaccgccaccctcccatacaacactgttattgccccgccctgcggccttaatccctccaaagctgggggaagagaggggggttgtgtgcagatggcccttcaatctcgaaagaaagatgtcggaatctgaaggcgggaaaggtgagagaatccttccatccctgcagacccttggagcaaggtagagcccctctgacccacccattgcccacccagaccccacccccagagagcctctaggggacaagaaccacatcaccctgttccccatcccagccagccccaaacagcctctctgccaccagagccctaacgctcagcctgacccagacaccaccccccatggcctctcagcctcatccacagccttagttcccaaaggaaacccaacctcaatcctggctctgacccctatccaaacgcccacctgaaacctaacacaaactctaccagccagaaggcaaacccctgttagagtctaaaccccaccccagatacagacctaaagtgacctaacctcaacctcaaccccgggatgtcaatactgttagtgattgcagtctctgactttccagaaagtgcacagaccctttaaaaaaaaaaacaaaaacaaaagagagaaagagagagaagacatacttgatggtggtagtaagccatgagggctctagagttagactgagtgtgactccccattcagccacttcagcaagtcacttaactttttcttctcaattttctcatctgcaaaatgggaataactctatgtgccaggcattcttttgattctgaactcatttaatcctcataacaccgctatattttaggtactgttattatcatccttattatacagataaggaaactgaggctcaaagagattacataatttgcccaaggcaacacatagctaccaagtggtaaagtcaggatttaaactcaggcagcttgtttcatccaaagctgggaatcttaaccaggccaatctaccgccctctgaggctgaaacgagaccatgggaactgggagtggccttagctgaaaaccccaatgcaaaattcaagtcccactcaaaactcaacttcgaccctaa

SEQ ID NO: 12634 - DNA, 6000 bp, Homo sapiens
actgtgagtcattgtccccagcttacagataagcaaaccaaagtccatgtaacctaatttccatagctaagaaacatgaatctggaattcaaacccaggtctgactccaaagcctacaccctttaccaccacctactctgtaggaacctcccatagctcgcctctcattactctgtccataaggacttgtgtctttgatcaagaataaagcatggctcaccaactactccttcacaatgacaaactttccggagagaaatgctgaaatttcttggccctactcccagcctccatagattttataaaacatgatctgcagttggggtgatttttaggagcttcaggaagtcctcatcccaaggacatacatgttccctcatgcttgaactcttttcattaaagagatagagcccttttccccacaattggaaaaaaaaaaaaaaaaaagctgaagaccaatctactcctgggagagggaacacattagtatagtgattaggacagattatatcattccatgagggatagtttttaataagctggggagggggcaggcaaagtaaagactaaacctactcttcctgaggtcccacagagtcagtcacagaccagcaagacacaattggagccttctctgtcactatcctctaacctcaggcaaggtgcttctcaatggtccaatattctgcaatgtcctatgattctgcaattacactttacaaatttgctcagagctggccccatttgcattgctattaatggtgaggacagcaaagtccttagctaatccatgaagtgaagctctgtttacacatcttttattaagattaatcattaattaatgtaaggctttatcccttgattacagggatcccattctgatataacagtttaaatgttctcttgaaaaatgaaacatatttttcaattacagtcattcgtcgtcccaattcaggcaaaacttttatttaaataaataattagtcttggcaatagcatcataatgtatgaatgtgtaaagtttgaatgtgctaattgttggttcctgcattagtctttataagtgacatgttgctatatatatacgtggtattgggctaagaattatccaaagcaagtaacactgatgcagtcctgcctggctcaccggaaacttattttctaaggcaggagcttactcaactgatttgaacagatattccatgctttctcctgcattttcctttgctgaattcctgatcaagatcctacaacttgcattagtgttgtttgacttcctgaggtagagatagtgctgagtgttaaaacccataatcacactgagatattttttcaacactccacagtattttaagaatcacctctttttacattccatttcttttgcttttgccattgttgagtatttctctagcatgcaagtagttagaaactttccttgaaaacaaaaacctgctttcaaattgctcaatttgttacagcctttgtgatgttgtagtcatttttatgctggatacagtgttatgacacaaatgccacacgctgagaagtcacaaaaaattgttgtaggactatgctaattagcaaaacaaaatgcaatctctataaggcagaacctcaaacaataagccactgtttggggacaaataggaaatagaagagggaaaaagccaggttggattcaatccagaaattggttatctatgaaaatcagtaaccctttccccttggggaaagaaaggtcaatagtttcttagcatactgaaggctgggattatgtcttacagatctttgctataatcaataccctactcatagtgtgtgcttgacaagaatttgatggtaaccagaagatggcattgttgataacaatgaattccaccatttgtcaaaacttagctaatttgtgagggttcctttttatgtcgtttcctcacaaaatattcattattttctgagactctgttcaatgcaaagtctggacatgccatgtgggtagaattaaggttaaaatatggtctttgaaatgtgacattaccttaaatggcactcattctatatggtgaggggataattttgctccccagtggacatttggccatgcctggacgcatttttggttgtcacaaatggggtgtgggttcctactggaatctaacagacagaggccaaggatgctgctaaacattctacaatgcacagggcagccccccaacaaaaggaatcatctggcctaaaatatcaatagcatcgaggttgagaaaccctgcttaatgactgggaaaaccccactctctggattcctcataacagtttctcttcacctacgatgttacattaaactctggtctacatataccatttaccactatggtcaaggctgtaagaagagaggagaaaagagtatgtctcaattacattttaacagtcatacctgtcatggtatttgaataggccaggccatgtaagtaaacctagtctagaagctaggtagttctgggcttaaattagtcagatagtggcttccatttttggctttgagccacttttgcagatgtagcctctaggtgcaaactaccctgggagacatacacactcagccaccaagtggaaaaccagaatatgtccctattgacagagaagatgagccacccagccccaaggctgacaagcaacctagacaaagcttgggtccctgcctaagtcagctttctaattgcactaggagatactctgctaagtttgttttggaattcgtatagtaatgcctggcatttgtatggtgcttttaacttttgaaaggatttttctttatatatccttgatctgaagaggttagaaggatagggcagaaacaggatagggcaggagcagagaaagaaattttaaccttatccacagtccactgggaaagctccaaatttcagaagcacacacagtcctcatatgttaaagacaagtgcattggatatagggcctttgaaggaaacagctcacaagaataaggcttttgctctccctgagcactgcttctggttgcatctgggcttggagtggaagtctcagctggactgcagtttggctaaaaaaagggaaatgcccccaaagttttatccacggtcacatattctactcaccctcatgccaaagggaagacggcttaatcacaacatagacctcccttgtttgggagactgtatattagtttgctggttcacagtaaaactgcctttgaatgaaaggcaaagaatcaagtgatttttttttttcagcgaccctcttggccaatctttagaaacacttcctgaagtatttaagttgttaagaggtggaagctccaccctcacttcttcctccccaactcccttccccccagacacaaactcttcatcccccagggtaataattttcttttctccaataccttgctcccatacaaaagctaaatactctccagaatattggactgcctcgggactaggaggactaacgacaaggggaaaatttgtcttgcttggtgccccgagcgacttttccaaggtaggctaggaggagagtgcttagggcttccactaaacatagctactaccagcttcacaggctccgcaatgaaaacactcggccatttaggcaagggagatgattctggcattttcgggagcttacacttaggctcccagggcgtgcagagggggttaaagagcaacaggaagtacagtggagttttctcagagctagggattgttctgagaatgggtagggaaaggttttcaggtaccagcccggcgtccagaaaggcagagactcacatgcccctttcctgagagcgctaggaagggagataaaagacaaagccaatatttggggctgtgcggccaggccatgaaatgctgccagctagtggacctatgcgcctgcaggttgcaggtagaagtctcaggcttgtggtgggggtggggctatttagccccttccagttgggctcaagagggtggacattctgagcgccaggctataaggtgaaagaagtggagaggtgcttcatgtgaaaggaaggcgtaaagatcaaagagtggcccaagtgtccggtgacaccgcccctctccctccacaacagataccactaagcaacctagccccccgcccccatcctacaatatcactttccctccctgtatcaatctaggctggatcttgggagatcgaccctatgggtgagaggggcacggatgggagaattaggtagctccaactagattaatctagatctatcagggatccaagcctgccccataggaccccaggtcagtccctggcgactcagcgctccgctgtctccctgtcctaccagccgcccgccgcccttactcccccaggttcaactccccttcctcctgaatgacctatggtcgccggagcagcctcgccaccaccggcccagagcccaggctgacgggggtgggcaaaggtcactgcccaaagcaggggatattcaggccaaggggcaaagagagactctgctagccatatgctccgagggactcctgtcccctctacccgcacccgcgcttagcctcccacctcccctcccgtctctgccaccacccaggggagggggaggtctggggaagcaaacaaacgagacagaaaattccgtaccgaggggggagagatgagacggtgggacggggcagcgggggttgacttggggctgcggctgcggcttccttccacccctggccgcggagctgcaaagaaggcaggagctgctgcccctgccgcctgccccgtcctccctctttccctctcgcctccccgcctcccccgccccgccccgccgccaggagattgagagtggcttcggcccgggggctgggggaggtgaggggtgcttttgcctaccacggttgtctcaatctctctctctctctctctctctctttctctctctctctctctctctctctctctctctctcacacacacacacacacacacacaccccacatcacaaccacgacgggttgtccgcagctcgcagccaccccaaagggaggaataaagaacaggagcagagggaagccgggcgcagaaagaagggaaaaggaagagctcagggttggacatttttggagacaggggtggggaggataaagggagcgtgcctccttgattttcccctccccacccctctttgcttttctctccccttctctgtatagcatattccagaaacggcagcagaaggggacagaaacctctagtgtagaaaagggttttggaggggtagccagcgctcccgccagccgctacctaacagctggagcttgagtgtgcgtgtaagagtgtgaatgcggctctctctctttttttctctctctctcccctctctctccatcccttccttcctccctccttctccctctccttcacactacagtgtcagctacccctgtcagtttccccgtgtcagtttcttccctagctcttattgtgtgtgactggctgcgtgaagggagtgggtgcgcttgaaggggctcaggttgggttagagagctgggagaacagggtagggacattggtagagcaaagagtttcagggcactggcgaaggtgaaaggtgaggagggccgatctgttacaggcaagtttggcaataactgagcatccaaaggggaagccaaggtaggagccagtacttgcgctcgtctttacaccccgcccctttccctgtgctcatccgcccacccacccatcagcctagaggccccgggctgtcccagtcggctgctgtttcgcgccgcaaaagaggagtccggcaaggcgccgcaccacgcatcctggccggtggacatccagacgacacagattttatccgaaaaaaccacttggctcagggtaagtctacaggcggccggtgcggtccatttcactgcctgagtgctgctgaggggcaaggggcagcgaagtgcgggttgaatgaagatgctgggctgctgt

SEQ ID NO: 12635 - DNA, 6000 bp, Homo sapiens
gtttgtgtcctctcctctccttctgtccttccctcctctgaggaagaagcattcatcctccactagcagccaattctccccactgggctctgaccatacacacctgcttcatgaaggctttccaccctctccccttcaattggcttctccctctcagcctataaacatgtttctgtctcatgcatctgtaaaacacaaaaatcaaaatgcttcaaatatttgcctccctctagctgtgtcttccttcatgttgagcttcctgaggagttgtctatacctgctgatttcacatcctcctcacacattcacccctcagagcagacactttccagatctcaatattctcaaccaacatcatttgccagcattatgggaattctccttaaatctcttcctctccttctctaaaaccctctagcccagagcagaatcagacatggcccctgcactaagcctctctccctgtatttggtgtgggagacagtcacagttctcactgctttcgagccacttctcaagcaagctgtctacagtcatacgctcttttctcttacctgtccatctcacaccccccctcaactctgtgttgaggatcagcccctgcccgaagcttaccaataacctccttgttgagtcatccactggacaccattcagtccttgacttattagcacatgattaaaaccaccagcctacaagaaatgccctcccttgtgttggcttctctgacacccctctcaggactcaagcttaagcctgtttatctctccctgggtgactgcatccagttccatggtcttgaatgccacccatgtgccaggcaatctccatccccagtcatgcctctctcctcccttatagcctggtgccaccagcctgcagtgctcacagtggtccagtttcctgaggtctggaatcctgttttgtccacagcatttcaaccgccttgggacatgagcccttgctctgcagtgtatgtctagggctgaggtcttgctctttggccagatacttcctggtgttactcaagacctcaaggataccaggtgtgcctgcgctgtcatttatcagttattagctaataatagtaatgttgagaatggcaggtaagctttgttgagtactgaccatgtgccagacatggtgctaactgctttacctggtctttgccattgaatcatcacaggtgccacgtgaggtgggaagtattataatttccatttgacaagtgagtaatgtgaggttcaggggctttaaggaacttgctcctagtcatttagccagtagttaggggatgatctgaaattcaacctgtgccctgtgtgcagtggagcacagaggtctggtcactaccctgtactgcctctgcctccattgttagtctatctgctttgaagcctggttgtcccctgcttgctccttcatccacttctgcacttggcttagccctgtacatagttctttctctaggtgctttccccagtgtccctggcatctcggtcttgctgcaagcccaggtacttaacaagctaagagccatgtaagatttgtctgggctggtattttttccttgagctaataagaaaagcatgtgtgcatgtgctacagtttaggccatgctagggcatgaacacacagactttatgaccagcaactctggttttgtccctaaatcacatatatagtaggtcacatggtggtttgctgttggttatttaatttgataattcacaactgacaagggggttgctcactgctattccaatcaatgggtagtttggtttagttatgaaaacacagctgctgtattaacagttttgtttatattcagcttgaatatctagttgaagagaagcacatctgaagtacaaacagccagggagaggggtgtgcacccacacacatgcacacacacacacgcacacacacacacacacacgtacctagacactaaatgagaatgtttatttctaatggaactttaaaaagtgaaatgcaaaatgcagggagctgctatcatggctgtgactaaaagctctttctcctcctcctgccttcattattctgttctgccaccctggtcacccgggaagaccctgtgagccttttccaacaaacctccctcctttgcctcctccccaactccatctgtcagttgtacatcttagatgttgctccctcctgcggctcctcttctggccatccctgtggctctgatcctgttcactgggagaaaagaggctccagctctccatcccgcaaactctcccgcctacccccaccagagggatctttggaaacaacgtttggacgtacaatgtacccttttggtactcgtctgcaactcccctgttgcccacaggataaagtgcaattgcctggccagcctcccactccagctttatctccaaaaatttctcttcacaaatgcctcaggcaatctcctccttgttctctgtcaaacaccacacatagctggtttcaacaccctggctggctctcaatttggaatgtccatctctgcacctctgctgcctataatacccttttcttgctttgagaggctagagatcacataagtgttttcctgggaactctggggccctcatgactttgtaccttgtgttagtaatttttgaaaaaatagtaattttttactaattttaccacaagttcccactcctctcttgaaaaacatatgtaagggccaggacatcatctgagtccttgccatatattcctctatcataaagtcgatggcctgacctagacaagcatgtggcaaatacttgaaaaactacaaaataataataacattctgtagcctccacaaatcctcacagctatcctgtggatgagctatcccttcgatgaggtttataaggaagatggcaaagtatgattaatatcaacctgtaagagaaaagtgcctgggaatctctgatgagggagctgtaatcacttgcttcctttgtctgcctgggattcagtcgctcattcagcaaacgtaattaatgcctactggtcattggtcactgtgctcaacccaggggaatacaggtaaatcagacaaaccttcatttcccggaggtccaatgtcagtggaggaagagacatgcatacaggacacttcaaatcccaggctggctacagtaagggcagacatgctcctttccatagcagtctggtgttggacaggacggcaggcggatggactggcagccttctcttcctcatggcctcagcaaagccgcgtgtttgcctgttccctgctctgcggcatttctgcccagggcaaaactggctatataatttgcagggcccaggaaaaaagaaaaatgcaggtccacttgttcaaaaattattaaaaatttcagcagcaaagcatgaaagaaagtatggggctcttcccggtgtgtgtcggggggcgggggtgaggggctgtgcaagcctaaacatgtcctgcagtctcttctgtcttgcaccgtagtctgaaggcagccccaggtcctagtggactaactcagtggtagtaggacacacacagctgcacacaaatcagtgacacatttggttgagtgcctattgtgtacccagagctctgctaagtcttagggatacagtggagaccccaacagacacattttgtgtgtatgcatgtgtgtgtttgtccctgagcttacttcagtaggagagacccactgtaaacaagctcataaaaaatgcccaagataatcatcaatgagtgagcagtgttgtgaagaggacaaagcagagtgatgtgcttgggaggtggggtggtgaagagggtgttgtaggtgagtgtggtagagctaagcctcttcaaggatgcacacagccccttctggagcaacaggtgaggatgctgccagcgtctggcatcagcttggtacacaaatctttgccattccttctccttctgaagcaaatcagaagggtctagggaaagaagatgaagtccaagtatgcttgagactcttgacgtgtctcccctgaagtggggcactgccccttccccttccccctctgtgccttctcgtgtcttcttctgctatcacctggtgccaagtctccagaaagattcggccatccagtctcaaggaggtttccaaagcctcctctattccagttggtccctctcacactcagcttctggggccaaagcgggagccacattgtggcagtgcccccttggggttcagagaaaattctccagtgaatgtctccgcctggtcctctgttggcgggtcctccctgcccccaaatacctgggaatttgccctgtggaatacctcacatcagagcttgctggggagacccctgtctctcttcttctcggtgccaaggaaggtgctgagttacccggcttccttcatacgacaagacttgtattccgaaggactgaagattgtgggctgagagctgggaaaaccagagagggaggttgaagccaggacacttggggaagcaatggggtgcaacaggtggcggggaggaagccacggctggagagcacagtttgaccccgcggcgtgccagcgggcaggagggggtcgcctctggggcgtgagcacatccagccccacatcttgtccctgaagcagctccctgccggccacagcctggggcgcgagtttcccccgcccaggccccgcgccgcgggctcgccgcctcctccctccgcctcccccgcccctggctgtctggcagcgccgcagtggcggcgtggggacggggggcctcagcaaccgggctcccgcctccttcccgcgcccgcgcgagcctccccggctccccaccgcagcagccgtcacgtcgtcggagatttccatcggggcgggcctggggcggggagcgcgggacggggcggggcgagtgggaggagtgaaagttggagcccagcaaaagcctccgccccgcgctcagtgcggccagagcgtgagccgcgacctccgcgcaggtggtcgcgccggtctccgcggaaatgttgtccaaagttcttccagtcctcctaggcatcttattgatcctccagtcgaggtgagtctccatcccgggacccgggagcccttcgcgcccagctccctctccccgggagccgggacggctcccgggaccccagcggccccgcgttcctcgagccccgcgcccgctttgccccggccctaccgcgggctggccgagtcccgcgtcccctcgatgcgcgccggcctcggcccgcctcactgtaggatgggctcccggggtccttgagggggagctccaaaaggaagacaggacgccagaaggaagacgggactccagttcgcggattcccgctctcagaagcactgcggtggcctggtgacaagcactcctcggagtcttgcgcaggaacaggggagcggccccggggtgaccggccagggcaggcttcagctactgggggggccggaggtgcattttgagaagggggtgcgcgggctgagggagcttagctgcgccaaaaatgtgtgagtgttgcctcgtgtgttctctgctgctcacattttttttaagagtgcctactgagttccaggcactgcgccaggcaactctgacattacttgcttcccatgccgctgctcctgttggtgccagtctcaggcacgagctttggtttagtctaagggttcccgcaccagctatgccccctctccaccgctgacagcctcccacttccttaactcatccctagacaccctgctgggccttgggcagactggagccagaggccaggaatattattctcctctgaagtctgtggtttgggccgtagatttcaatccccttctcccctttcaggtttcccttgaacaaccatcttccctcacaccttctcctcgccctgagacttggctaggagggtcgtgccctggatttgtggctttttggggtggaagatgactgcttcgttttgttgttgttgttttgagatggttcctgctgtgtgtgaagtgt

SEQ ID NO: 12636 - DNA, 6000 bp, Homo sapiens
gttttccatagtggttgtactaatttacattcccaccaacagtgtacaaagattcccttttctccacatccttgcctgcatttgttattgcctatcctttggatataggccattttaactgaggtgagattgtatctcattgtagttttgatttgcatttccctgatgactagtgttgttctgcaccttttcatatgcctgtttgccatttgtatgttttattgtgagaaaagtctatccagtttttttttgcccatttttgaatcagatttttagatttttttctatagagttgtgttagctccttatatattctagttactaatcccttatcagatgggtagtttacaaatattttctcccattctgtgggttgtcctttcacattattgattgcttccttttctgggcaaaagctttgtaatttgatgtgatcccatttgtccatttttgctttgatttcctgtgcttgtggagtctttaggtttttccaaatataagatcatgtctgcaaggaaagataatttgacttcctcctttccaatgtggatgccctttatatctttcttttgtctgattgctctagctaagtcatccagtactatgttgaataacagtggtgaatgtgagcatccttgttgtgtcccagatcttagaggaaaggctttcagtttttccccattcagtatcatattagctgtgggtctgctgtatatggtttttattatgttgaggtatgttccttctacacccagtttttaagatttttgtcatgaagggatgttgaattttatcaaatgttttctcagcatctattgaaatgatcatatgatttttgttcttcattctgttgatatgatgtatccctttgattgatttgtgtatgttgaaccatccttgcatcccagggataaatcccacttggtcatgatgaatgatctttttagtgtattgctgaatttggtttgctaatgttttgttgaggatttttccatcaataattatcagggatattgtcttgtggttaggcttttgtttcaaatgttttttcttcctcttctcttattgtttgccatctgggactccaattatgtttataactttgatattatcctatgtatttctaacactctgctcatcctcttcaatctttctctctctaatctgtacttcagattagataatatcactagatttttcttccagtgaaactactctttcttctgccattttcaacctgccattaaacaccaactcactgaattttacttcagatattctgacttcctatttgttcatttattacacatgtgtttttctttatttcccttagtgtaattatgatatgtgatttaaaattctttctcctaattcaaacatctggtttaccttagggctggtctctattattattttttccttggatatgagtaatattttcctatatctttgctttggtagtaatttttgagtgtaccctgaaaatagtgaattatatattgtaggatacctttatttttttctctagagcattgattttgtttgttttagtagacagttaatggggctgaagtgaaactccaaactctccctcattggcagcactgaaaactctgtttaattctttcagctttatttaggctttttggaatctgttcccacataaatatttcatggtttcaccagacagctgggtagtttatacacagaatttggggcttcctctccctagttttttaaattattgaatttctctcatggcttttcaactaccgtggtcatcctgaattctgccgtctggttctttcagacacttggactgtgagcagttgtgtgtgggagctggctaacactggtttgtgaatgcctactgtgcatatctctattcaactccatgttcatggaatggtccgtggtagaagtatttacaccattgaaattggcaaatactatgaatttgttttttattaattttcctcaagatccagttgttaaacatttaacagttgcaacattgattctagtttctctagagtttattcactgctttggcctgggggctgccatcagacaaaaatttccagaaaaggaaaaactcacttagtattgttccctcctttcaattattaattccctttcaatttttgcctgtttatgggttgctttcctgtgcatttaaattgttttattatatatttggtccactgtttattattgttatctgcatcagggttggtctgatagaagcttcttcaccattgccagaagttttcctaataaaggattctgttttttttgttgttgttgttgtttgtttgtttttggtttgcagtcaagtgggaaaattatgaaaatgctgtgaagttttcatacaggtataattgtatgattcagagaagagtttttttgttcagagagtgtcttaatccaacttatttatattaaaatatcttttctttaaaataaatggtggcacccagatggtttatttgtttgtttggtatctttattagatgaaaagttttcaattgtagtagactgaatagtgtcccccaaaattcatgttcgtctataacctcagggtgtgacctcatttcaatggtatggtatttgcaaaaggaagtagttaaagatcttgagatgaaatcattccggatttaggttgggccttaaatccaatgactggtgtctttataagaaaaaagagggagatttgggcacacagaaatcagaggagaagaccatttgaagaccgaggcagagattcagtgataagccaaggaacactggaaaccaccagaagctggaagagacaagaaatcattctctagaacttttggagtagtttgaccctgccagcatctcgattttagacttctgaccttcagaactgtgagacaataaatttctgttgttttaagctactgaatttatggtaatttgttatggcagccctagaaaactaatacagcaaccttaatatttctttttgccagtatactaatctattaaatccaatggacatttatgcaaacaaatctacacatgaaaatgggtacctatgcaggaaaaagtatttatagctttatgctcacatacacacttgctttatgtgcaagttacatgttaattttgtagagaaaaatactgtacctgcagtcagcaatctgagtactggccttgattctgccactgactcactatgaccttgtgtgaattatattttctatttagtctagtttctttttctgtacaatgacatggttatctttatgggtccctttagctcagtgactctaagcttacgagtacctatctatcttctactcaatgtatggacacatgcttttgaagatgtataggagtgtagcacatgtacttcatttggcaggagtagagagcattagaaatttgggggaaaaaaaccaacaggatggtagtttaaagagaaatggcacactatgggcaacattgtaaatgcctattatgtcccagtcactgtatgtatattgacactagtatacttaaacacactatataactcactttcaattagatgccctctgaatttttctaacaggactagaaatcacaatatgaagagtttgactaagaaaacttttatactaatcattatatgtaagcagatgctgaattctttgataggaacagctctttattcacgtgcttatattggtattatccctgaaacacaaaagatggaatgttgaatcaatgtgatttggagtcgcatttggggactcacctttggagaacttttgaaatgtggcagtttagtttttattttctaagggccaacttctcctttacctggaattttcctgtctttagattcctagactgttagttctggaagggtcttttaagatcatctatttccattaccattcatttggtcactgaggatattgagggccagattgaagaactcgttgaaagcaacacagcaattttcagaggcagaactcaaactcaagttcctttattttatttttagcctaggtctttttccactctatgctgcattgttactgtgctttgcctaggttgctttttttcttttgacccaatgggaatatagttcttttatactttgagtcaataattatccttctccccaccttagtccttgtgcaactcatgtataggctcacacaattacatacatctatattccctttggaatttttgaaaagaaagcattgtggttctgctgcttgtctgtcttacctacagggaagctagaactgatagttttgaattgggtctgcacttctacttggttgagggtgggggtggaagttaggtcaacaggggatcaatgtggcggaactctttcttcttagtggagtatgaatgacaacccctttgatgtacatttttctagctcattattgtccccagagatggaatctgaacagacaggattgtcaaacctttatttgcagcctgggttagaaggcacgcccataaggatataagggagacagagggaaaaaggaggaagctcactcttcagtctcggagcagcaagtaagcatcacacatcagctacagtaacccatacttcctttatcctcctattcgctcatacccttttgctctctttctcttccctttgctgcctctgctcctccctttctctctgggcttccctctatttctctgttggatgccttaaggaataaaatactactttagtatttcgtaaaacaaccacatctaaagccttgcagtactgtattcagagccccagcacagccgcgtgctaagcaccagtggtgaacctaaagccagcaaagggggaggggagaaggggaggggaggaggggagggagaaactgacagagagggagggaggcagattgagagagagagagagagagagagagagagagagagagagcgagagagcgtgagcgcgcgcaagctagcgagcaaaccagagagacagaccgagagagggaccaggagagagacccagagagagaagaagaagccagaagccgagctctgtcagggctcaacctccaacttgtttcagttcattcatccttctctcctttccgctcagactgtagagctcggtaagaaacattgatgttccttcttccccctcccccaagctcaggtctcctttagcgatagcatctctcccccgtactgagagtctccttgggttggccgggaggcgaggcatgctctgcagctgtgatgctatcctgggttccccagtggggctggtggaagcccagaggcggcatctgagcagggagacactggggtaaaacccgatttgaggaaggggggttgcgatgtggtatatgcgtgatttgcttcattgtcagtgaattgttttgttcctctttggaagcaggtcagcactgaccttgcaaattgcttggggggccccagcagctgctgcagaaagccacggagtggcccctagccaaagcagacagcactgtcatgaccccccagacagctctaggcaccagggatgtagtaatggctggagctttctcccttctttaactctttctccgcagctgcttctcactgctggaaataagaaagaaggagggtaccttgcagcctctttccccatctccccattacctcccccacatgcaagtgagtagaaagttgtaaataactgcttcctttaaagcagattgagccctccccccttcctttgaggggctcactgtggggttgggcctgacttcctccacaaacttgggaggtttgccttgtttcccggcgagaagctccattgcctgcccaccctcaattccagataattgagctgacatcctagatcagagattgagataccccaccccatctcactcataggcatcatgttaagtccagctgtgtccttggaagggaggaaacacctgatggtttgtctgcaactggcctcccagtttgttgctcctctgactgtggctgtggctgtggctgcgggtggca

SEQ ID NO: 12637 - DNA, 6000 bp, Homo sapiens
gaaattgactctgagactcttaatgtgggcattccattcaacatatttgtgtgtgtgtgtgtgtgtgtgtgtatcttaatataatagtaaccaaagtttaatgtaatggaatcacaaaaacataattattaaagtagttgtgggcatatagtaggctttcagtgacttaaaaaataacagcaatcacacgtaatgagaaataattttgttgatgggtagtaaatataaaaagtatgactgtcacttaatcatatagacctgagaaaattgataaacttacacaaactatagattcctcattaaaatatatagatatcaattatttttctgccatataatgtgggtattttgaaaactataaagcattatgtatatgttagagttcttaaggtttatcagtatcagtaaatgatactgatgttaagaaaagtgtttttattttttatatctattttttaaagtttaatatgtagcatgatatagaccaaatattgtgtgttggtccttatgacataggatgggtcacaatcttttcatttctcttgtaaaaagagtacagaataaggtttccacatacctcaaccagttacagtttggtaagttagaggcataggagaattagacttcagtttccattgcattgcaaataaaaccttttcaaagctcctaaatcttactgtccttgaaagtggaattgtccaatgaacaaagttaaaacatgaattttaacagtaagtagatgagattaaataaattaagtaaatgagattaagactctaaaaacacatcctcaggtctgatttcacgtgattttcaagagtattctacatagaaatattttatgtaacatatgtgtttatgtaattatgtaacactttatgttatataaattttatatattatgagaatgacactgagagggattaaatgacttgtccagtcacataaccaatgagtgttagaggtagaactcgaatcaaggatattgaattaataatctcttactttgaatttaattttatgctttagactgctgcgccactgaacttggtttcctttcaaataatcacagatcttaacttgttaattccctaacaagtagttttttgaaagaactatttgtggactatacatatgtacttatattattttgtttaagccacaaatttctggtatatatttaaaattatatactagttatcatcaataccattatgatgattgtcattatcattgaatgtatggggatataatggtggaccaaagcatgtactgtctctgtccattgcaaagcttgctacataagcaaacagtcatacacatgtatacatacaatgatgacgagctccttgagtcagagttggagagcactatgaaggcctgtaatagaattgttagagtaatgcaggtcaggaaaggccttccagagatttgaaaaataggctggtgttaaccagacaaagatgggggacatgatatacttcatgaacaatacggtaagcattagggagtaagaaaaaagaccaatatggctacaggggaagaaatgagatgattagtggatgagatgaggaacaatgtaggcatgggccaaaccatgtggaacctttaggtcattgagtagtttccttgttctacacaaatatcaatggagaaccatagtattaaccaggggctgtgacataatcagattctgattctgaacaaatcactctggtttcagcatacaggatgaggtagtagaagaccagctgttggttcaggtagattagtaagaggatggctgcagcagtacaggcaagagataaagatatctcaactggggtcatggaggttgagatggagggaagtgagaagatttaggagaaaaaaatcaatagggcttggtgaagaactagatatagtggatgatggagatgatgccttggcctttggttggtaacaatgaaatagacacagtagaataggagtaggagttggaggaattatcagaagttcggttttgacatgaagagtttaagcagcttttgagacatacattaggaattgtttagaaagcagttggatgtataggtctgggtagaaatatacatttctgtgtcatgtacataaaatgataatggaaattatattaccataatattttctaagcgagtgtactgcaagaagaggagacagcctagaatatagcctttaggaaatccaacttttataggccaggtagaggaggatatgcctgccaagaagacagaataggaggtaatccaggagtgcactgtgtcacagggtcaatagagggaagtgtttccaggaggaagaaaaggccaatgacattaggtaccatggaaatgtcaagtaagatgagaacagaaaaatgtcttttggacttagttacaagaaattcactggcagacttagtgagagctgtttctgtggattgatagggctggaatccaaatttaggagagctgagaaatcaaatgaggaggctaaactagatcctctctaatgtcccttacaactctacaataatataatgctgtgatttcatgctgctggcctgagtctcctttgtcacagatttccttactcatcctattcctggttaataacacaactcttgttaaaagaaatgattcggctgggcgcggtggctcacgcctgtaatcccagcactatgggaggctgaggtgggcgaatcacaaggtcaagagatcaagaccattctggccaacatggtgaaaccctgtctctattaaaaatacaaaaattagctgggtatggtggcatgtgattgtagtcccagctactcaggaggctgagacaggagaatcgcttgaacccgggaggtggaggttgcagtgagctgagatgacgccactgcactccagcccggtgacagagtgagactccatctcgggaaaaaaaaaaaaagagaaatgatttacaaagactatattatttaagcatcgttacaaccttaaatttgagagaaataattttcttctatctttatacctaattttcttttggaaagaatcttgaacacaaaaaaatctgtgctatttttccatgtagaaccaattgaagaaatatttccaggaattgattttatatatttttttgggtcaggacagcagggataaaatcaggtctagagtttccatgtggatgaatttggaagtgaacagatttgaagctgcagtccagggatgtctcacactacaccatactgtttttcttttaaattgaatcattttctctaggctttgaaagttaagaaaacatatttgaagaattgattttgtatgtaaatagaatgcttgggcactactgcatttcatctaaaaagagattcctgtattttcactgtcttactgggatagacatcttatgaaagggcatatagactcttgctactcaaagtgtgaactgtggacaagcagcatcaacttcagctaggaacttcttagaaatgcagaatctcaggccccaccccagacctactggatcataatctgcatttcaataagatcctctggtgatttatattaacattaaaaggtaaaaagaacttgccatcttttttctctgaatctacttcttaaaaacatagaattcattgttactctactatgatatttaaactgatccaaagttagtcatttacggagtaaaaattaatcatattattttgttttaaaattaagacctccagtaaagcacataggtgactaacaaggaatattccacaaaaagtaggttactctcctagcttatggtaggacatgcatttttcattcccccttcccagaagctgctaattatccgcattggactatctacccttcctcttttttattaataataatatttgtaattttgatttgaaatagcagggttactcgtcagacttttgtacagatttatgaacttccactattttcagtccctttagccaatttaggagaatagcatatgcactttattacatgactgttcctagtgattaacatctggaatgggcagatgaactaaactcccagttgcacttttccttgctccatttctaacatggagccctgctctaacctttaaccatggcaagaaaagattgctactgccccctgccggcccattgtctcatttccttttctacaaatctgtgacttgcggatgcccaaggattttgagccactgaagaaagctcagttggaaggggctttccctagtacagaggtagagagatcctttgggactaggcggctaaaatcaaatgaaaacattaaaaaggcgaggaaggcataaaggacttctaaattaaattatcgatcttcatgaaccttcttctgcacgcgggcttctctgtgccaaggaaatgttcccttctcttcggcacaggactcctctttgcctccggcttgcactgacaaagagtgaactgtccacacccttattataatttcagtactctgaatcctgttctctgtttcccccaatttcgttttcccacgattaaaccttattcccttcccttttctgcttcaaattcccgtcccgcccacccaccgacagcctagcatttccaggagctcagaccccacttccctcaccctctccgtctcccgacctctcttctcctcttgctgtcatcgtacccccttcagtatcccctcgctgaacggccagtcactctttgccttcgaacagcaggcacgtcccctcttgaatgcttttccccgacccccgccccaagcaactgaaaaaggaaacatgcgcacttcagagcttggagctgtccgagtgctgaaatttataggctgggtaagatcacgtctccgtctcattctatagccctcattccagcacaggatctcagcaatttttccctcttccccccacccactccagcgcgcagagtcctttcttctctctcatttacaacttctttttaaaagaaaacattttctagaaaaagggctttgctaaacagaaaagatataaaacaaaagccacagctatctagcatggcattgtcaccaactccctttgcatggtgatgcgattaaggtagcagcatttttattattcaggaaaagcagctgggggattcatcagttctgaggctttgtctttctgggttaactgatggtcccaagcctcggtttgacctgaccatgatgcccaggactggcactttttcttttttctcagcaaactgtacaaaaccaaatctctttttgattttcaaggaaactaggttcctgccaaattttgaatctggacaataaacagacactttgtcctagcatctttctggaatcatttcgggatattttccacaagcaacacagaaacaggaatgaaccggcagctagtgaacattttgacagccttgtttgcatttttcttagagacaaaccacttcaggtaggtgaaacgactttgcatgttgatatttaaattgtttaaaagagaatgtgtcatgtaattgtgtatttatctgtgctctggactatattattttaattttatagaggaaagttagatatcttttgttcatttaaaacgcctaataattgtgggagggtggtaaatttttcacaaaagcaagttttatgatgcatagccgcactctatgcaattcaacacacattttcacagccaacgtgatattaaggtagtctgatgagttgcatgctctttacatttctatataagggtaattatttttctgaaagtaatttaaagagattattgggtgcagtgtttttcatataagatgattgtattaatttggcaggagcatgctcattttagataaaatataaaagatccctaattctcagccaacttgggacttctgttatatttcagaaactagaagcatactatgaggactacaattcaggaattttcttgaaatatcaaaaatttctttttactactatattctactattcaatctgtttggaaatggattgcctaccaaaatttagt

SEQ ID NO: 12638 - DNA, 6000 bp, Homo sapiens
caaatatagtacacgtaactctgtgaacaaatcttccctctagggcgttccctagaaagtcctcgatttagctagcagtgtttgcaagtttgcattttctctaacaattcttaatcaatcaccatcatcatcatggtcatatcaattgctaaacatgtcctgtgactatgtgatagtccaggcatcaatctaaaatctaaaaagatttgtgctttacaatccacagtgaaagaataaacaaggcaatgctttaaatagagtttttttttaaattaatcttttctttatatcaacttggatataattaggcaaaaattgggaaaatatgtgtcatatctaatatcagtttctcacagtgccaaattaattaactagaataatggtgattaaactctatagactacttgattattgcagaggaatataatttttaatttaagctttcaagaataaatcttagactgcaaaatcagggaattttctggatttgggtctacttctcttctctcatttttttctcaaccagagatgtttgggatttcaatcacaagtgtgaggatattggacattactgcataatgggtatggtgagtacttccttatgttcaccacagtctagtttgctactaacagcttaggagagaatgaaagccaatgagggtgggagaagataaactgttagctaatgcatacaggttcagttttcttcatctccatgtctagtcaatgcctttcaactaatacctgttactctttcatcaaactttctgcctgcctttctaagagcagtgcacattacattttacttagccagtgttctcaaaagggaagttagtaactttctgtaaaagaaagactttactcttcattgcaactgatctctctctctcccactgtaaaactgattgaggtgcttaaggttctcaagaaattgctactcatagccctgtgattacttttataaaggcgggggggaggggaaatcagtagaatggaatggttgattactcagggaaaagattctttcttttttgaattttcttctcaaattatggagggaaggaaagggagtgggaaaatgttcaagaaataagtttatgtgaaactgggaatgttatttcctggtatatgcagattaatgatccctttgtcattgcctccccagcagagcacaggcttcaggaggcaggtggaaaagtatgagaaaggcttgaaaatttaagtgggataaaggaagatgatccaataggcagagaaagagaacagtggggataagtacagaggaaaagactgatgagttccaagagcttatggtgaagcagtcatctttgtagaggagtttgagagtggcagagatgaggagagaaagtggatttttaaatatgttttatttttctttgggtataaaggcctcacttctttgaatacatgaaaaaaataagtacagatatgagtaacttttttgtttcagtcaaaaaacagaaaccactgtatttcaacagggggaatttcataccaggaaatttgttacatggattatggaaaagtagagaatcccaacatggggtgcagaggcaacataatataaagatgaacaactacaggaagtggttaccaccctaggggttagagggaaactaggaggtggtggtgtaacttgagttcagaagccagggccacctggcagaatcttgagctacagtggtgatggctaggactagctcatgccacagggggagaggctgactggtgaaagttggagcctcagtgcagatgcagccccttcatggatgccacttaaagcagaaagctcagggaagaaacactatggcttatctcctgctatccattctccaattcagctaaacatactagaagccagagggccaaggagcctggcaatacaattttctctgaaacacagtagagcaaggaaagtggggaatagacctgagagcaagaggcaaataattggcacatgttttaattgtctaagtgtgtttctttgaattcatctctgtgtggaacagaaccacgagactaacttctctttatgtggtttacacatggtctaagagccatagcattctaaaaagtacctttccttgaatattaagaagtgaaaaacactactactttgctaattatcgtaattacagaagcttcccaagtagttcatggacaacaatcaaaagagtacttatgtcttttttttccttcttttgttccctttcactcctcccatttcttttttttttacctccatattagctataactgctgtacaactacccttgtgcaattagtcaatattgatctcataatggggttactatcctaccttcctgtctctttcatgtcttgaagagtgggtaccaacaagggaaatgatgctacatttagcttttggcatctaccatatctgacatatctttgtgctgaccctgtttactcacttagcatataggatgtcatgtttgcctggaaacatgattgccatctaaacattttggtatatttcttgtattttgtcatgttttcctatagttgtatgtggagtgatttaatgtagggtttttagtgtaggcatagtaaggcttttttctagtatcttggtcaaaagtataaccaaatttcttgggttttaaatcccaactctactatttgctagttatgtgaacttggccaagtaactgaactgctctggaactcagtttccttatctgtaaatataatcataataatagaatctgctttacagtggttgagttgtgaggatcaaatgaattgatgtgtgtgtgtttgcatgtgtgtctatatgtgtaatacacacatatatgcagtcatatcacttaactatgggggatttgttctgagaaatgtatccttaggtgattttgttgttgtgtgaaaatcatagagtgtatttacataaacctgatggtatagtctactacacgcctaggctacatggtatagcctatggctgctaggctacaaaccttatcgttttttattgtactgaatactgtcagagattctaacacaatggtatctaaccatagttaaccatagaaaatagacaataaaaataaagtataaaagattaaaaatggtacacctgtataaggcacttaccatgagtagagcttggagaactagaagttactctatgtgtcagtgagtgagtggtgaatggataggaaggcctagaacatttttgtacactcctatagattttatgaacactgtacacttaggctatactaaatatgcaaaacattttgttttttcaataatgaaataaatttagcttactgtaactttttatttataaacttttgcttttttaatttcttgactcttttgtaataaccctaagcttaaaacaaaaaaaattttacagctgtacaaaaatgttttaatatccatatctagaagctttattctgtttttaaattttttatttttatattttacctttaaaacatttttgttaaaagctaagacacaaacatacacattagcctaggcccacacaaagtcaggatcattaatatcactgtcttccacctccacattttgccccactggacagtcttcaagggcactaacatgcatgaagctgtcatctatgacagcaatgcattcttctggaataccttctgaaggacctgcctgagattcttttacagttaacttttttataagtaggagtatactctaaaataatgattaaaagtatagtctagtaaataaatgaaccagtaacatagtcatctatttttactatcaagtactatgtaatgtacataattgtatgtgctatacttttacaactggcagctcagtaggtttgtttacaccagcattgccacaaacacatgagtaatgtgttatgctacaatgtcactagatggtaggaatttttcagcacacacacacaagtatatatattatatattatattatatattatatatatatgtatatatatatatatatatatatatagagagagagagagagagagagagagagatggagtcttgctctgtcgcccaggctggggtgcaatgacacaatctcggctcactgcaacctgactcccaggttcaagtgattctcctgcctcagcctcctgagtagctgggactacaggtgcccaccaccatgcccagctaatttttgtatttttagtagagacggggtttcaccatgttggccagattggtcccaaactcctgacctcaagtgatccaccccactcagcctctcaaagtgctgggattacaggcgtgagccaccgtgcctggccaacaccattataatcttatgggaccactgtcatacatgtggttcatcattggccaaagcatctgtatttatatatgtatgtttcaaattatatatatatatatatatatatatatatatatatatatatatgatagctatacatgaacatacacacacacatatatagacatatatagcacataaaattggcacatattaagcattttgtaaatatcaaccattacaattgttactacttttctcagcaaggctatgaatgctgttccagcctgtcaaaatcacacctgtttaatgtgttttacccagcacgaagtcatgtctagttgagtggcttaaaaattgtgatcaaatagctggttagttaaaaagttatttcactgtgtaaaatacatcccttaaaatgcactgttatttatctcttagttgtagaaattggtttcattttccactatgtttaattgtgactggatcattatagaccctttttttgtagttgttgaggtttaaagatttaagtttgttatggatgcaagcttttcagttgaccaatgattattagccaatttctgataaaagaaaaggaaaccgattgccccagggctgctgttttcatttcctcattggaagaagaagcatagtatagaagaaaggcaaacacaacacattcaacctctgccaccatggggaactgggctgtgaatgaggggctctccatttttgtcattgtaagtaccaacaagagataagttataaattctctgacttctcggggttatcttggaactaaaatagaccaaagcttttttgttcatttgaggaattgtgttgaaactgatttaccatgtgaacctatatctatctgtaaacagactgagtccattcttccaaattccttaatggaaagaacatatctgggggctcacttctagcttacttctgaattcctaggaggaataaattagccagcatttcgcagaaggagtagaaaatatttcatgctaatgatctctgattctgagttgtttagtaatgtttactcagacgcacatgtctatgtgtttatactactttaaaaatgacaaattgaaattttataccattttctaaataaaaaatataagattgactcatgtatgggaagtaggcctttatttcagtaattacactaaatataataaaacttctcaaatttattttcaaaaacaagtaccttcttttttcagagatctaaacttgagttatttataagatttataaaaattcaaaagaacagaattgaaataagtcatctagattcataaatatgtagtatgtatatttatatataattgtatatatatataaatcaatatagtctggagaaactatgtaagtaaagatatagctaatttacaagtggacagaatgatttctgtactttttaaaacaaagaaaatcaactgttctcttaaaatggtgttatcagcaaagcaataatggacaaattgggtagatagaaatacgatttttaaatagcctttctaaataaccaatagaagcattacacagatgttaaaaagtacaattatgaatggaatatgaatggagcttttgtaaaaatttatcatgaaaaataatgagtctttgagttttaaatatagaaagcaattagtggcacaaataaaaacaacaaatattttg

SEQ ID NO: 12639 - DNA, 6000 bp, Homo sapiens
gccacaagattggatcatgaatagtcacatgattcactgccaactaatacaagatgatgtgacatagatatgaagccaagaaatcctacagccattttgccatcttcagggaaacagaaaggagagaggaaaagaaattaggtttttgatgaaattgttgaaatattgagtctaatgaattctcaagtcagccatacctttggcccttccagttatgtgagccaatgtgtctcccttagtgtttatatcagttttagtggatttgttcttgtctgcagcatgaagtattctaactgatataggaccattcaaagcatggtcactaaccctgagggtgcttaaaggaggtggtgtgaaagtgtttagtccagagaggaaggtgttggaagagaggtacaaaaaataccaggtcatttccaattaattgctcctccaaatggctcctggggatgtcttcagggaaaacatggagttctaaatacccttatgtataaaaagcaagctaatctgaaaatgatttaggataaacaattgctcccatagccactactcacttggtgtaactgtctccttctagaagtttcggtggatcgatttctggacatattaaatccaaattaataaggtttttcctctgactcatagatacacttccaacagaagcaactccaactaggcctgtgtctgaaattttagcttctcagggatgtagatttatttaacaacatggaggccaacacttagatagaagatttccacagaggtttctggaggggtgatataatggagaaaatggaactatagagaagtaggtcagaggacctaagctttcttagaagtcatacccaacctgaatctccagatatggctaaactctctattcttcccaaataatctggaagtgacagtgcaaaagatggccacaaagaatcagttgtatctagcttagttcctttattagagtctaggctaaagtttggacagtttttctaaccccaaaataatctcacctcatggaatcataggatgatcaaacataaaagcaagacgggtacttagaaaccactttgttctatcttgtgtttgtaagggtttgggataagggaagtaccttgtttcagatagttaaacaccatcctctgtgctgccatggtacctggtgcttaccattttcagagcacttgccatattgcattgtcattgccagtgaatacatctgctcctcctttgaacttgacattcatgaaaagcagaaactgttccttgcttccttacattcctggtgcttagcaaagtctgcctatagtaggtggtcaataaatgttgaagaaatcaaagtatcaagtcaaatggttagaaaattatgctcccattaggcaaaggatatagtatcttggtttcattttcttcgaagggtatagcagtttccttccaatgaaataggatgatttctgttgttgttttcctgatttttatgaagttggcaagtatgaggctcactgtacggtatagatcacctcttagaattccactggccaacagttctttatgcttatccaagtgcacctctcaagcctgaaacaagcacaaagctcatgaagagaagtacactttttactttttgataaaaactgcaatggttattttcttgctatttaaactatatcatagagctcatttaaaagtacagatcataggtactaaggctagcaggtaatcctaaattcagcagggatactcttaaccacagagggagagctaggtttggggctttgttggcaacttctggtggctatgatgctgctagtataatctctaacccctcgttggaaaatcaaagttgaagtttataaagtgtctccctgctcttttgggtgaggaatcgattgctaaagaatttgcatgtattatacaggcttttcaaccaacagcaatatgcttagtctaccactgtgcccctgctggctcagatgagagtagtccaactctgccaacagctgccactgacagctaaaaattgaaagagtggcagcagataaaagagaggggaaaaaggtattgggcaggggaggatgacaatggaagggatgggtggcatttacattcatgacttcgagggttttcaagtgcataggcaccaaaatacttttctgcctctcatctttagttactgagccaccctcatcactcttcaagccaaatgacagtgaagatggccacagatcttttcttccacctcctcttacagctggccaagcatggctggggacgtggctactttcaggagtgaagtgagacatgctgaaagtcactttctcctcgtacaaaatatattgttcactcacatgaaatcaaaactaaaacctcctcattaaagttgttcctttgggacaaggcattgaaggctcctattaaaatgcaactgtgttatctaaaaaggagaaacacctagtgcctggcacagagtaaaggttctttaaatgtgacattttaatattaaattgtcattgcctgccattagaatcttagtaaagattgtctcccgggccttttgaggagccacaatggaaagattttaatgtggaacattggcatagacttgatagcagagtctgaagttatgtggaatatgaggagagaggaggatgacagcatgaggaaacttgggggacaagagggcacttttactaggtgagaaagagggaagggagtttggaaattaacatttattgatttttctctgaggcaggcactgaattagatgctttcatatcaattatcttacttaattttcacaactgccttataaagaaagatattaatattcccattttgaagatgagagaactggggttcagattaacaaagttgttcaaggtcacacactgcctgtatgtgatgggacttagactcgaacctggacgtgtatgcctcctaagcccatgttcccgaataatgctatgtccctgtctacatttggcaggggatgaccaaccttacctctgctacccgctttgccctaatgcttcttccactgaaaagatgagtctcctcagactctcatgtttctccttcactcctgtccatgaaatatcaaaatggagacaaaagatttctatgagtggtgggtgggaggaaattatgcattatcagaatgaatagaaatttgggaagagcctaggacaatttttctggtttgaagccattttgttccattgttccaggctccagactacgtctcgccaaatccaaagttctgtagcaactgatatactagctgggctccagggtccttctatcccctgtatattcccaattttatccccgatgtatatcagttcgctttacactggcaggagagttcatgttccacttagaccaggaggagaggatatgaaaaggaaaatagcaggtgtggggaggataaaacccatgccttctacagtaactgtaaagtaaaagtgaaaaacgtgagagataaagaggattctttttcctcattgcgggagaaaggggctagggagaggagtctatagcccaggaggttcatccgcagcatgctatggagaaggccaccgtcactgaaatccggtctgtactgtaggacttcataggttctttgctcgccttagagcagaggggaagaagagtcagaaagaattgataacctctgaggtcatcagtcaggggcctaggctgctaagtccagaggcaacaccaagggatcaatgcagctaggtacagttttctccagcctcaactttcaatccccacccccagaccagctcattcccacacctccctcctccttggtcagtgagcctgagcgtccttttcattaaccttttagttactacctctacgcacatactttttcctatgccctccaaagaagtcagccccatactgcccatcactgctcagcaccgcccaccccatgcccccgcaagccggcctcagcactagtttaaggggagggacacgcctcccaaagctgcggggatgggggtgggggttgctcactcgccctcggatctctgctgtaaaagcggagcggcagagaccgggcatgcgcagcatcttcgggcgcattgtgatgggaactgcttctctgagtctctacaaagactccggagtaaccactaatggccctcctaaggccccccttctttaagacagacacacaaacacagaggcaatgcagctatttttttttaaagggtgggaggacgttgcagcttgaaaggttgatccacgttaggagtggtgtatttctattgatcccatctccggtgttgacaaacgccagcgcctaggctttgcagtccggggctgcagtttgcagtagagctaagcggtgtgcggctttaattccacgtcagatcaactttgatcaatatccccctactggcccaattggaagagcccaattcaccggcactgagccttttcgctctttcctttttttccccccctctttagacctaccatcttttgcgggggggggggggcgcggagagagtctcagattgtcttgataatttattctttcgttctctttcttttgcttctctatttttgtttttcagtgttttgcttgttttgttctgttttaggattttattctctctctctctctctctctctctctctctctctctctctatcatagggacagaaatcgctttggcaaacccagcttgcagccaatgaacccgccttccagattggtgtgaagacagaagtgaggtggggggaagggagggggtgtgagagatcctgggagcgagagggagagagagggagcaagaaaggaagagagagcgagcgagagagagcgagcgaataagagagagagtaagagggagagagaagaagaggaagaagaggaggcggcggcagcggaggaggaggaggactagtgtggggtggaaaggaagagtgagcgagagcaagttaaggggagggggtgtaagagccagcgaattctttttctttttctattattattttgacgactcctgagttgcgcccatgctcttgtcagcttcgttttaggcgtacatggccaggcagaagaaaatggggcaaagcgtgctccgggcggtcttctttttagtcctggggcttttgggtcattctcacggaggattccccaacaccatcagcataggtaagcgcaagcgagccagccgtcggtccaggctctccctcacccgagaccactgccccggcaaggctttccctgcggtgggtccctgtcctgcgtggcctgggaactgggactggggccgggaccgggcagagatggtgcggggcggggggcggggcggggggaatctgagcctcaacgaggtggctggtctgaagagcctctgggacaagagaggggtctcctggggctagtgggggtgaactgctaggttttccgagccgagaggagcaccggaggcgagcaggaggctgggatgctgcaagggggtgaagagtcgaggcttttcggctcgctgctctggactttgccatggcgtgcgtgcagctcctggaagttgtcccagggtgatgccgactgtctggccgcgccagggcgcataacccgggcccggggtgctcagtccgtggtctccggctgtcgggagacaggctggtgctgggggaggtggagcccactttggatctcccagacccgggcagcagcaggcgttggtggtggatggggtaggaggcgggggtgagactaggagctgagcgggcaagcggcgaagtcacgcagaccacgaattcatgaattgccgctgtgtctgtctggagcccggctcctgggcgcctggagggagttatcttggcttctgtcgtatttacaagtctagaagttagaatttttgccattactgaaccaaccccctgtattgtcacgggggagggtggctatggggaacgggttggggtagcagggggaacaatattgtttttcttcccaacctttcccttcacacaatg

SEQ ID NO: 12640 - DNA, 6000 bp, Homo sapiens
agtcaaaattgtgggtcacatactgcatgctataagtgaaggtaggtctgtgtcttcactgtcagacagcattctgattgatttgaggttaggcaatagagaaggctttcctgccctcccactctcctctcttggaaaaagggatttctgtggtaatggtggtggtggtggtggtggtggtggtggaagagtccttaagggtacataaaaatgcttgtccctcaagtagaataaatgcatgaaggattttgagccaaacacaggagctctgataccacttcccacatggagcagaatttcctctattctacccatgacaggaggccattcattcagtctttgtataaacagctctagtaacaaataaggagcccacactctcaaaagacagcctattttatttgtagctcagtgtattataatataaacccctgcaggaatgttactgtgctccagcatgagatagcccaaggagcaattgcatatagtgaagcccaagtgtaggaagacaccctgagaaccacagaactgttcattttgtatgtttttccttagaaatagtgaatgatgagggcagggtaagcagaagggaactcttctacaaagattcacttttattctggtttctcttaggaagccatatataagcacatttctccagccttagacctcagcagcaactagcatttcacacccatggaaaatatttgcctctttgatggcccatgagatgacggacacacaccgatagaacaatggccttccaagcatgacaactagggagggctcataggtgtcaggttgttctaacaagtgcctttttcagcatggaaaaaaatgagtaaaagcattctaaagtccagggtctaacttccatcccctagtctcagtctctcctgttcttgctctaggtcaggaactcattatttttaattggaccagtaatatagccttctttgcttctggctttctttactttcactacaacgtgtctaggagtagatttcttttaatttatcttgcctatgacttattgggctttttgaatctgtgaattcaaatttacagccgtcatcttcaactgggacttcaattaaatatatggcagaccttctcactctactaattgagtctctcatcctcccttttttatttttccaaataatttgtttctccagacagaactctgggcaatttcttataacctatcttccaattcaataattctctttttagttgtgtttagccttctcttaaacccatccattaaattctcaagtttcattgttatagtctttagtataactacactagttatagtttagtttttcaccttgatttttttcaaaatagctctattagtctttatgattttctgttccttacagatattttcaaacttatttttaattttttggaataaagtgaaccatagttattgtagtctttgtcacgtaactctgatacgtgaagtctttgagagtttgtttttgttgtctactggctgtcatggtctatgtgtttccttttatgccaagttatctttgactatacgctgacatatttttgaaaaattattgtacaaatgattctaggcccaatatgataataccttccagcagagtcttttcatttgctggggtattttcaaatgcctgaggatactacttgtccaaggccactttaatccaagatcagggctttaggttccttggactgcccatatgatgagtatctaggtttacaagaccacacaagggctggttacttataggtcaccattaacccaaaggggtagccactcagggtctcagctgagagtgacaagaatgctaatcaaatccgctacttccttgggccttgagctttcacttttttccttatgatgccaccaaaactgcagctcaatttcataactctcttccagattcagtagaagccatcaggacaaaagaggattctagtgctgggctttcccccctgggttcttgtcttcttccggattttagcctcagtatctctcagttctttatgacaattatttctttctacattcagccagtttgtttcattgtcctcactggaacagctagtccaagttacctagctggccattaccagaaggagatgtgtgctcttcttgcccccagtccctctccctcccagtttttccttcagtgcgaaggtgccactctgattgtatcattcccttgcacaaatccttcagaagattactgttgactctaaaataaaatacaattttttattttagaaaattaggacccagattctttctcttgcctcattcattacacaagaatttattgtacactgagtgtgtgttgcttacaaagtcaggttctgcctaatctctcacctcttacctatctcacctgttgtcttacctccaaacttactctaccctttagccaaactggaatattcactgtcgtgtgcagagctgggtcagaacacagatgggctaacttccagatgagtgttctttgtcctacaccattatcccatattcaggtttaagcttattcaatctagatctttatggatattataataaattaactaggcaaacgctcaataagtacaaattataatggcatttttgtatttcttgtattttggctatccttttcttgtgagtcagaaatttcaatgaagcattacctctagggagacccgaagtaggggagggccttctgggatgtaagttctggaagagaattcatcgttgccgtcaactttttgtcaatcttcatagtcacaagggtacctaagaacaaaatttcaggcttcaggcttgtttcccctaacaaatgagcgaccagaccaattgcctgtggaatttgattcctcagtgctgggaacatcccacattcaaacaaatctgctcccacctgctggtggttgctagaacttccagtcaaagctgacttagactgaaaacgcactcttctcgaagtaagcagacctggaaatgtggtttttagttttggcctctgctactgtgtgaccttgggccaatccctttttcttctctgggcttcagtttccctacattacaaccgaggtggctggacaaaatgccccggaatggctctaacatttttggcaaacaaggattttctctacaaggacgtctgtgtgaccagaggtgatgggacaggactggtagcagtagaggtgggtttaatctgctctcatatgtgatcctgacaaatgggtcccatcatccttttttcttactgcaatggccagggaaagaggggagatgggaaagaaaggtgtgagggtgttctgctcattaaaagaaggcaggaaactatgagagacatttttcataaaagtatggttctaaaatgattttaaagggggagtggtaaaagagttaaaccctcagctgtgcaaaactgcttggcctaccaggtaagtcatgctttgctgggcaccagcaatctcaactcatttcatcaaatactgaggggaaaaaaagggggagatgttgtgtttctcagtgaatgttctaggtaaccaaaagtaaacctgaaatccgttttgatttcaactcttctcaatggtgtgatgtgggaggtggcatgccggtgaacatggcagctctgtttgttgattacccatttgccctatgggctctggtgaggccactttctaagctttctgaacttgctttgtcatgggataggaaggacataggaaattgggtggaggcatttcttatcctccacgatttttctgtcccataggggcagagtctgaggtagtggaaagaataagagccctctagtcaagatgtcaggcttttccatatgatggggtcagaacccaggaacattggcataccctggtctccagtgcctaactcccttgaacaccccaaacactgaccttggcctttttttccccttctatggtgtcagccatgaaccttcattctgcatcccctggctgatgagacacaaccacatctcagagagaccccagttggtgagcccttccagttccttgagtctttttcctgagtacccaaagttggggtgaagagcactctaggaaatttaagtcttaagcaactcttgggctcctgtagcccaatgtccatcctgagggaggagcagtcctgctgtggccagagccctgtaacaaaacccattaggatcctccttgaccttatccagagacaaggcacgcggggttactggaggctcaagggtacggagtcaccagccgttgggtacctcctgacgcccaaaattgtccaagtctttcagaatgcagattcagccatggcggtcaaattaccacactcccttcaccatcaaatacaactctcgggcacaggccctttcttccaagaaaaacacacatttcgcattttgcagagaagagacaggacccagtgccccttgaggcggattcctggcccagcccccaaggagccagccctcctccccctcccccagcccggccccgccctgcctgtgtctggagatggccgggggatgactgcagaagcctgaaggggcgggggccgggcggcgcgcaggctacgggcggaggcaggagcgcgcgcctttttgtgcggctcctggcagctgtccgattggctgggcctgcgatgccgtcggagtgggcggagccagcagcgagctgggatctgtgcccagtcgcagccaggagcggccgcagacggagcgcacctcgcagctgccgggcgggccctggggggagctgcgtccagcagagctgctgggtggttgctcctcccgggctctcatctccggtatccgggccgacccccgcaccccctacttcccttgccctcgctgctctctccttagaggcgactctttggggaagggccagcaatcccgccttccccggccccagtagtcacccactctcccaccccacctctgttccttttcgcggccccgtctcccgcgccctcaggcgcccagaacgccccggccatgggcatccgaggcatgctgcgagccgcagtgatcctgctgctcatcaggacctggctcgcggagggcaactaccccagtcccatcccgaaattccacttcgagttctcctctgctgtgcccgaagtcgtcctgaacctcttcaactggtaagcgggcaccgccaggctaggcacggcggggacgggaatggagacgggcagacgacctctggcctcttggacggagcgggctgggggcgactcgggctggggggtactcggacccgggctcgctgagccctggcgcccgggccctgcctgttggcccctagaaggggtaaggtgggagtggggtgttgaaatggagccctgtgcttccgcccacctgttactgcggagcttgactgagccctgcgtgtgcctaaaccgcagcccgaggggtgggggcgggggtcgccctcgtcccaggatctgtccatccatccccaaggatttaaggttcccggcagctttccccagctttggcacctgtgggattggggaggagggtacaggatgacgggcaattcacaaaacatagacaggagagacacctgtttgagtctacattttagtccatttcctgaggcgcgcgcgcgtgcatgcatgtgttgaggggatgagggactctttccaatgcggcagatagaaatgattaactcaaacccatcggagcccagacagtgcgatcgtgtctgaataaacacgaaccgtgtggtctgggatgggtgtgcttttgtacttagtcgtgtgaaaatatttgaagactccggtttttttctctttttgattttaagtttgtttgggtgtgcgagtatctgaagcctttacatgtaaatcacacagaaatgtgtatttggggtggccacagatcctgagcgttggcacatgggtaatgtgtgcttggaaacaggtgggaatgcattgctttaatttgggaataattcatgtgcacattttgggatgctgcaaaatga

SEQ ID NO: 12641 - DNA, 6000 bp, Homo sapiens
ctaatggaactttaaaaagtgaaatgcaaaatgcagggagctgctatcatggctgtgactaaaagctctttctcctcctcctgccttcattattctgttctgccaccctggtcacccgggaagaccctgtgagccttttccaacaaacctccctcctttgcctcctccccaactccatctgtcagttgtacatcttagatgttgctccctcctgcggctcctcttctggccatccctgtggctctgatcctgttcactgggagaaaagaggctccagctctccatcccgcaaactctcccgcctacccccaccagagggatctttggaaacaacgtttggacgtacaatgtacccttttggtactcgtctgcaactcccctgttgcccacaggataaagtgcaattgcctggccagcctcccactccagctttatctccaaaaatttctcttcacaaatgcctcaggcaatctcctccttgttctctgtcaaacaccacacatagctggtttcaacaccctggctggctctcaatttggaatgtccatctctgcacctctgctgcctataatacccttttcttgctttgagaggctagagatcacataagtgttttcctgggaactctggggccctcatgactttgtaccttgtgttagtaatttttgaaaaaatagtaattttttactaattttaccacaagttcccactcctctcttgaaaaacatatgtaagggccaggacatcatctgagtccttgccatatattcctctatcataaagtcgatggcctgacctagacaagcatgtggcaaatacttgaaaaactacaaaataataataacattctgtagcctccacaaatcctcacagctatcctgtggatgagctatcccttcgatgaggtttataaggaagatggcaaagtatgattaatatcaacctgtaagagaaaagtgcctgggaatctctgatgagggagctgtaatcacttgcttcctttgtctgcctgggattcagtcgctcattcagcaaacgtaattaatgcctactggtcattggtcactgtgctcaacccaggggaatacaggtaaatcagacaaaccttcatttcccggaggtccaatgtcagtggaggaagagacatgcatacaggacacttcaaatcccaggctggctacagtaagggcagacatgctcctttccatagcagtctggtgttggacaggacggcaggcggatggactggcagccttctcttcctcatggcctcagcaaagccgcgtgtttgcctgttccctgctctgcggcatttctgcccagggcaaaactggctatataatttgcagggcccaggaaaaaagaaaaatgcaggtccacttgttcaaaaattattaaaaatttcagcagcaaagcatgaaagaaagtatggggctcttcccggtgtgtgtcggggggcgggggtgaggggctgtgcaagcctaaacatgtcctgcagtctcttctgtcttgcaccgtagtctgaaggcagccccaggtcctagtggactaactcagtggtagtaggacacacacagctgcacacaaatcagtgacacatttggttgagtgcctattgtgtacccagagctctgctaagtcttagggatacagtggagaccccaacagacacattttgtgtgtatgcatgtgtgtgtttgtccctgagcttacttcagtaggagagacccactgtaaacaagctcataaaaaatgcccaagataatcatcaatgagtgagcagtgttgtgaagaggacaaagcagagtgatgtgcttgggaggtggggtggtgaagagggtgttgtaggtgagtgtggtagagctaagcctcttcaaggatgcacacagccccttctggagcaacaggtgaggatgctgccagcgtctggcatcagcttggtacacaaatctttgccattccttctccttctgaagcaaatcagaagggtctagggaaagaagatgaagtccaagtatgcttgagactcttgacgtgtctcccctgaagtggggcactgccccttccccttccccctctgtgccttctcgtgtcttcttctgctatcacctggtgccaagtctccagaaagattcggccatccagtctcaaggaggtttccaaagcctcctctattccagttggtccctctcacactcagcttctggggccaaagcgggagccacattgtggcagtgcccccttggggttcagagaaaattctccagtgaatgtctccgcctggtcctctgttggcgggtcctccctgcccccaaatacctgggaatttgccctgtggaatacctcacatcagagcttgctggggagacccctgtctctcttcttctcggtgccaaggaaggtgctgagttacccggcttccttcatacgacaagacttgtattccgaaggactgaagattgtgggctgagagctgggaaaaccagagagggaggttgaagccaggacacttggggaagcaatggggtgcaacaggtggcggggaggaagccacggctggagagcacagtttgaccccgcggcgtgccagcgggcaggagggggtcgcctctggggcgtgagcacatccagccccacatcttgtccctgaagcagctccctgccggccacagcctggggcgcgagtttcccccgcccaggccccgcgccgcgggctcgccgcctcctccctccgcctcccccgcccctggctgtctggcagcgccgcagtggcggcgtggggacggggggcctcagcaaccgggctcccgcctccttcccgcgcccgcgcgagcctccccggctccccaccgcagcagccgtcacgtcgtcggagatttccatcggggcgggcctggggcggggagcgcgggacggggcggggcgagtgggaggagtgaaagttggagcccagcaaaagcctccgccccgcgctcagtgcggccagagcgtgagccgcgacctccgcgcaggtggtcgcgccggtctccgcggaaatgttgtccaaagttcttccagtcctcctaggcatcttattgatcctccagtcgaggtgagtctccatcccgggacccgggagcccttcgcgcccagctccctctccccgggagccgggacggctcccgggaccccagcggccccgcgttcctcgagccccgcgcccgctttgccccggccctaccgcgggctggccgagtcccgcgtcccctcgatgcgcgccggcctcggcccgcctcactgtaggatgggctcccggggtccttgagggggagctccaaaaggaagacaggacgccagaaggaagacgggactccagttcgcggattcccgctctcagaagcactgcggtggcctggtgacaagcactcctcggagtcttgcgcaggaacaggggagcggccccggggtgaccggccagggcaggcttcagctactgggggggccggaggtgcattttgagaagggggtgcgcgggctgagggagcttagctgcgccaaaaatgtgtgagtgttgcctcgtgtgttctctgctgctcacattttttttaagagtgcctactgagttccaggcactgcgccaggcaactctgacattacttgcttcccatgccgctgctcctgttggtgccagtctcaggcacgagctttggtttagtctaagggttcccgcaccagctatgccccctctccaccgctgacagcctcccacttccttaactcatccctagacaccctgctgggccttgggcagactggagccagaggccaggaatattattctcctctgaagtctgtggtttgggccgtagatttcaatccccttctcccctttcaggtttcccttgaacaaccatcttccctcacaccttctcctcgccctgagacttggctaggagggtcgtgccctggatttgtggctttttggggtggaagatgactgcttcgttttgttgttgttgttttgagatggttcctgctgtgtgtgaagtgtcacaaatttgcaagcttcctgatctgtggagctttctcgaagattccatggcactgggcttgtgtcttgtttgtctgttctggggagggagggtggcttctctccctaccccagattgcgttagctcatcagagaaggggatgtgtagctgcttgctggctcactggtgccctggagtggggctagcctcagcaggagcttgataaatgtctttctatgcgtgctagcaatttccagtcatccacatccctcaaaatgggatgtggactagttgagaaagctgacgtggtgactggctagggcaaaagatggctctggggtgggggaaataagaaggggtggtcagagaggaaaacagcagggaaaagggactggggaaatggaaactgcccttcaagcatagcaacctgtggtgtcaggaaagagctgaggaggtgacaatggggtgtactgggccacactgaaccagaagacctctccctggtccaggcttagcctcaaattagttgtgtgacttggggcacagtccttcctctatctgggcctcagtttgtccatctgtagaatgaaaaaaaagatctgatttagaaaaaaatccaacatcttttcttatgcgcccctcccccccccacttctcacaccaccaacagtcgactgtttgggagggggtagtgcagagattcaacttcatgctggaccattatgtctagagacatgtgaatgtctgaaaaactgccctggaaaatgccactattccaatgtgtgagtgtttttcaagtttttattctgtctagccccgaaagtgagcttaatggctggctggggaaaggtatgcattgtcagcagctctttaaccccaaggacctcaagatgaggttttgttttgtttgtttattgttgtgttttttttttttaactggcaaaagccaattttaggattaaagccaccttatgaccctctgatatcatttttattgcagacctagtctaggggcaggagggctttggtggtctcagtgctttcaggtttatttgtttgcctctgcacttttaaacttggggcagcggggaggatctcgtccatggatttcagacatctgggaggggctgcttcaggcgtttaggtggtcctgtctggcagtgctcagtctaccactgactgccagttctgattgtgccacgtttccagccacatcactcattttacagggtctcagggctccatttttcctcctctcttcccatagtcactggcccttatcttttgagatggctgggagtttggcctcagggaaagaggacatcttctagatatggcatttgaaagtagaaactgtattttccaagcccagttcttccctcgcccacaatgggaagtagccacttcagacatgagaaatggtgtggatttggcacatctgtatgccacttaagcaattctaacagcttgaaatactgcagaaaaaatgcattttgcttcttaagttggcagtcccttggtccgcaatacaggggtcatgccaacgtctcttgccctgtttaccccttattttaggaaacaaattgccttatggcttaaaaaaatccttttggaagtgtgacgtgccagtagaaaagcatagacatcatgagtgaacagctcagtggcttttcacaagtaaacaggcccgtgtaaccaacacctagatcaggaaatacagcattgcaaccccctcaccacacacacacacacacacacacacacacacacacacacacacacagacacacacacacacacacacacacacacacacacgcatgcatctccaaaatgcctgtccccgtacactttcctccccaaaggaaaccactctcctgccttccagtatcacagattaatatgggacgatggcttttaaaaagacttttaattataattttttaaagacatataaaggtagggggaacagtgcacccccattgtttgt

SEQ ID NO: 12642 - DNA, 6000 bp, Homo sapiens
tgcccggcttggcctcccaaagtgctgggattacaggcgtaagccactgcgctctgcctgaagttactttttacccagagccagttaccttcctttctccaagaggctcaacttacttcctacctttagagtaagcagcaaagagtggcttggttgtgggacatcatctcaaatcccaaccttgctgcttattagttgtgcaatcttagacaagttacttaacaaatatctcccactctcatctgtaaaatgtgcatcataactgcagagttgctctgagaatcaaattagacaatgagtatatatttaatttgcgtgcttcctgaaattttagtaggtgttcaattaatgttggttcccttttcccctactccttgtcacttactccaagtatgatcacatttagcattcatggttttaattactctcaggcaagcccaatggtatataggacatatagtaattttcattttgttacataagattttgaatgatgcatgccgcaagggagataatgcatagttgtgcttaaaaccatgaacttaaaaggagtaataatcttaatcttgatttctacttctaaccttgaccagctgtgaggctccaggcaagatcttctacctctctgagtgtggttcctcatttataaaatgaagagaatatataatgtatacaagtcctctggcacagagtaagtgccataaatggtagctgttattttctttaattcttcaggttggtatgcaggaactagtcacttttatttatttattttatgtttttgagacagggtctcactctgtcgcccaggctggagtgcagtggtgcaatctcagctcacagcaacctccgcctcctgggtccaagcgattctcgtgcctcagcctcccaagtagctgggactacaggcgcacaccaccacacccggctaattctttgtatttttagtagagacaggattttgccatgttggccagactggtctcgaactcctgggctcaagtgatccgcttgcctcagcctcccaaagtactgggattacaggcgtgaaccacagcacctggctgaaactagtcatttttgagacgaataaagtgagctccgccaactactcagtcacctcaagacgctgttattgttctctactctcctggaattatgttctgctacattatgtagaggaaattacatcaacctcggcatatcgacatttcaggctggataattttgtttgccgccaggcactgccctatgcgctgttggatatttaagcagcatccctgtctctaccaactggatgccagtggagtgcatctagcaaaaattgttgagtgaccccggggggcaaaagcgccctggctgaaaaccaccagtgtggcactatccacaaagaggggatttctccaggcactcaggaagcaaccctgtagaaggtcaaaggtttattcgagctactatttaggactatccactcttctgggctccatcatccattactatccataattcaaagttgaccccagaaaaatattttggggaggcccaatttgccatcagagatgcattaagtcgcaggaagggatgctggccatccacttctccctactctatacagtaatacaaagctgaatgtaaacatcaagaaatcttttttgtctgtccaaaaaactccagacaattcttgattactcacaacagattcactgtctatttttcattttcataacttcaccagaaaggtggaagccatttcttatcaaccaaataactccacacctagcatggagcctccaacagaggaggtaactcggcaaatgtttgttgaataaacgaaaagtcatatattctgcttaattaagtacaccactgaccaaaaaagaacctttctctgctcttgtcccacaggagctaaaagaaaagatcttttaagaaaaaacaattacagtctactcccttttaccccaaatccaaacaactagatagttcaattaacaaaaaaaagttcagtaggcaaaagctggggaaagcagccaaaaagataaggcctcaagttcgagcaagcaggaatatttggttcaactcccataaggttataaaagccaatgttgctggcaccggacgggggagaaaggagaggcatggggaagaagggaactaggaggtggagagtgggaaaacagggttcagtcacaggagattaccttccatgccttcaacaaacttttttaatgctcaaactttagaggtgagggttaatttcttacatgaaaacgtgatttacaaattttcaaatgcgtatcagcaaaatctttaagaacatctagcaagagaatttgatccgacttctgttaattcctgaaatgtctttcatgtcctagagggcaacagattctcaaaaagccaggtaaaagatacgccatttacaccttctgtccagagagaaacttaaagcccacttcctatcaacatgcttctctctgtaaaagattttttaccactttctgcattctactcctcagagaaaaaaacattatgcttaaattttattataaaaatatgctattttttcaattgctatttgggggcacagaatgaataccatactaacattataatacaatagtgtaaataaatgcatttttgtcggtctttgtgactaaaaatctatttccccttaaacatttccagtttaacacttccaggaaaaaaaataattattttgttttagcggtcgattcatttaatatatattaaattacctccaatgcactggtattatacaggaggaattttatcaatttaaatcttacacaatttttcttagtttcactcaaaaatctagacttggctgaaaaaaatattttccttttctgaaaattaaatatgggaatggtagcctagaatttcaaaaaccatatatggttacagaatctatatgatagtcttagactatgtacttatcgtgaggtggtttgcacaaatcatggcctatctgaccaatttcctgttgcataaagattatatttgcccttaaaaatgttaaataagcatttttaaagactgaaggtaaagacttgatcggaaccttatgtaaccaaaaatgggaaaacactatagtctcaccacataaaaggcaaatgcctgcttaatacgtattcttcttaagcaaacatgaacatgagtttgtaaaggcaaagctaccatcccagaagctcttgcttcttcagtgtaaggatcgggagggcccggttcttggagatgagctgaggcaggaaaggctttacaaaattccaggggggcccataatttaaacttgtgctattctgcaaatgttcacatttgcaaggaacaccgtaacgtttacattaaaactgtcttaagatgacggaaaaaattattcctgctgttctataagcttgccatagacttgataacccagagaagaattacaagcaattacaagatgatggctccaattaggaaaactggatctattccaaacccaaatcaaagggggctcggataatcccgaagggataatttaaatgaatacaaggggacttccagcaaatacatacgcttattctactacttctactcttctcaaaaccaagcgaaatgctacaaggatgtatctcctgcccttcaggaaattcaaaatccaaacctggcatcccattaataagccttgtccttttcttttcctaagggatctccctagtatggggtttttattgtaaaaggcaatcaaaacaaacctgagaaactcgcacattcccaaatgcagaaaataatacagcgctcaacacgaacgacacaacagtcgcttagccttgatgattttttaacctttacctagtcctggacgctaagagcagagaggaaaggaagagaaacttcgaaagcagaaacctctgtcccagagcctagaacagacggcaccttgtaaggatttcacgtttttcgaggcgggagaggtcacgccctgcagttttgaaaacccaccttctaaggctcaacccccgtgatagaaccttcctcgtgcttctctagattccacgctggagctgaaataccccctccccacccccattcgccaaacccgcgccatcccccttggacagaagaaccacagcgggccctccccctccctccttattctgcaccccacccccatcctccaaccaccccacaagcatcccagtcaagaaaaccgaggcgggccccctcacgtctactcctcgtcgccacccccgccatcctcgttgagcgaagcaaggcaggtctcccatctcccccctccacgatccccgccatccttgatgggaaaaccaagggagtcgacccaccgcttcatcctcacccgctccccacagcccctgctagctatcctggctgaaagaaccaagaggtgtccccacctcgccccaccccccactgcccgccatccttggtgacaaaaccagggcccccccttcactccctcctcactccccaccatcccccgcacaggaaaacatggagagcccccatttcactcccgatcccccccacctccaccccactgcctcttagtccccatcgagccaaaaacccagggaaggccgaggcacgcaccaggggggacctcgcactcgcagtccctcgtcccgcaccccgcagcccgggacggcccctggcccccggcctcagcgaggccgccgaagccgcagtacccagccctggaaggccaggcagccgggaccgcagggaccagccccgagcggcggcggcggcggggcagaagggcagccgctcccccgggacccaggacgccggcgggcgggaggcacacacgcgcgcacaagcggaaagaaagcgggcttactgcgtggggatgctcgcccgcgcagctgtctcggcggcggcggccgctgcctgcaccgaggccgaggcgcggcggtggcggcggcggctgcggactgagccccctccgccgggcggtggatgtagggcgcgggaggggcgcgaggggaggggtgcgcgcctgggaggcggggagggaaagaggggaggaagcaggagcgcgggggcgggcgcggctagccaggggcggggcggggcgcgcgcggggccgggctctgcccactgcacggaggctgtgtgcggggcgcgcgcgcgggagacggccggacgggcgtggggagaggggcggcttgccacgcaccccgcgcgcccacgtgcccccgccactggagagggccgggcacgcggagagggtggctgcggggacgcggtggcaggctctttcccgaggaccggctcggatccgaagaccgggaggagggcgggccgggggcgcctcgggccccctccctcgcgcagcggtccttagaggcctgcgggagtcacgaatcactgcaggcggctggggctggggaggtgggagcaacaaagacagccaagtgagggtggcgtctcgcctcaccggggtcctcgctaacctgcgcactccctgaaaagcggccccgcttcggggcccacgccgtttcggcctccgacttcggaacccggtggcttgcagcggcgccgaaaggcccaccgacgacccctccccttagtagcaagccggagggagctaaataagccccatccataatcccagtgccaccatccagagcgttttaacgtcactcagaaagcaccgatggcaaagcggcgcgtggcgtctcattcactcagcattcagtttactgagccctcgccatgtgccaagctcagtgccgggctctggtgataacagcgttgtctgcagacagtacgcaccctgccctgggagcttgtaatctagtgggggagacagacaataaagaagtgagaaaataatcaaatttggataaagcctgtgcaggaaaagtacaaatagtgtgattaggaaaggaggaggtgacatttaagctgaaccctgaaagatatgaaagagccaggaaaaagctttccagaaaacaagtcagaaggagg

SEQ ID NO: 12643 - DNA, 6000 bp, Homo sapiens
cagtttatatcatgttccaacaatgctctttgtttaatagataatatgaagataaatatccctcaaaattgcagctatatatcctaagctttctacatttctattgtgtgtgtgtgtgtatatatatatatatatatatataattttcttgcagatagataccaaagaattttactcttattttgaaaataacctaagtgtgtataagttctttccactcttggtatttatcatagtaccttgtttattttcttaaaagcacttaatatgacttttaatagttttatattttttgtctgttcttctggaggaatcttctctatgatgtttctttctttctctatttgtgatgagggtaacattcctggtctttctctattcccttcttcactcctcccttgagaggtaaaatgacttatgtgattggtgagctggaaggagaacctgggcatgggttcctttctccttgtgaggtagccatccccaaatgatagcagacgtctctcatgcaactctctagctaagtacagaaccaggccctgcatgcacaggtgcatacaccctaaggttgtacttgctgtttgcagctgaggagcatttagtaggtgccattttatatgaagggttaaatatcttgtgtattactccagtacaggacaatacctgcctcacttatgctctacttgagacaatggaggtgaatatatttcatttcaggattttttttaaattagggagaaattctgcctgctgattaaagtcatatcctccaacctaaccttttattttggtctcccatctgtacaatctttttgtcttaattctataataattcaaggcccagtatagatgattactattaattggtctccctcacatccacaatatctgatgcatgggatatgaatataaagaatgaaacagaagagtggaatttgagggagcaaaatgaacacatatacatttgtgtatacacacatgtatattttaaatatatgttttaaaataatatattaacgtgattcaaaaaatgaaaagaaggtatataataaaacaaaactttgccctaagttctactcctgttttatagatcttaaaattatatatattgtatttcatgccattaaactgcagcattctttcacaactatttataataacttttttcaataaaaataaggtgattacattacaaaaagttgaacaggaaaaaaaaaataagaagaaaagccactggttatctcacaatggtaacctcttaaatattctctttgtattttcttctagcccttcttgtaagcaagttttatacattgctgtgttcatggcactattagttcctttaaatgatcacatttcacctagtacatgactaagttaaattaagtgtttccattcttaggaaattttaatttaagtatataacatttcagattgatttttgggagtttacctttaaaatatcttccttcagaatctggagcattgtaggagtctatgaatatctgatccggtttatttgaaaggttgtttgacttacagttgggcactggggctgggtgcagtggctcacgcctccaatcccaaaactttgggaggccgaggcaggcagatcacttgagcccaggagttcgagaccagcctgggcaacatggacaacatggcaaaacctcgtttctacaaaaaatgcaaaaattagctgggcatggtggcacacaccaatagtcccagctactcaggaggctgagatcacttgagcctgggagtttgaggctgtagtgaactatgatggtgccactgcactccagcctgggtgacagagtgagactctgtctcaaaaaaaaaaaaaaattgggtacacaggatatatgtcgggttggtgaaatagtaattgtggtttttgccattgcaagtaatggcaccttcaagaaaagtagaagcttttgttgccagtgtcagttgtaaaaatcaaaactgcaaaactggactgagggtcagtacacatttttctgtaaagagtcaggcagtatgagtcctggtaatactgctatcaaggggatgaattggcgagcgagatgtgtttaagatgcaattcagctgctggcctggattccacatgcactgccatattggaagctgcacccctacatgaagagctatgggaaagggcaccacataatgcaagattggattgaaaatagctttgcggagaggctgcttctctccagtgtggcaggtggatggaagataccagtagccgccttccagaaatcttttggtgccaatgtgggcagactgaaggagtgtggcaaatattcctttccaggatagcttcaggatccaagttttgggactggctgtttattgtctcccccccgcccaccattgtttatctactaatattgcagaaaactgtaaagcacaaaaataaaccaaatcacgtgaattaaaaataaagatattcaagtaattaacagaataatgaatagtctcactttcatcccaccttttacccagggtgatatctacaacatctcttatatcaagtttggtcaccaccaatgatacagagctcattgtctcctgagcatgcctcttcctatttggaaacgtacaattggcatatacttacagtagaagcttgcatggctatgaaaaaggaagtgatgtcttgttggagagctgatctagtccagttaccatcaccgcaggcaggcagtggaagagaaaccagggattccctaaggggatcagagaggctgagggtgtgggcttgcagagagggctgtggcatttccactcccctaggacttgaacagggctgggaatgggttcctgtgcagattccccagtgcggccagctagggtgttgacaactgagttcatgctgatgagttggtccccattccttacgagtgatgatgtgttggagtgatattcttgtttgcatccctacctacctgaagtcaggtagagaagtgctcatagaggatacagttgtctttaagaaaggagactggcataatattttctggagggatgctccccaacttgcagacattctcaggactccgtcaagttgccactagagtaacagtagctggagctctagagaatatgatggtgtccctagccactgagagtgtatctggaacagaaactggtggctacttcttagccagagaagtctcatggtggaaggctggcttgagtacctgtgactggggagagagagagcagttttttgagcagtctgcacttgaatatattcctggggccaagcagaggctttggaagggaacaggatagagttactgcctattgggcccatgtccctaagtgagacagagcaaggcaaggcagcagagtgaggctggaggtgtacaccccggaggcagagccgaggcgaggtggaggaaatcagtcagcgtgtcacccatgtcaggggaagatgcagtgcagaggtccctggaggggcccttgaaggccccacaggagcattctgagtggagagcatctggacgtccactaccacagaagacctctcaaagcgggggaaccacaaggacccaggtccaggaagaataatttggcctttccttatctatctcacgcccccatcatcttgctttcctgtccctaagcgaggagaatgaagcatggtggaggggagcacaggcagggagggagtagggagtggagcccggaggaaatggctggagcccaccactcaggtccctgctctggccagaactgctggaaggagagcagctgtaggtgagaggcaggaaggcagttttggttagactggcctggatgccttagcagccggaagtgacaggaaagccacaccatctgccccagatgctgtcaagaggcgaggaagaaggagctgacagagtgcccaaagggaacagtgtgagcaacatcaacctcttccttcactgctgtccatgaggccagcccgtggaactacactgctgtggctggagccacaggattaagtgacctctactgaaagcctgctacgtgctgagcactgagattcgaatgaggactaagaccaggtcccacactgcaccaggtccacacccaggaacctagccctggtagacattgtagaaagatagatcaaatgtgacagcaacaagacaactctttcaaaatcatcattcacaatttctgatattaaatgctttttttgctattgctgtatttttttaggagcagaatgggagatagatggaaaaatgaagttaagggaaagctctggtttcattagttgaggttacttgaggttttcctggaacttggattgaagatggcaaccaagtgttttcaactgtttaaaatatgatttaggccagatttactaaaacagtttcacaggaattttaaaatgttgaaaggaatttctaaggaagctataatctaatccaaagtttagtctaattcccaggtcaactggaaacttaatatgcctagtttactcaaacatcaacttttagataatttatcatttttagcaagaaagataaagtctaactcaggcaaggctttctctttctgagttaaatggtgtagaatatataatggatttctgcctctgcctaattattcaaggataagtcttgtgatctaaaaaggaacaacgtgctgttgtatccacggtaaggggattaacggtcttgtgcttgtaaaacagcagcccagcgcctatttagtccttttgatttccagaaacaagagccagattcttaccactctttggaggcagttggccctgtctggcgccattgatgaaaaatggcagtggatccaattcttagagaaaccttcagaccagggctttccacacttgaggaaaaggagtaaacatttttacctctctttcatgatttgctgaaagaagttacttatgtatgaattaatataatttcttggtaaaaacaattggtcaaaatgattattaaagtgaattcaaataattccaccagcccactggctgctctgaaaagccatatttgcattgtttttgggtttggcttccagcttgctgcagctacacctgcccttctcggactctgcattattgccagtccccaaactctcggtttctttttagtccactgcattggtcactggtgtgccccaccatgtcagatgcaactgtggacaccagctccaagatcatcaccaaagtcttaaaggagaagaaagaagttgtggaggaggcagagaagggaagagatggtcctggtaatgggaacgctaatgaggaaaatgggaaacaggaggctgacaatgaggtagaagaagaataggaagaatatggggaggaaaaagaggaggaagaaggtgatggtgaggaagaggatgaagatgaagatgtggcagctgaggatgctatgggcaaatgggcagttgaagatgctgaggatgacaacgttgataccaagaagcagaagactgatgaggttgactagacagcaaaaaaggaaaagttaaattaaaaaaaagaaaaaaagagaaaaggccaccgtgatccattcactcttcaccctgtttcagaatctaagtgtagtcatcttgaagtagagaggcctgccgggcaagcactcttcaacacccaacccaaaccacaagaatttgcaacaggggaggaaaaaaaaccccaaacttccaaagctcagcttttttccttaaaagtacttcaagaaaaaaatttgttcatattttttatttacattgtttatttatttgtttttttttgagatggagtctcgctctgtcacccagggtggagtgcagtggcgccatcttggctcactgcaacttccatctcctcggttaacgcaattctcctgcctcagtttcccgagtagcaaggattacaggtgcctgccacaacgcctggctaatttttgtatttttagtagagacggggtttcaccatgttggccaggctgtctcgaactcctgacctcaggtgatctgccc

SEQ ID NO: 12644 - DNA, 6000 bp, Homo sapiens
agcaaataagatttgcagtgtcattaggaaggctatttgattttttttttttttttgagatggagtctcgctctgttgcccagactggagtacagtggtgcgatcttggctcactgcaacctctgcctcccaggttcaagtgattctcttggctcagcctcccgagtagctgggattactggcatgcgccaccacacctagctaatttttgtgtttttagtagagatggggtttcaccatgttggctaggctggtcttgaactcctgacctcaagtgatctgcccgcctcagcctctcaaagtgctgggattacaagcgtgagccaccgtgcccagctaggaaggctatttgaaatgaataatcatattaacctcacacaagtaacctaggatactttgtgcacatgtggtaatgaaaccctaagagagatattagtagatctggaaatggtccagagaagagcaattaaaatagtcaaaagagagaagcaattgatgttttaggaaagactaaaaaggtaaggaacctctttagcttacaaaaatagctagaagggtcaatagcaacaacaacaatggctgacatttacttagtgtttactatgtgtaagactattctaatcactttatatgtatgatctcactcaatgctgataacaacctaggcaggtaaacactattattatcctcatttcacagatgagaaaactgaggcgcagtgaagttaagtaacttctccaatctctcagaggtagaaaaggaaaagcaaggattcaaacccaaaactattccagagcatatgcttttaaccactgtagtgtagatcatccagcaagtaaacaaatcttaaagatatgaatcatgtaaccacagtactgtttactcagattcaaaacttaaaataccaaggtaccacttaatgcttcaagacaaatacttttttttattgtttgaatttcttacaatgagctcataccactttggtaatgaaaaaaaaaaagtaaacaggatgcgatttcaatattgaaagtactagtttactcggcaggtagtaaacttctagaatgtgttacccagagaggttgtacgaaatataaatagctcaaagaaaggttttgtgcctacaataggtatatatctcataaatatctataatagtcaggagcatattcctaaggaaagtggaattttgaaccaggtgggaaagaacagtgtgccagatcgagggagaatctgcatggaaaatggagacgtggataagcagtgtgtgaagatactcgtggagctgggtggcatgtaataagtcaattagcttgaagatgagtctgggatagcagtgctttctctattcagtgaactagcctgggaaacgtgataagtcttcacaaataacatctcagtaggaaacgctttagagaccattatccccatctttaataacatccacatcatttatccaaggtgcatatggaaaatggctctttctttggaaaaacaaacagcacttctggggtcacttaggaatttaaatgcactttctcatgaggtttgacttttgttctaagagctcatgaaaacagtgctaccactagctgtaccttgcacctttgggattaactgcaacttaaagaaccatgtatgagtgaacccaaggtacttatttgaatgatacagtccttggtaactgtgactatgaataccttggcttcccttcaggttggaatctacagaaaagacaattaaaatctcactccctgaacataatttaaccatgtattactagaaaatgtgaaacgaggctagtttctcttgcattcagtatatgggtaaagaggtaaaaaaagagtgagaaatgcatcttaagagggcaatagagaaaacaaaactcaatatctggacatgggtgatctccctgaagactaggataatgcattggtggtttatacaaataccagattcattattgaatttcttttttcctataacttcatctttttaaaggaaaagaaccagatctcaggtcctataagaaaactcctaatcattttctgcttcagataaattgatattaaaagggtttttttcttttttcttttttttttttggaaatggagtttcactcttgttgcccaggctggagtgcaatggcgtgatctcggctcactgcaacctccgcctcctgggttcaagcgattctcctgcctcagcctcctgagtagctggaattacaggggcccaccaccacgcccggcaaattttttgtatttttagtagagatggggtttcaccatgttggccaggctggtctggaagaaggggtaattttacaggggatctgaaaaggctaatttcaatctgaccattattttagacaaaacaaagttgtaagatttttttggtcaactatcttttctaccttattacctcccaggggcggagaaggaagcactttcctgtcaactacagagagattatctcctggttcttcctgattgtataaatagaactacatttgtaaggaatgcattatactgcacttgacatccatcaagtattgtgtaaaattctggcttagaggtgaagaaattggaaagggcccagaaaagaataatgaacatgactaaaggtttggaaaatgagatccaggacaaaaattatataagtaaagttgaggaaatatgattaattttagatgtcttcttctacttttttttttttttttttttggttagagaaagggtctcgctctgtcactcagcctgtagtgcagtggcataatcatggctcactgtagccttgaactcctgggatcaagcaatcctccttctttagcttcccaagtagctaggactacaagcatgtgctactatgcccagctaatgagatgtcttatttgtttttccagctttgaggaagctcaagcatatcagaaaatgtttacaatcaaaaggttgtcaaaatgtgagagtacatgcaagtccatggggatttttgagcccaattcaaaagattggaaggactctctgtagagatcctttcaaatagggatactgtcccaattattttccggaattcatttgtcattcaacaagcacttattgaatgcttatcacatgacagtcaaagttttaggtacagagaaatctctgttctctcagagcttacattccagtggggaaagacagacagtaaacagtaacacaacaaacataaatagttaaattatatagtatgttagaaggtgatataaaaagtagaacagaataaggggatcaggaataggaattttgcacatttaaaaggggtggtcaggataggacgcatctttgagcaaaagcaaattgatgcaactaaaacgtagaattctgattgggttaaaggaaaagaatggtgatcatactttgcatttaccttgtgatatgcagtttacaaagctttgccactcagtcaggggtcactggaggaactggtgcagaatttggaaaaaaaggatgaattccattttagccatattacgttttaagtgccacaggaaataaatgcctatctggtagtcagaaatgcagccctggagctaaggagagatatttgtgatagagatgtcgatttggaatcactgtaatacctttgctggctgaagcggtgggaatgaatgggtgagctccccaggggacagcagagtgatgaggtcaaggggagaagctcactattaaatgtctacatttcaggagatgaagacaaagaaaaatgggcagaggagtatacattttacccggatcagagatagagacaaggcaagaaggctgcgttattagcattttaaaatttcctctttcatttcttccttaatgtaagctggttcttttcacgacaaaacactccccccgcgctacacctctttttgcgcgaatctttctccaggaccttaaaatggtttactgagcacttcccgcgagccaagtatttggggttccagatcctgggattttgtcctgacactgcctcctcgttttaacacccttgcctccttctgcagtgccagtttccagggagctgaagcacaggaaaggcctacagaaaacaaaaggcacagtttcacaaaaagccaaaaccaaccaacccacaaaacacaactgtcaggggtctatatccagcacctaccgcctttccccaacgcccccagccccgcccctcggccccacctcctcccgcccctcggccccacctcctccccgccccctcggtcccactcctccgcgccccctcggtcccacctcctccccgcccctcggtcccacctcctccccgccccctcggccctcacccactctccgtcccctccgccccgccccctacgccccacccatcctcccgtaggccccgccctcggccccacctcctccccgcccctcggccccacctcctccccgcccctcggccccacctcctccccgcccctcggccccacccatcctccccgcaggccccgccactcgaccgcacccaccagggccccccccccccggctacgcccacccacccacccactggccccgcccctcggctacacccaccctcgtgcgggccccgcgcgtcttccccaccccgcccgtctgcctaccccgcccctcgcccccacacgttctctacgcaggcccccgtccctctgccccaccctgttctcgccactggccctgcccccatttgccggcgcccttcctcttcgcttccccgtagctcccgctttcgcctcttcgtttatgactccgttgggctccggccctcctagagaggcctccatagcgcaggttcgtgggttctcgcggacctttttccgtgtagctttctgcttcttcccggcattcctgtttccgttttctcacagccctctggcttttccaccactgagacactttgcgctcaggacttcagtgacgtcatctttctgcggcgcgcggacacccgccggtggaagaagaaacagctccgccgtccttcgcttcttttgctgggctgctgctccttcggcatcatggcgccgtcgctgtggaaggggctggtgggcatcggtctctttgccctagcccacgccgccttttccgctgcgcagcgtaagtgcctggggcacggggaccgcttcggtgtggaaccctaggggcggtgtgtgggcgcacttctaagggaccatcggaccgagtgtcagattaatggtcctttgagaccttacagtttggggtgactaagaaaatcagtgcaggagttcccagtggaaggttcggagtttgaatttggagagagtgtggcacctgaaattgcaggaaggttggaaggaggtgtctgggagagggttcagaataggagtctccaggaatccaggacaagtgatgtcagatccagcatggggcagatcaggcacagttgtgagattgaggactctggttgctcatggtcccacgacaaccaagtggacaacatcttgggcactcttgggctgtccaggcagagactgagtagttaagtgaccgattgcctcagggaggcactgtggtacaggagaaagagcactggactgggagtctaaaggactggttgttaaaaacttgcattaccgctacatctgtgtgacgttgggcaaaagatttgtgctacactgcgttatgaaattcagttttgggtcgctgtttgaaattgcgctgtgtttaggtgctagagatacagtgatgccctgagccagttcaaagtctaaaggaaaacaagtggatcaagaagtagttacaataaagtgatatgctaaaagtatataaggatgcatggaagcagggacagtcatattttgggggaactgggaggttaaggaaagtatcctagatccttgctgcttacagtgtgatcaacagaccagcatcatgagcaccacctggcaggtaattagaagatactcaggccagacctgttcaatcagaatctgggttttaataagatcccagggtgatttgtatg

SEQ ID NO: 12645 - DNA, 6000 bp, Homo sapiens
aaataaccagggtcaattttaaaagaaacattggtcatctccacctcttgctttattggaggtgaatggagcctacatacgcccacgtatttatacgaatctagtgaacttaagggatcttgcatgaatcaaaagaacgacacatgtgttttcttttcatgtgatctcatattctgtttaccccagagcagtagatccatagttatgtgcccagaaagtgcttttcaagagtgttgtggagtataaaaaacacggagaaatcaatttcgttttcccatctcaggagactcagtgcccttttgtgtggctcatggcaacagtaatctgaacttttaaatctacatgctctaaactctgaacgtttggaagtaaatagtaacatattcagaatgattgaactgctttatttgtcatcattaccatggttactaataagttatgaagctcccatatgtgaaattgctgaaatgagcattttatgaagcaatttatacagatatgaaggctctggaaacttactacttaaaacttgtacatcaagacaagcactaaatttgtgcaagactttgaaaagtataggaaaatataatatgctgagaggcaagaaccctagtatctagttctgttttccatttattttactgagatctccatcaaactatttaacaatgaatttgttacagtatgtaaccaatataaataagatttatgaatcaaaaaacagaaagaattgcaaattatgtccaagatcttcttctttgattaaacaacaaagataatataatcaaaatgagaaaattaatacacgtattagaaaatataaagagaacataacaacaaaagtagatattttatgggaaatactctataaagtccatgaggatactagaaaatcttaacagaatattttcttggaaattgtaaacagccaaaatggattcagaaagaggtataaaacctgaaataaatgataatgtaaggaatgaaaaattttgaagaactcttcctctaaaatgcacatggtccagattcttcatctgtgaactctttatttctggtacattatatgtatttctaaacatagacaatgttagaaatctttctgtatcattttcaagatggtaaaggctaggaaaaaaaacgcttcaagaatcagcacttgaaaaggaacctacctgatattcttttaagaaaataggtttaaaaatcataggggaaaaaccaggaattgattccagcagcatactaaaaataaattaaaaaaatgttttatctaagaattgaatcaatgtgaaaaatgtattaatgtaatacaccaaatggtaaaaattttaatagtgaaaagcagttgataaaatgcaacaccaattactgaggaaaataattttttgtaattacaaatataatgctcgtatcacatgacacatcatttttaaagccacttgccagattccgtgcagtagtggcattcctattagagtaaagaagaagacaagggtgcgtcttattcccatcattgtattactctgttctgatagtgccactgcagtgagaaaaaacaacatcctacaagaacatataaagagatccaaggctaaggaaggcgcattctaactatgaaaatatattagcattggtcatccattctggtagtattatggatgttttctacttttttttgcttctctatattgtctatacagaatttctattgcttttttcaatcattttaaaaatgagaacacaaatattgagaaatcataatgaaataagagattgtcttcccttttcagatgaatggcttacactgactgaaactcaatattttactgtcttcaattctagttacatagatgactaaaagcttatgaagaaatttgtcacttttaagaaatgcaagactaaaggaacctgaagaagaattctgtgtttctactctgggagctgaggcaggagggttgcttgagcccaggaggttgaggctgcactgagctaagatggtgccactgcactccagcctgggcatcagagcaagatcctgtctctattaaaaaaaaacaacaaacaacaacaaaacacagttaagttcaacaaagatgacaaagctgcataatagcatgaccccagttttgtttttaagaagaaatgtacatgtatttacacaaaaaagaaagcacaaggcagaaagatatgttccaaatatttagaaaacattgacaattggtcattcgttgacgctgatggaattacaggtgatttttacttttctccttgtgctgctttgtattttctaaaaagaatttctattgctctttttgaaaagatgatacaacaaacattgagaaaccatcattcaaaagagattgtcttctcaaatgaatgacttacactaagactcagtgttctattgtcttcaacccgagttacatcaatgactaagtaaaagccaaagaaagccacttgatacttttatgaagtgtaaggctaaaggaaagctgaagcagatttcttatttatttatttatttatttatttatttatttttgagatggagtctcgctctgttgccccggctggagtgcagtggcacgatctcggctcactgcaagctccgcctcccgggttcaagcaattctcctgcctcagcctcccgagtagctgggactacaggcacctgccaccacgcccggctaattatttgtacttttagtagagatggggtttcaccatcttggccaggctggtcttgaactcctgacctcatgatccacctgcctcggcctccgaaagtgctgggattacaggtgtgaggcactgtgcccagccgctgaagcagatttctatgttcttagcatagctttcttccttgatgtaagtaaaatgctttgttacaatctctatgtgtattgacttttccttcccatgatgactttatctagtttaacatttcccaagatgacttcatctagtctggctttatttttttcagatgttagctaggtgagctcttccttctggaaatttccactgcacctaatacagtgacattgctaggatggctggactaagttgtggctccctctccttttagtacagcttttcctgactccgtgtccttgcaaccaaggtgaaggagatgagaaaaagctttctcagttggatttagctgatggatgtgggtcctttacaataaaataccaccctcgcaaggagggagaaatgatgtgtttctcaaagtgctgcagaagtctcattgttgatattttcctcgttgttgctttgaaaatccaatgtttctatttaacaccagagtcacccaatctaattctgccattcatgacttttgaggaatggggtggaatttggggactgaatttatgaagaggcagcatggtagagaggaaagtcctgacatcaacctctgggcggggcgttgattggcatctgtggaatgcccaccggggaaagattcttttacacgcattatcttaattctcagagcatctctgaggctttgttgcaacttcagggttttttaaaacttttattttaggtttaggggtggatgtgcaggtttgttatataagtaaattgtatgtcactggagtttggtgtacagattattttgtcacccagataataagcatagtattcgataggtagtttttcgatcctctccctcctcccacccactatcctcaagtaggtacctgtgtctgttgttcccttctttgtgtccatgtgtactcaatgtttagctcccacttatcagtgagactgtggtatttgatcaattccaattttgaccaatggtgaccagagacacagagcagttgggtgtggtggagacagggttcaagtgtaagtcaacctagctggtaaagtgacacccatcccactcatcccattgctgccaatgacttcaacgctggagcctcagttccctcccgtatgagatgatgataacaattgtgaagtgtctgaggatcagagaaataacccagtgaaggtacttcagagtgggtaacttttaattactgttgtattgctgtactgaccaatgtagtcagtagccacatgtgcctacttaaattaaattaaacaaaaattccatttctcagctacactagctccatttccagtgctcaatggcctcctacctgtagtagctgccatattggatagtacagacacagaacattcccatcgccacagaatgtcccttggacagtgctgctctgtatcattaactttgatttaattcaagtgccagacctcagggctgaacacaatcattccctatgtgtgaatgtgcaggcacctgtgcagttttgttgtataggtaaattgtgtgtcactggagtttggtgtacagattattttgtcacccagataataagcatagtattcgataggtagtttttcgatcctctctctcctcccaccctctaaccttaagtaggtaagaggaagctccgaagctctcctgggatgttcacccgctgtggtgagagtcaggtgaggcccttcacggagggcaccctttgtttaccagagagaagggagtcacgtttgtttcctgaatgaagatagcctatctaagaaccaggtatctcagcctcgaaaaggtgggaagtgcatgtcaaggaaacctctagacaggactcaattcttcccatcatacacgtaaccagagaatcgcagaaggggtcggggaggattccaactttgagtcagcaaagaagacattcttttgaggtagagtcagagtagggaaaacaactaatctgttttccaaacaggttttcataaataactgacaggagatgggctgtttttatggaagtattaacccaaatgatgggtgttaatcattaaacctttttggtggtggctcgcttgtttctctgatattctaatccgggtcacagaatggctaaggcagatttaagtgcagcgtggattttttttttctcactttgccttgtgttttccaccctgaaagaatgttgtggctgctcttttttctggtgactgccattcatgctgaactctgtcaaccaggtatgtagccttgaaatttaaaaatagatgaacagttttctacatgtttgacaagtcatcgactgaaagaactctttatttttctaaatctgcagacatgttgtggcttgaaagttggggcagtgagtgtttaatgagtttgaaagaaaatattaaaccatctaagatgatttaggttaaacttccaggagtatttggggctgtttaattgtagttctttgttccattagtttgagttgcattacatattaggatttttcagactctgttttggcagatcctaatcatcatatactgctctttcttttttcttttctggcaggtgcagaaaatgcttttaaagtgagacttagtatcagaacagctctgggagataaagcagtaagtggagcacctgagtgttctttttaaattttgtttgctaataacactgtgctttctctaataatgggcctgtctgcatagttaccttaatcttgaataaattatttctaaagacctcaaatctgatttcttaaagatagattatagaataatatgaatttttaataaagtaggtttgcctaaagtatttaatcagtagtgtatgctaggcaacatgtgaagttttgtgccacacaaaacaacttaaaaaaccagcatctcaactcgggatagtgaagccaagtggcctgagtcagtcgttcaggtctggactgggtctactcctcaccgttgtggtcatttgaattttgttagcctcgattttctaccattgaaaataagggatagttctacccacataaagtctttcatagcacaaaaaatttccaatttgaacctgaagtttcttcaattattctcaattatcaaagtaacatatgaaatatatgcttatgaaatagaagtttaaaaaatagtcatagggcccatgtggctataggaatggtaaagatc

SEQ ID NO: 12646 - DNA, 6000 bp, Homo sapiens
ttgttgatattgtattttgataaacaaaagaatcccaaatattttgtgactaactagttaaatggttcaaagtatcaaaagagaaaaacagtttgtgaatttttagaaaaaaacattcaaaattcaatggaaaggaagattctactagctttttaagaagtctaacatatttagaataacttattcaactttattaaaaaacatttattaaaattcatttgacacaagtggatcacagctgaaaaactaaaacaggaggactttttaggaactacaaagaactatttgtagggaactatcttcactacaatgaactatgcagtgttagtttatagctctatcttttatttctaaatgtgatatacatttaagttcatcctgagtctggcaatcaaggtccttcaggatatagtcccaacgtaattttctgtccttcccttctattattctcctacatattctgttaaaaactaaactgcttattaaacatactctataatttcctgcctttgtaccttggagtgcattcttccttttgccctgacttattggatagtacagtgtagcgatttttaaaaagaagattctggccgggtatggtggctgactgacgtctgtaatgcaaacactttgagaggccaaggtgagctcacgggtcacgtgagctcaggagttcgagatcagcctgagcaacatagcgaaaccccgactctacaaaaaatacaaaaattagacgggcgcggtggtgtgcccctgtggtcccatctactcaggggcccgaggcaggatgattgcttgagtcccagagatggaagttgcagtgagcccagatcgggccactgcattccagcctgggagacagagtgagatcctgtttcaaaaataaataaataaataaaataataacaataaaaaatgaaaaagaagattctggagccacactgcctaaaatgtttgaatctggcactgtcacttaaataggccaagaataaacttaaagtaaggaaaatttaagagtttcagtaaaaacaaaatatattactgtcttttatttgagatttgtatttagaaaataaattttttaggccctttgtttttctttctctccttctcttttgctaggccaatgctaatggcaacattttccagacagagcctttgattttcccacattaacctgagtacttggggtcttcataaatagaggcatgattggaccatctactagccacaatgagctaaagcaactgacactccagaaccagctcattaccataacactggagccagtcaggggctgaaaaagttcaaccagattggctccagacccacagcacttaagcaacatcagtaaccttgagttaaagtcagactggttctaaggctgggatcatgctttctattttatttgtctccttcacagtatcaataaagatggcttttgacatcagttaattgtagaaaagtctaggttaaattagtgaaaactctgaattacagactattcaaatagataatagattttattaattcaagtatatatggtaaataaaatcagggtgataaagaaccaccaagcagggctgggcgcagtggttcacgtctgtaatcccagcactttgggaggctaaggtgggtggatcacctgaggtcagaagttcaagatcagcctggccaacatggcgataccccgactctactaaaaaacacaaaaattagccgggcatgatggcgggcgcctgtaatcccagctacctgggaggctgaggctggagaatcacttaacctgggaggtggccgttgcagtgagccgagatcatgccactgcactccagcctgggtgacagagagaaactcaattccctgccccccaaaaaaagtcaccaagcaatatccttttggaacttgtttaagtaaatagatatatccctatgtaaaatactgactttaacacaatgatttgcaagtactcaaaatctatttattctctaaataaatttggcatttcttctgcaactttatttttatttatttattttttttaaatcagctttcctagattgaagcaactttatttatatagtgccttatttagcaattcctccattaaaattcttgagaacacaacagtgatatcatctctgcctatgtctgaattaaattataatatactgactaattgctttctgctttgcattttttgataactatactcatcaatgatttcccacctattaaaaataattcattttgaatttatctttacaatactaagaatggtttctttttcaggtctctaactttcgctaccatcaaatgtactaactcataagtaactatgggaacttaacagttttcgtttcaaatttaaaatatatttaaggaagatgctttttgaaagtacctagaatctttcatagaaaaagaagtcaagaaattaaatagttattgattactaaatcaaaaaaagtgtcttttggctgggcgcggtggtgcatgcctgtaaacccagcactttgggaggccgaggccggcggatcacttgaggtcaggagtttgagaccagcttgccaacagggtgaaaccccgtctctactacaaatacaaaaattagccaggcatagtggcacgcacctgtaatcccatctcctcgggtggctgaggcacaagaatcgcttgaacccgggaggtggaagttgcagtgagccgagatcgcaccactgcattccagcctgggcgacagagcgagactccgtctcaaaaaaaaaaaaaaattgcgtcttttgatttaatatttcctctgttttagtcatttattcataaggagtctgtaccatcccaatcctttttgaaaatggaggggtttttttgtttttttgtttttgagacagggtcttgctgtagcccaggctggagtgcagtggcgcgatctcggctcactgcagcctcgacctccctggctcaagtaatcttcccacctcagcctcccaagtagctgggactacaggctgtgccactgcacctggctaatttttgtgttatttgtagagacggggtttcgccggctaatttttgttattacttgtagagacggggcttcaccgtgtagcccagatgggtctcgaactcctgagctcaagtgatccctcgcttaggactctcaaagtgctgagttgacagaaaaattagttttaatatggagaggcaaatccttggtatctgtagaacccatcctgaattatcgaatgctctatagtacatttcagacaaacaatacacttaatatttttttctcttcgtttatctatctcaagtctcatactccacctctatctaaaaagaagttggagggactctttttagatacaggtggagtatgagaactcttttgtttttgagaccacatctcactctgtcgcccaggctagagtgcagtggcgccatcacggctcgctgcagcctcgatctccagggctcaggtgattctcccacctcagcatccagacaggcaggcgccaacacacccggctaatttttgtatttttagtggagaccaggtttcgccatattgcccaggctggtctcgaactcctgacctcaagtgatctgcccgcctcggcctcccaaagtgctgggattacaggcgggagccaccgcgctcggcctggcaaattttcttgctgtgctttaaattttctccctagtcctatttttttcctttcttcaggaaatatggtctctgttctgaatccttatcacaagaagctcttaaggagtaatgactcctccctctttggtcaaactaggttctctcccttcactcagatttaatttttttggtcacacttccccaccttttgatagttacagtcaaacgacatgtaatacttactctcccaatcagcccttggcgagtagcaggtcttgtaggtacaagtagtctctgcacagtacactcgggcccaccaagtgaaggtctgattacttctcactcctcagcttatctaaccaagcaacactggaaccctcagaccacagcgttcaagttgtcgcacaaaggacattattcacgtagtaagtactggggccatttttttttcagtctgaagtgtgatatcccccaaaacatttcctaaccaaggcatgctaggccaggataaatcgtgcctgcacatataaaacagaagggtacagtggctgctccagtttggagcacccaggtcctcctataagaaaatatggtttacattcccaaattagtcattattaatgggaagggagaaccaataagtgcatgtgagagttgagagaagaccagttgggaaactttcagatgtttacttttgccttctgacagtcgatcagcatccatctttcactcacatcctgtaaaaccgagttttgttaaagcagcgtcctgtttctagagtctaggatagcgggatttagtgaagagtctaggatagcgggatttagggaacgggtcttctccaccttgcccaacttgtggctttttggggtatctcgcagagttataaatatctagagttctccctagtttttctgatagccacagcatctgaggaccctgtctttccccgtcttgaggttcgagtttcctcaccttggtcagttttcccgtctctggctaggctccgaaaatagactgtgcagagcgtggcgtctctccgttgctagggtaacaactttgttttgttcccgccccccacctgccaacctccgggttcccgcttgacttttctggccaatcatagaagagtctcatctgagactgcactggaatcgaccaatccgagcgcgtccaggtcagggtcactggtcgccctttctagttaaccaggtcgaccccttttaagcctcagtctcggttagcttcacttcagcgggaacctgcccactaaggaggccgattctttccggctcgagcaggtccggacccgcccctctggcgtctagcagtctcggaggcctgcccgtatagttcagggccggacagcgagcggcggcgacttgccagtaaggtaagtttgtggggttttcgtttgtcccgttcgtcagcaggcttcgctctcttttgcgcttttcccgcgcgtgaattcccgatctgaggactcgaactccagccgatctggagagacgggggcagaagggtagggtcagtgggccgggggtagagaaggttttgctacagtcctccacgcccccagcctttcacgtctcccccacgcgacagaaacacgtgttgtgcttctgtcttggcttgtcgcgggcgatagtgtgtttgtatgtgtgcaggtgggatcgcgctttttattctcctctgtaggcaaggcttccgggccccaagtccccgggggagcacctggtcaactgccacccggttcctgtggggcactggcttgagctacgtgtcgttcccactctaaggaacatcgcgactccgggagctctgcttttcccgcctcggagtggagaaaagcaggcgcgccgctcgcttgccactgctagggaatctggttgtcttaagttcacttagagatagagttgttaccctagtttcccataaattccgtggcttggttttaaacaaaggggcggcggggggatggcgtaataaatatttggagtattcaggactgattagccatgatcaatagtaggaccccacagaaggttttaatgaatggttacttttggttattcaggtattggaatttgattatgaatgaactaaactgcttcccttctttctatataccatgcatttcttaacgaccatcccatctggcataagagatagtgaagtttgattaatttgtcccttctacttgttcttatctacagtaaacaaaaaatgggggtagaataaggttattggctaaagtaacgttattggccttttggccaaattaccaataccttaattccgcttattactgtgaatgatcagagtttagctgtcttgcattttgctaattc

SEQ ID NO: 12647 - DNA, 6000 bp, Homo sapiens
gtgatgtgcaccaatagagaaatgcttttcaaactgacccattaaatcaatggggccataatttttaagcctgccagtcagttaaatgtattaattagatagtatcatcaacatctggtattgaggtagatttagaattggcagactcagaaaaacaaatggaattaaatttttccttgaacaaagtggttgtttgactgatttggaaagcttattttagaacatttcaggattacaggaactattagagtcacaattccagatcagcaactctgtgacccctaatgcagctgattaacttcattgtagttcatcggaagaaataaagactaatgatttgatcttctttaggggtttcatgagtcacctaaagcctattaattctttcataaatatagctttagacattctgggtcttagaaagggaaaggtaaaagaccatctcttggttttatcagctagtgtttatctacaatagtgtttacctgatatttactttaaaaaacaaggaaaacactattgttactccctgtcacctgtctctgaaggaactgaattcgaaggtattgtagctcttttaagcccaggttaaaaattcgtatcatgtttcacatcgtcaaggcttcccaggtcaagagcagcttgctgcgaaaaggtcaattttacaattttacccagctttatccctacctgtacttcactcctacatcctttagtaaaaactgcattactttgaagttgaaggttgcattcaggcaggcagagcagctttactcccaccctgagttggagcagataatggattccgcagaacaggtgtccaactggccaaggtcatcgcacaatgagtcagtgtaaatatccaaattgcagttgtggacaaactcagcacatgacaggtgcagttgataagtgtccttttgtctaggtgtcacagtggtctgaggacacggaacaaatcaaatgaaaaaggctgtgcctgctttagaaggttatgtcttcactaatcctgtagcaaccagcaggctggcattaatctgtgcaaatctctgctctggtgtgtttggacgattttgtttttcaggagctatttgttcaggggaaaaaatggaaagtggaaagatgaagtcagttttctcgtgatgttttcaaggatgaatacttgtgaaggacaagcacgcaatctcttcttagaaaaagtcaatccagagaacctagaaggtccttcggagtggcaaatagaagatcgcaacttgaaggaaaacaaaagtaagaaaatcggaagactcaacccctgagaaagatgagaaactatgactaatatgttacaaattcatggttctcagcactgcacttaagtttcaacctcagataatgcctaaaattcaaaggcatcagatatgtgtgaggtgggaatgattgctcacagaaaatggatttaagtttctagaattaaaaaaaaatctagttgatgagatgaaacaaatttagaaagatacaggaccaaggtgcatgtattaaaactagtttttagcactgcttattttctagatgaaaaggctaacataatgttaaatactttgctcacagttaaatcattgaaagtaaatgagtgtaaatttgtttatttatatcccaatgtaatggaagagtcagcaaacatttctgaaaatggccatgttaaaaaaaaataactctcttacagacttagaacagagtgtacatatcaatattggttcatagaattttgtccccacttcagaaatgagaagggtgaagttaaatgacttgtttaatgttattttgttagagtggaagaacccaaattcaaggtcaggtcttttgactgttaacccacttttcctgttactttaccacagtccttgtagcactctgagtagcaaaacaggcctccagaaaatgctgagtctaacaaggcctactacattgtcctccttccagggtcagcgcagcgatagctgggtgggagtgctcggcctgcccattggcagtaggagccgtagccttctctctccctcaaggtacagtttgccaacaaatgtattttttgagcacctactacgtgtcagaaatcattctaattgctgggacacaatacagagtgacagattccttgccctcaaaggacttttgtattagtggaggagacacaatcagtaagcatcgaacaactaaataaatcatgtcaggtgttgggaggaaaaggaaatcgtgactagctctggcaacataaggtagggacaaaggtcggctgggtttttcagctaggctggttggtgggttcattaagccactgatctcagtgcctgtgtggcacttgagggatgaggctgtatggcgagtgaagactgccacaatactgctaaagcagtaacgacgataccccaaacagtagcttgaatactggaaatggcaaataatgaaatagcccatgaaacaatattgccaacacacaattgtgtgaaccaggtgacccatccagtgtttagagtctgggccaagaaatgtggacacacaaagaaagtaggataaaatcttctgggtggaaattgtgtgtgtgtgaggcttccctaggagagacagaactgtggcagtgctggtacaggaacacctcctaactctgaagttattctgcgttgtcctaaaatggttgatacatccaccacttgacacataacaaacattattataaacactttacacaaattaactcatgtataaagattacctcacagacgctgttgtgcatgtttgacaaatgaagaaactgaggcacaaacagcttaagtaactttcctgtgataggctgaatagtgtccaaagatgtccatgtcctaacctttagaacctgtgcatttgttaacttatagaatgaaaaggcctttgcatatgtgatcaagttaagaatttttggatagagatattatcttggattatctgagtgggtccattatagtcacaaagattcttacaagaatcagagaaggagatggaagcagaggccagagttatgtgatcagatattaaggagcttaggcagcttcaagaagctagaataagcaaggaaatagattctgtcctagaacttccagaagaaatgtcaccttgactttagctcagtgaaactgatttcagacttctggcttccagaattataacataaaaaattcgtgttgtttgtgttgacttaagccactacatttgtggtaagtaaagcagcgacaaagaaactaacacattgcccaaggttatgatgctacaaagtggcagggccaggattaaaactgaggcaatctagtgctagttccagggatttaaccactgtgctatttagggcctctcacaggcagaatgaaatttaacgctgcaagcaaaatgggggtctcctaggttttcctcttatgctgagaattccaggtcctggagaagaagaaaaagagaaagaaagagagagagagaaggagtgagagagggagggagggagggagggagggaggaaggaaggaaggaaggaaggaaggaaaggaaggaaggaaggaaggaaggaaggaaaggaaggaaggaaggaaggaaggaaggaaggaaggaaggaaggaaaagaaacagcaaaaaaagaaagagggaggatgggagggagggaaaaagtaaaaatgattctgtatcagctggtatataccaacacccttccctgccccatgtcttcacagctgtgtggcaagtgaagactaatggatccaggcttcctgatgcttctatttatcattattcacttaggaagggtgggaaaagaaatactaattacacacttaccaatggaatacttttacaaggatcaaaatttctcactgcggccatgaaaaagaatgagagctggcggccatcatgcttagcaaagtaatgcaggaacagaaaaccaaatatcacatgttctcacttgcaagtgggagctaaataaagagatcacctggacactaggaggggaacaacagacactggaacctacttgaaggtggagggtgggaagagggagagaatgagaaaaaatacctattggatactattacctgggtgatgaaataatctgtacaccaaacccccacgacaagcaattcacttatataacaaacccgcacatgtactcctgaacctaaaagttaaaagaaaaaaaaatatatactaaaatgaaaacaattctcactgtaacaatattatcccctcgtaattattatattcctaagttttaggcacttttacatcctgctcgctgcccccagctctcttaacacagcatccaggacatagtgggcgcttataaatactgatggcattaaactgagcgcttatgatagcatatttagagcagtgcttttcaaacgtctaggtgcatgtgaatccctggggacaccgttaaaatgcagattcagagttagaaagtctggttggagcctgagattgggcatttccaccgagttcccatatgatgcttgtctatgttctgtatttttcaaggtctcagaaaatgagacctccctatccatatacaaatataagtcacacaaactgtgataatttaatgaaagtttacaaagagcatagaagtagatgtttcctcttttcccctgccctcccaataaagggaacaaattagatgcgagggttcaatggaaagagttgcaacagcatccaggcgctcgctctcctccggtcttcctgagacagggaaaggggtaatgagaggaaggaggaaagtgtccaggagctcccacgctgctgttcttccatttccagcttttaaagagcacccgccccttcgaaccaccgaggtcatgggcgaacacaccggagcgcagcaccgcgcccccccgcacacaccgcccgcctccgcgcccttgcccagaccgaggcggccgacgcgcctgcgtgcgcgctaggtataaataggtcccaggaggcagccactgggcagaactgggctacgggcgccgcgggccatggcgggcgagaaccaccagtggcagggcagcatcctctacaacatgcttatgagcgcgaagcaaacgcgcgcggctcctgaggctccagagacgcggctggtggatcagtgctggggctgttcgtgcggcgatgagcccggggtgggcagagaggggctgctgggcgggcggaacgtggcgctcctgtaccgctgctgcttttgcggtaaagaccacccacggcagggcagcatcctctacagcatgctgacgagcgcaaagcaaacgtacgcggcaccgaaggcgcccgaggcgacgctgggtccgtgctggggctgttcgtgcggctctgatcccggggtgggcagagcggggcttccgggtgggcggcccgtggcactcctgtaccgctgctgcttttgtggtgaagaccacccgcggcagggcagcatcctctacagcttgctcactagctcaaagcaaacgcacgtggctccggcagcgcccgaggcacggccagggggcgcgtggtgggaccgctcctacttcgcgcagaggccagggggtaaagaggcgctaccaggcgggcgggccacggcgcttctgtaccgctgctgcttttgcggtgaagaccacccgcagcagggcagcaccctctactgcgtgcccacgagcacaaatcaagcgcaggcggctccggaggagcggccgagggccccctggtgggacacctcctctggtgcgctgcggccggtggcgctcaagagtccacaggtggtctgcgaggcagcctcagcgggcctgttgaagacgctgcgcttcgtcaagtacttgccctgcttccaggtgctgcccctggaccagcagctggtgctggtgcgcaactgctgggcgtccctgctcatgcttgagctggcccaggaccgcttgcagttcgagactgtggaagtctcggagcccagcatgctgcagaagatcctcaccaccaggcggcgggagaccgggg

SEQ ID NO: 12648 - DNA, 6000 bp, Homo sapiens
tggtctcgaactcctgggctcaggtgatctgcccgcttcggcctcccaaagtgctgagattacaggcatgagccaccgtgcccggcttttgtgtgcttttaaaatggacacaagtggtatcagaaagattgcttttctttattcagtattgtttttaagatgtattcatgtcagtttacgtagctgtaatacatttgaacagttacataaaaatatatttatttatttatttatttttatttttgggacagagtcttgctctgtcactcaggctggagtgcagtggcggatctcggctcactgcaactgcgcctcccgggttcaagcaattcttgtgcctcggtctcccaagcagttgggattacaggcttgcaccaccacgctcagctaatttgtttttgttgttgttgttgttgttgttgtttttgtatttttagtagagacggagttttcatcatgttggccaggctggtctggaactcctggcctcaagcaattagctggcctcagcctcccaaagtgctgggattacaggtataagccaccatgcctgggcaaaaatatagtttacttatctattctcctactgagagacagttaagattgttcatattttcttgcttctacaaataaagctgcaatgaagttccttgtacatgcctaatgtaatatagtcaggaaagcctctctgaggattttatcattaaactgatacttgaaggatgagaagccagccaggaaacaatatttcaagtatctgcaacataatgcaagctatcttcagtgggagggaatggcatgtactatgtagtgaagttacagtgtagtaagggaataagtggcaggagatggggagtttattgaaatttctgtgagttgaataggtatctttaaaaatggaaaagtactatttatcaaaaagaatgttctaaagaaaaataaggtgaaaattcagcaataggactatgaaacttactgtgcttgaattattggagaccagagaggtaaagtaaatgaaagctcctgagtgcagtgatatcccacctcccaaccagatagtgttaccaaaatgccaggggtttggtctaggtccccattgctccctgcacagaaagccaatcactgagacaacgactgttgccagggaagtagtcattccatctctctgactgactaaaattgggggtttatatagtgggaaaggaatgtaactacatgtgggtaaacaggaattagggagaggtaaggaaatcatgaaggatgagggacctggcttctcattgtctagatatggtgacctggtttcagtttcttgaaactatctgggaggcatgaaggttattttcccgaggaaggaactcagttaagacaaatataagtttcaagctttaaaactggaagggtcaatatctatgtttattttagaagactgtaaacatcggttctatgggacaattgggctggtttcagtaacatagccacttggcaaacataggaagggctagtaaaataaattaatggggaaggaaagaaaatgttagcatgtttggctgagttactaaataaatgacccatattcaaaccacttttggaaagtttccaatttatcattttaaagcttacagtacaatatttgacactatagtataggtacatacttctttcattcacatttttcagttgttcccctatttggtgatcacctgattcacacttcagatcgtttcagaactagcagcatgatattttctcagctcttaaattgacttaaatgcttcagatgtttcatgagattaatctgattttaacaaaaggaacaaaaaatattgaaaacatggagaaaaaggggaatttcctttaaagctcttttgatggaaaaatgaaattatgatacatatggtttcatttaatgtacagctgcccctcagactcaaaagggttgaaaaggaattgaaaagtaatttttttcattattttgataagatttgcaatcacttctatccaaaagcaagagcagaaactgcattcattcaacagatgcggcattcatagtgaagtcgagaggaggaaccatgggcatggtctgaccaacctagaaaaaaatgagaacattgtaatggctttgcatttagaataaaacccaaacttcttactgtggcctctaaagccattagcagagtagcctttgcctgcctctctatgcaaattaaaaccacacaattaatttgtgtagggagcaaacaaattttgttagaatgtctataatcaaaaagatgaaagataacaagtgttggtgaaggtgtggagaaaaaggaacccttgtacactattgatgtgaatgtaaatttgtagtacacccattttggaaaacagtatggaggttccttaagaaactaaaaatagaattactacaggatgcagcaatcttacttctgggtatatatccaaaggaactgaaatcagtatgttgaagagatatctgcactcccatgttcattgcaccattattcataatagctaagatgcggaatcaaagtgtccatcaaccaatgaatgaattaaaaaatgtggtataaatatacaacagaatactattcagccttaaaaaagaatgaaattcaggccgggcatggtggctcatgcctgtaatcccagcactttgggaggccaaggtgggtggatcacctgaggtcaggagtttgagaccagcctggccaacatggcgaaaccccatctctactaaaaatataaaaatttaaaaaaaattagctgggcgtggtggcacgtgcctgtaatcccagctactcaggaggctgaggcaggagaatcgcttgaacttgggacgcgaggttgtagtgagccaagatcgcgtcactgcattccagcctgggcgacagagcgagactctgtctcaaaaaaaaaaaaaaaaaaaaaaagtaaagagtagaatggtggttaccaccagaggccgggtaggacagtgggtggagaaaggggaaatattagtcaaagggtacaaagtttcagttagataggcggaataagttctggtgatctattgcacagcaatgtgactacaattagcaataaccttttgtatcttccaaagttgctaaaagtggattttaaatgttctcaccaaaagaagtaagtatgtatatcatttgatagatgttaatagcctgatttgctcattccacaatggttacatgtttcaaaacatcacattgtatgccataagtatatactatcaattaaaaataaaaataatatttaaaaataaggtagctgccttccagcaactgtatctgtaaggggtataaataatcccaatgcattttaataactagcacaatgatattctgtttcaatgtgctttaggaccaccaagggagggaacaagtgagcttacaccttcagaagcagatgaaccgctttcaacaatgataaagaattacccaagtgatgacagtaagaatattctaaccttagggaacatcatgaacatctcttacaccaagaggagatgaaactgcaaaaagatgtttgaaaggggtcgcagcaacgaatgcttctaatagtgaatctctacgttagggcatgttagaatcaccttaggaaagttcaaaaattccccaagcccagacctcaagccagaccaattaaatctgaatctacaggggtggaacccatatatctaagtatttttttaaaaaacagctcctcagataattgcaaagtgcagccaaggttgagaatcgctgttttaaagcaggtacaaaaaattaaacgtggactttgatgggggggacgggagtgtcggtaggcatggatgaactgaaaagcccttcagaatagagcggtgactgcaagagcaaggacaaaaactatatgagagcccgtggcaggggatttaagggccgtttttgtgtgggactgacaggatttgggggatggtgacgacctcagcatacacccgactctattaaaattgagttactctgccagcggccctgtctctacccgcaatcatattttctagcaccttttcccacagtttggaaaaaaaaaaaaaggggcgaaaacgttctcccacgtaacgcgccgtggacgtgtatgggaggagcaaaggcctgagaatcacaagcgcgcggccgctcccatttcttcgcgattccagaaccagaattcacgaacatttagaggaggcctcccctggctgtgtttgtgccccacttaggaagcgatggtggatttctctgggcaaattgtcgcctttacaacgccagggggcggaggcgggagggagagcggcgagggtaagggcggggcaactgctgacgttcccggtgacgactccggctcagccctcaccctggtttccggcggcgcgcggctcccttttccgctctcccgcgcgctcacaggtaccgcctcactcccacgcgccccccagcgctgcggtgctagacagctgagagaacagacacagacctgtcggaaggtcctctgcaggtcccccttccgctctgccgatcgacttccgcctcgggcagtcaacatgtacgttgcggctgtctggcgaagctgcttctgagcgtttgcggaggcgcagcttcccctctgcggggccgccctgcttcccccccatccccgcctccccccgcccctcgctcctgtccctggggtcggcggacttctcgctacatgggggcgggcttccgcggtcggcgcacggcttcctgttctgaggcggcccggcggtaggcggtggcgactctgcccgctcccgtttcggcgcggtgaccgagcgcccgggaggctcgaggaccgcatcgtgtgccgttgcgccaagcccggtcctgcgccgccatggccccagtgcagctggagaaccaccagctggtcccgcccggaggcggcggcgggggcagcggcggacccccgtcagccccagcccctcctcccccgggagccgccgtggcggcggccgctgcagctgcggctagcccgggctaccggctgagcaccctcattgaatttctgctgcaccgggcctactcggagcttatggtgttgacggacctgtaagtgccccgaaacccctgcctgttccccagccccccttcccgcccaaccggctgagacgtttgcacctccctctccccgagaggctgctgtgttctccgctggactgcttagtctagaatttttgaactcctggggttcagcagaggtggagaagaagctttgtatctggggtcttcctggcaacgatgcaacagagacttgttaattttgcgtgttgttacacttccactgaaaattgtgtgaaatttttgtccgagttcccaacagaactctcttgatttcttggctggaatacataatattcgagcttttagaaaaaactctatagatgggaaatttgtattacagcctcttgacgatacgttttaaatgtaagctgttattgcttctaagttaatgcaggagctacatacgttgtgtataaaatacaaatttgaattcaaagtactttttttctggaacttttgagtgtttgaggtcttaatgaagttagtgtgagtaaaatttttttgtaagtagtctgttatttcttggagtatgaagggggtttataaatcacctagttacccatgaaatgccttggggcatgattaagttgttaatcccttcagaataggatcagaatatactaacgaatttcagtgtgtgaagaaaaggcaccgtaacattttgggactctgttgtacatcttataacccaggttcagaaaaagttaatcagaattttattttttatctattgcaagacttcagatcagggttatcaattgagatacattagtatgcagatattaggctctaaagcgtcacagtaatttgtttttagagactgataacagatacttgtttgcagatgactgaaagagtaggctctacttaactcctgtaaaacgtcattctcagttttgat

SEQ ID NO: 12649 - DNA, 6000 bp, Homo sapiens
catggccttcagaataaagcccaagctccaatgatcaattccagccacactggatatgtcatacgcatttcctttctctggaattagcctcttcctaactttctgtaggctaaaatccttcagaaggcaaaaccccatctctacaaaaatacaaaaattagccacgtttggtagcactcacctgtagtcccagctactcaggtggctgaggcacaagaatcacttgaacccaggaggcagaggttgcagtgaactgagatcgcacactgcactccagccagagtgacagagcaagactctgcctaaaaaataaaataaataaaataaataaatccttcagggctacatgcctattagaatagccaaaatgggctgggcaaggtggctcacaccttgcctgaaatcccagcactttgggaggctgaggcgagtgggttgcttgagcccaggagttggagaccagcctgggcaacacagcaagatcccatctcttgtttaaaaaaaaaaaaaaaaaaaaaagaggccgggcatggtggctcatgcctgtaatcccagcactttggaaggccaaggtgagtggatcatttgaggtcaggagttcaagaccagcctggcctacatggtgaaaccccgtctctactaaaaaatacaaaaattagccaggcaatagtggcgcattcctgtaatcccagctacttgagaggctaaggcaggagaactgcttgagcctgggaggcggaggttgcagtgagctgagattgcaccactgcactccagtctgggtgacagagtgagaccctgtctcaaaaaaaaaaaaaaaaattgcccaaatccggaacacggactacaccaaatgctggcaaggatgtggagcaacaggaacaactctcacttgttgctgggggaaatgcaaaaatggtacggtacagccactggggaagacggtttggcagtttcctataaaactaaacatactctttcagcaatcatgttccttggtattaacaaaggagtggaggccgggcgcggtggctcacgcctgtaatcccagcactttgggaggctgagacgggcggatcacgaggtcaggagatcgagaccatcctggctaacacggtgaaaccccgtctctactaaaaatacaaaaattagccgggcatggtggcgcgtgcctgtagtcccagctacacaggaggctgaggcaggagaatggcgtgaacccgggaggtggagcttgcagtgagtcgagatcgcgccactgcactccagcctgggcgacagagcgaaacttcgtctcaaaaaaaaaaaaaaaaaaaaaaaaaacaaaggagtggaagacttgtgttcacataaaaacctgcagacggatgtttatagcagtttcattcataattgcccaaacttggaagcaacgaaggtgtctttcagtaggtttatggataaactgtggtacatcctgaaagtgaaatattattcggtgcaaaaagaaatgagctattaaggccgtgaagagacatgggagaaaacttaaatacatatgactaagtgaaagaagccatgcagaaaaggccacctactataggattccaactatatgacattctggaaagggcgaaactatggagacagtaaaaagatcaacggttgccaggggttgtcggagagggaaggatgaataggtggagcagaaaaagtttttaggtcagtgaaaatattctgtaagatactacaatggtggacacatgttattctttgtccaaactcacagactgtataaaataacatcaagagtgaactttaacgtaaaccatgaactttgggtaatgatgttcaaggtaggtccatcaactctaacgaatataccattctggtgggtttgttgttgttgttgttgttgttgttgttgttttgttttgttttgttttgttttgagacagagtttcactctgttgcccaggctgaagtgcagtggggtcatcatggcttactgcagcgtccacctcctgagatcgagtgattctctcccctcggcctccagagtagctgggactacaggcgcccgcccctaaaccctgctaatgttttattttgcttttggagagatagaggttctaccatgttgcccaggctggtctagaactcctgggctcaagcaatccacccatctcggcctcccaaagtggtgggattacaggcatgagccaccatgcctggcccactctggtgggggatgtcaatgggggagtttatctatgtgtgagggcagacagtatatgggaattctccataccttcctctcaattttgctgtgaatctaaaactgctctaaaaaattcttttatgctgggtgctgtggctcatgcctgtaatcccagcactttcagaggctgaggtgggtggatcgctagagaccaggagtttaagtccagcctgggcaacatagcaaaaccctgtctccaccaaaaaaaaaaaaaaaaaaaaaaagcaaaaattaaccgggtgtggtggccagcgcctgtgatcctagatacttgggaggctgaggtgggaggtttgcttgagcccaggaggtagaggttgcagtgaagtgagattgcaccactgcagtctagcctgggccactgagtgagaccttgtcaaaaaaaaaaaaaaaagaaaaaaaaagaaagaaaagaaaaattatctttttaaaaatatccttcaggttggtggctcacgcctgtaatcccaacactttgagaggtggaggcaggtggatcacctgaggtcgggagttcgagaccagcctgaccaacatagagaaaccccgtctctactaaaaatacaacaacaaaaaaatatttagctgggcatggtggtgcatgcctgtaatcccagctactcgggaggctgaggcaggagaatcgcttgaaccagggaggcagaggttgcagtaagccgagattgcgccattgcactccagcctgggcaacaagagcgaaactcagtctcaaaataaataaataaataaataaataaataaataaataaataaaatatcgttcaggctgagcgtggtggctcacgcctgtaatcccagcactttgggaggccgaggtgggcggatcacttgaggtcacgagtttgacaccagcctggccaacatggagaaaccccgtctctactaaaaatacagaaattagctaggcatgatggcgcaagcctgtaatcccagctactggggaggctgaggcaagagaatcacttgaacctgggaggcggaggttgcagtgaaccgagatcacgccactgcactccagcctgggcaacaagagtgagactccgtctcaaaacaataaataaaataaaaaataaaataaaataaaaatatccttcagagttagttcaaatgttacctcagcctcctgagcagctggcattacaggcgcctgccaccacacaagctaatttttgtatttttagtagagatgggatttcaccacgttggccaggctggtcttgaactcctgacctcaggtgattccctgccttggcctcccaaagtgctgggattacggacgtgagccaccactccccgccttgaattacttcttctttccattgtgattcaatagcattttgttatttttgttactggtgttatttttgtttattgttatttgttacttttgttacagcacactggctgtcttttctctaaaaggcaatacaaggccggcacagtggcgcacgcctgtagtccaggctactgggaggctgaggcgggaggatcgctggagtccagaaggttgatgctgcagtgagccgtgatagcgccactgcactccagcctaggcgacagagggagaacctgcctcaaaataaacaaatagcaatacgacaataggatattggctctggaattcagaatcttagtgccagctctgttactcagtagctgtataatattggataagtgaattttcacactttgaaaaccagcttcctccatccgcaaaatcgagccaataataatccctaactcatgaggctgtgagcagattaaaggagatagtgtctgaaaagcatctgacacaataggtgcctctttagctagaccaagggttcttaacctggagttcatggacccttaggggatacatggatgaacttcaggggatctaagaatctaaagcaacattttgcatgtcaatatatgcatattattattattattattattatttctgggaagaaggtccatagctttcatcagcacctttaagggtttgtgaatcaaaaacgttagtatgcggtacccttgggcagaaaaacaaacaagaaaaggttagacaactcgatggtagaccttgagggattagagccagcctttcagggtttaataggttctttctcatgcatacatagtttctaatgttcacaatagccccttgaaggaggtgttagcgcacctatttttcagatgccggaactaagaaacgaactgatctgtaatagacggagttcctaaccaatgcaaatattattgaagacttttctaggccaaaaccgagctaggctatgggaaccgaagtccagtcagaactcagcaccacagaggcctccttcttccctggtttgcatccccagctcattctgcgcctccggaacgtttcatagatttttgctgagtgaaatcgacttgctgccgccaccgccgaaaaactcccggggcacagagctccgcccccaccgggccaggccccacctcctctgcagtcggtattgtccgatggttcccggcgtacctcggcttccctcggtagtttccggcaatggtcgagagtttctaacgtgcccccttgttgtctctcggccgccgtcctctcaaccaccgccccccttttcggctccctctcccccttcccgttcccccagtcagcctggccctgctggtgcctccggcgctacgggctgggcaagatggcggccttcgggatcttgagctacgaacaccggcccctgaagcggccgcggctggggcctcccgatgtttaccctcaggaccccaaacagaaggaggtgcgttcgaaaatcggggctctggaggggccgggggcacgcggtcagcctaggaggaggcactgacggctgggaatggggggcggggcggttcggtgagagcaaaagtcccgaaagggggaagagtaaagtgggctggcgtgggagggcaggacggggggcggtggggggttccaaggtatgaatagggggtggtgtaggggccgcaccagaggcgccctcctccacacacacctcagaaagttgtctgagacagcttggtggggtacggctgctcggctgttcgcaagagaagagtgatgtttgagggcgcgctgggtggctgggaatcctagtgaccatgggagtgagggtggggtccaagtgaacgtaagggcccagctttaagtaacgatctgttctacacggaaccctcctcctgccctttcaccttgttccttcttttctcctgccctactctcccaccccttcccccttcccctaaggaaaaaacaactaaacgccgctttcctgcctcaggatgaactgacggccttgaatgtaaaacaaggtttcaataaccagcctgctgtctctggggatgagcatggcagtgccaagaacgtcagcttcaatcctgccaaggtgagacaactctgccaggctgaaggaaaaggctggaagaatctaagaaggagcaaaggccctgggttgggaagacttatagggacaacctaagtggctgagtttgccttcatgacctaatactatctcattggcatttgcccagcaaaaggcaggaccacctgtctgccccttcttcccaccctgaggtacacttttcttccctcagatcagttccaacttcagcagcattattgcagagaaattacgttgtaatacccttcctgacactggtcgcaggaagccccaagtgaaccagaaggataacttctggct

SEQ ID NO: 12650 - DNA, 6000 bp, Homo sapiens
taagacacagtagtagataaacagctttcattttgccgagaaatccccatcagcacatctgcccaagctgggtcaggctagttcacttctccacgatgtgttttctctgtaggttgatatgcaccatgctaagcagaattttctccagcctaatctgcagagataactcaactgtgctcaggagagctagagggtttctctgacgtgttctttgtatttatttacttattttccacgctgctgttctattttaaagtatgctgttgagaaaatttggaagcattttagtacatgcaagagaacagagtattcctaccgactgtgctatgaggataagaagcaaaacaaaaataccccctcattttcattgaggtggccagtagcccgtattttcattgaaggtttaccctacacagatgagggcaagttcccatggaaaattcctaaaagtctgtttctgctcaaataaagatacaaccccactagctattagtctgcccctgagatttctgagctatgcaagcccatgagtttgaagtagagatttcctgtgtcgatttttttttttccctccagtcatccaagggtattcactaggtcagcccttctcgtgattacagagtttgggaagcagtggggtttgcagtcatgtgactaagaaagttacttttacaacccttgttaagaaaattacatagtgatccacagagtcctttagaatattagactttcacattgaaatcagaatcgccaggaactgcagttcatacacaaaacagccagtgcacctccagagactctgcgctggggtaaaacctggataggaagataaaagacacagcaataaagctgaaaaaaatgactgtagattcgctggatcctatatataaatattaactacagatgtggtgcaggtagtatgttcagttctctctatacagcattgcattctgtctttacgccacctccaagaggtaaaattacccttattgtacccttgagaaatctggttttaggaagggagaatagtgtgttctaggccctctggccaagaaatagcgagtagtaggaggaggtggtttgagctctactatctgtctgactcgatcacctatggctctgctgttggttaaagccttgcaagaaaagtggattttaaagatcttatgacggaggcagagggatgatggctccccagtggtaagggcctcctgggtctcctgggctgcaagtttccctacctccacatttctagaggaaagggggtctcgatggaggatcagggttgcgtgatgggaagtgagctagcaaacctgtttggatttccttctgaatgctctattttatatatatatatatatatatatatatatatatattcacagatgtcttttgtagatcaaagacaaaacaggcaaatgttgataataaggacatgttgtcaaaatgctggttcaggaagagaaatgctgctaaccagaggaacagtgaaaagcagtggctggtaaaagtcactggtgcatcctgcaacaagctgcaatccttcaggttccatggcatctggcgattaggagggctccggccttttgttaatcactgagcttttgcttgaagtacattctgtagctacaaggactgacctgcccttcatttgatcatccctcctcaccctccacatggtggaattattagcaagcagatgaatttaatttaaccgacatgtactccaaacctcttgtatttaaggaactctcttggcacttcaagggattcaacaattaatcaaacatggtccctgctctgggaacacatcaccaagcaagcaggcaacattagcaggacaaacatcaaaacaaaaaagactaaatgcagcaaactatgcattttatttaaaaaaagtacagaatgacgagattccataatgctttatttgtggatttattgtacaagttacgccctgggacttttctaatctaggcatttatttttattagtatgtgtgttattaaaaataatttattgaggtgaaattcacatcgtaaagtaaaccatgttaaagtaacaatgtcatggcatttcgtacatcctcaatattgtgcaaccatcacctacatgtagttccaaaacgtttctgtcaccctaagctaaaaccctgctcccattcagcggtctctttccgctgctcactccccttcatcccatgcatgaaatttgcaaagcagaattgaattagttgacttgatattttatttacttcacacttgtaaggaattaaagccattatgtttgagttaaccatctcatttccgtaaacctgtgcctttaactagacttcgataaatcatttttggggtgcagattgtacaggtaacacaagtatttagaggtattgatagatattatctattaaatgtgccaataataatccccctggataaggtagtataaacagatttccttactgcagagaaatccagacttttttaaatgttttttttttttgaggcagggtcttgctctgtcactgtggctggagtgcagtggtgcgaacttggctcactgcaaactctgcctctcaggctcaagcaattctcccatgtcagcccccagtatgtagctggaactacaggcatatgccactatgcctggctaattttttttttttttttttgtagagatagggttttgccaggttgcctaggctggtctcaaactcctggactcaagcaatcctcccgccttggcctcccaaagtgctgggattacaggcgtgagccactgcgcctggccaaatctagacatttcttaatagaattcaacgtcagtcatgcgcacattcattcattcattcattcaattgaacgcttagtgtatgctaagctctgtgctatactccaggtgtcaagaagctatgacggcataaaaagaaggtgagtgattgtccacaatgcaggaaaaaagcccactttagcaatgggcatggaggtaaggaaatactatacaatggagattgaggagaactttgtcaaaacagtggcgtgaaccaacaacaacaaaaatcagggatgtgctacttgttcttgacaagccagatctatcaccaaaaggaagatcccagggacaggctgggaagcacagggcatggcacaggccacccatggaaaacttcagccttgggtttgaggatgatggcatccctctaagtctcagtgatgggctggaagggatgaatgagaaggagttggtggaggaagaagttgtcaaaatctaagacatatccatgcaaccgcagtgagagaggtggagagaagaacacgttgggccaagagattcttaggcatcaggatctaaacttggcaaccagttgactatgaggaagacatgaaggagaggcagaaggcaaggatggcttgagtttctagtttagctgacgagatgggtggcaacatcattaacaagggtaaagagatgttcaagagacagttgttttttgttttgttttgtttcgtgatttaatcaatgggtttggggcatgcccagaaagaggctacctaagggcattatttgactaatccctggaactatgtcaacacacactgaaaactaaagctagagaaggaatgaattcccatttatgaaccagtatttcctgactatcaactctgtggaagccaccctaggcgcaggaggcaggtggtgaggaattcctagacgctgtgtttcttaggaggagctaagatgaaccacgcttcatgcaggggaagcaacttgtttcttaggcttagtccttccttcctcctgaaagccccctgacagagtgctggacgtagggcaggacttctgaatctaaagagcaggcacttctcaattatactttctccatgcattgccttttaaaagctgcatgcctgctgggctgggtggctcacgcctgtaatcccagcactttgggagtccgaggtggatggatcacttgaggctaggaattcgagtccagcctgagcaacatagtgagaccctgtccgcaccaaaaaaaaaaaattagcccagcgtggtggcgcaagcctctagtaccagctgcatgggggacggaggtggagaatcgcttgcgcctcggaggcagaggttacagtaagccgagatcgcaccactggcactccagcctgggcaacagagcgagactctgtctcaaatacatagatacatatatacatacatacacacatacataaatgccgcacgccatcagcctgcttcaggggcatctcagcagacaggattcgttgtacaagtacatggtaccactgggcttgtaaaaaaaattttttttatactcacagatgtcttttgtagatcaaagaacacaacaggcaaacactgaccctaaggacatgtcaaaatgctggttcagggagaggaatacggctaaccagaggtatagcgaaaagcagtcgctggtgcaccctacaacaagctggtgcaatggtgcctttccgggccctacacacctgtctgagctccatgtttttaccccaggttggctctgctgactgaagatactcgcctgacctctccccaccattccaggtctgacttatccaggaagccaggcagccgccgcctcctcttcctctgcctcctggaatagggacctaccctctgcaccctctactttttgccttgtcgccaggtcgctcccaccctcccaccgccccctccccagacaataccatcagactctccgaacgtcccaaccctcgccttgcccctcgaatgctccccaagccggaggggagccgttccacctttctggcaggaagactctggcaaggggagggaggcgggcgccggggagtcctggagaggcgggagggcgtggcggcggctctcacgttgcagccctgcctgcagctagtgggatgccggcggggccagcccgctcctgcttgcacacggtctgggaagagctgccgagaaaacaccgtctggcccggagaagcgcaaaccctgctccttctctctctcctgaaaggaacggaaacgttcccagcgctgcttaggcgctctccaagcgcggactctactgcggctcccaccgcgctccctgcatctcgcccttccctcctggggtcctggacttctctctgacaaagagccctccttccccgagccgcctgcggttcttgcagctggagtgggcgaggcatgcccacccgggcccaggcgcaatgaagacgcgagaggaaggctgagcgcagagcggcgcggccagggtcccttggctcgggcccgcgccccgtctccccggggtggggcagggtgggggtgtgccgaggcgtggacttggggaagcctcgcagcgccgggaataaaagggcgccggcttgctgtgccgcgctgggaagccgagctgcctcacccccggccccgggaagggcatggccccggcaaactcccggccgtgactcgcgcgccccggctcggtggatgctcccggcgcaccgctcccgtgtgcggcggcttcccaaggacaggtgaggacccagggtggccagggcgccccagggctgccgtgtctgcctgcagggggtgaagggatttgagacacccaagggaaacactgggggtaaagggcctgcatgcaggcagattgcaccgttccccagcactgtttgaagttgctaagaaatcaggatacctgaattcctgcaattttaagtagctaaggatcagatagggaggagagccggatcttgaaggaggatgcactgaataggtctaattaagcccagacatcccatgcctcctttcctccctctccccaaagcgctccccatccctggctctctctggagaccttcaaccccgccatcccgcgtttctaggaagctgccaacggaattcctaagtgaagcccactctgctcttgcaatcggtgggggaaaggacgcttgaggagcctctttccaagttgctcaggctgtggctacttcaagtctc

SEQ ID NO: 12651 - DNA, 6000 bp, Homo sapiens
cgttttcgcctgatacaatcactgagatcacgggaggaatcgcatctggaaaggcggaaaggcaaagagaaagatcagaacactggaggcctgagtttatgggctggaggaggttaggggccgcaaactgaaagctgcacaaagataatcggctgtcgcaggaaaaggtagtttgcctgagttcactggagcacctgtcaccatccaggcactgaccattaagttcttcccggtcctcgattcccagggtgcgataacggtgccatcttggcttctcctgggctgaagtttcagtccctgctgttgatgaaacggtgcgcctccgcagactctgggctgcgatctgcggtaatccccggtccggacaagaagtgcaacgcttcttgagaaaagtccaagtactccaaaattttggccatgactccaccacctcagaatgcaagtgtagaccgcagcccagtgcttagtgcatccaagaatgttaatgtttacactgcatgggctctggccgcgacagtggcacattgcatcctctgctgtgctccacctccgggcttctggttacaagtactctacacaagcttaagtgttccctgtgttgggctcctgctatgggcctgggcaagtttccaccttttccctgcctcctcctccttccaccttttctccctttttctagaaataaaatcccaatcttatgctcagaaataaataaaactttattgtcaaataaaagaggcaggccaaattgaggactatggttctgccttcaagatgtgttttgcagacgctccaggagatgttaatatcctgagcactggaaatagcttccaataataggccctatgcttggtaacatactatgatattggtctaccgtattttttcctttgcaactatcattatcttcagcaccattttatgaaagaaactaaaccattttcatgggctgctaagggtgtcattgggcttagttaccttacctactgtacctaatggataagtgcccctgcctcatatttctgcaagatggctaagaaatcagcttaaaaaaaagtgattaaacaattcacttttaaaaagatgtcaagggatggcaatctcacaacctctctctgacttcaaccaaaatctgacttttgttggagtctggccccctctccttctcttaactaatcagttcatgatcaattttcagccttggatcaaatgctgcatgagagacatgtaagagttttaatcatggagtgcagtagactagctgggacgtctgtgacagcttgatttcttccacatctcagatttccacagtgtaccccggtgttttctcaccttcagtcactcataggcatcttaggtgagtgttgttgccctatgtgggcaccagaaaagctagtacttacttaaatgttttactttaaatataatttaatttttaatttttgattcactcttgaaaaccttaagtacctaatggaaccctcatcctaagcaaaaatagccacaaatcacggcctgatgtaacagatttatgtgagcagtgaccctagaaccagactaggtatctgaatcatggcttcactcactacttgctagctggctaatctggtgagcagtttattctcattttgccttggtttaataattttttaaatggagataacaatcatacctaattcatagaggtgttttgaggattaattgaggtgcttaattatacaatttcacaaatgaccatgcagcctcacatttcctacttgactcactttcatatttttttattcacaagggagagagagtgattgttctcctctggcagcatgtaataaagatagagcatcttcttgtgaaaacaatacacgtaccatgtttctatgtacctatatgtgcttccatcaataagcctatgttggttgctgcatgtatgagccctgggccaggaaatgtgccaggagagtgtgtctttcactcagcagacagattttcttccttggcctaatatatcttattcctagataccagagcaaataataatgtaataagcattaccatgtattaagtacctactctggacccaacccaagaacaagcagtatgaaggtgataagcaggggcaccatggtgtaattcacattttcatcatcagatcactctggctgctgggtggagaatgtttataggagaaaaaaggtgaaagcagggagacaggacactaatgcaatatcccaggtttaagatgatagagattatcttaagcatgtcagagaaaaaaaattaaaggtttgggaatgtgtttctgaggcggagtcaacaggatttgctgataaattgactatttggagttgaagaaaaagaataaaacagtctatatataaccaagtacctcttttttaaagaatcaaatgaattattttttcctttttcctttcctcacacctcctacttagctctttgggaatgcaattataaactttaccttctctccaccagacactccctacacagcaagcttatctaactacatgtttacttagaagttacagagaccgaaccttaaagcaaaccaggaacctccagaactctctcctaccaggaggcaaattgagattgcctcaacttacaacctagctctgcccgtgacggtgccagccagaccacctgatagataagacatccgaagcaagtcacatagactctgcacttcatcgccctctcccctgcatgccattcacgccaagccccactttcaaagctcctgccttctgccccaaaggctttagtggcttcctcaaggcagcctgtactacttcccctcaactagctctggaataaagccactttctttctaccagacgtcgttcttgttcactggactttgcaactggtgagcagtcggagctgtgttcagttacatgtatgccttgcctcattgaactctcatgaaaaccctatgatcgagacactgttgttatctccattttataggtgaggaagctgagaaccagatagattcatccagtgtcctaggacacacagtgagtcatgcttcggatctgtgctcctagctgatgcctcccattactggtagtcctttcctgctccccacaatgtacatttattcatttctttttctattttcttattatctttctatttttcttcttcttcctctctcttctctcactagggatagaacgcaaggatctcacttagcccagtggatggcagtcaattaatggagcgagtggcttagtccttgtcatgctgccaagtgcaagggcctttccatgctcagaatcaccatgaagacgagagctatctctcttggtaggctacagactcaaagggtctgcatatttatatatgctgccaaaaaatcctcaaataaccaatagatataaatagatacagaaagtttttaaaagaacatttaaaaataaaatttttaaaaatatttttaaaaaacaaaataaagtatataacatcacttaagagcacacacacaatctctagaaaaattaaggattcatgagttgtccaccctcaaaagacatctccatgcccttcctcatgacagactctcttagcgctttcctttctttcattttcattttatttcttattttattatttattttaaagaaaaggggcctctgtctgttgcccaggctggagtgctgccatgtgattctagctcaccacagcctcaaactcctgggttcaagtgatcctcccatctcagcctcctgagtagctgggactagtgcaggagccactgcaccaggctcttcagggtttttcttcgtaattgggcttattggggtcagtggtaggaaggctgtgtagttacaaggctctgtggagcagaagtggccccacatccagtaagctgcatatccataaatcccaaatctccatcccaagattggagatttttggcaggtatgcccttactggtgctcttcctataccatccccgattttatttatttatttattttttgcttgtccttatagcactccattttgccatgagtacaggtttctcttgcatagccaaagatattcagtctcaggctaacagattcagcctcgtgtttattctgtgttgactttctcaaagggtgcgttagatttcttgcagagcacatcttaccacccagaatgctctgcatgcccatctccaagatcccgatcccagcactgaagagagcatggcagctctgctttcagtgcctttgctggaactctgaacaagcagcccccagtcaatcatttctgcttaattaatagcccgcgccctgtgcatgctgccaaatatggagggtcaggccatgagatattctccaaacttttactcaaggcgtcctatggtcaccgtgagatctcacctcccctctgagcccccaaatcagctttcctcagggtaataactaggcccgagtagggtgtagtcagcaaagctgcaagctggggccccatgttgcatacatatatgcctcctattggcccttttcttctccacactgcccctgtgttttggccaccccactccaccctcaactgccacccccacccacgacccataccacacccctcacccccacccacaacccctacccccaccacgcaccctccacccacacctcccatctccacccgctacccccacccccaccatgtacccccaccggcaacccccaccccaacccacaacccctaccctcacccgcaacccccaccctcactgtgcaccccccaccctccacccacacccccatccccacctgcaccccaccccacactcacaaccccccactcccacctgcaacacccccactccccacccgcaccccccaacttcccatccccccactcctctccattccctctcttgcttgtgcgcataagcaagtcccactcattgcaactgtaaccaataccaagcatgagaacaggaactagctccaccctctaacccccactccagctgcagacgccacggagtttgtgcaggggcgcagcgctccagccatggcgcgttcgctcgtccacgacaccgtgttctactgcctgagtgtataccaggtaaaaataagccccacacctcagctgggggcagcatcaagcgcagaaggccatgttggccaaggagctccaggcctcatgggtaatatgaaccctgagggcggtgtgaaccacgagaacggcatgaaccgcgatggcggcatgatccccgagggcggcggtggaaaccaggagcctcggcagcagccgcagcccccgccggaggagccggcccaggcggccatggagggtccgcagcccgagaacatgcagccacgaactcggcgcacgaagttcacgctgttgcaggtggaggagctggaaagtgttttccgacacactcaataccctgatgtgcccacaaggtaagtggcctgctccaggagccacgagatctccaagttcgtttcgaggcatctttttctctcccttgccccacccaatcatgaggaaaaagccactgggggtccttgcctgcctttgtgctggtgtggagggggatatttacctcctgggcatcaaggtaaatgttttattgcaatgtttatgtgaatgaaacctggaaactagtccgtgcctcccttttataaagatgtggtaaaatacacggaaatatgaaatttaccgtccaaaccactttttaagtatagagttcagttgtgttaagtatgttcacattgttgtgcaatagatctctagaattcttctcatcttgccaagctaagtctctataccagttaagcaactccccttttccccctttccccagcccttggcaaccaccattctactattttatgtctctatgattttgactactctaggtatctcatgtaagtagaatcatacagtatttgcatttttgtcactgacttatttcacttagcataaggtcttcaaggttcatccatatcgcagcatatattagaattt

SEQ ID NO: 12652 - DNA, 6000 bp, Homo sapiens
tagtttacgaaggccataaatacactgggtggttaaagacatccaaagatatccagaaaagatgagcacatgtgactcccatatccaccctcatgagagcattctgcacagacacggtctgttccatcgaccagtgctctgaccaagaagctacatgtgatcagctgttgcatgaaactcataattgtgtttttctctatctttcccttgggtttttggcagttctccgaaaaaaaaatagcttatgaccctttcctttgagccacagaactttctagaatccatcacaagcaaaatactctcaggcctgaaaggccaattcatctctgaaccaggaaactggagaaatttagatgaatgattcccctgatacttacctcaattaccctgataacctttctcagttttcagcttttgtaaagttttgtcttctggctgaatggaggccgctttctagatcacagtattggagtaaaaattaaaaaataatttgaataactaacaacctctagttaatgttatgtacattaactagtgtttatggattaagtgtactgatgtccgcaacttactttgaatgcaccaaaaaataacaatagcagcaataataataggaatgacaacaaagtgaattaatggatgaatagagagatggataaacggattgatatatgacaaagcaaatacagcaaaatgtcaattgtagaatccagatggtggtgtattggtgctttaactttttttaacttttctatattttgaaatgtttcatgatacaatcttaggaaaaaaataatttgagtcacagtgggaatcagaactagaaggattccaaaatgttatacccctttgtctactttctttgcttccaactctagcaccttgtacacagtaaatgaagtgactctctgttgaatggagctgttaaactaaattccaagctgcaagatcacttccaaagctggcaggatgcttccagagtatgagttggtgatttatttctgtgaaggccagatagtaagtatttgagactttgtgagcatacagtctctgtctcaactattcaactctgccgttgtagactgaaagcagacatagacaacacttgacagtttgccaagtagaggataccatcaatgcaaaggccgtggggcaggaatagtggctgtgttccaataaattttattcacaaaaactcatggggctcatagttcgccaactccatgtagaccacaaatacttacctccgactagaaaaacaggagtaagattgacaaaatgccaacagtctatgtaaaggtttcatgggtgacaggacaggacatggctgataacaaaaggaaacaacaaacatttttgtgtctacctccacctcctactcacccatttcctttcattaaaaacagggcagtttgttccggcactgaacctgaggtttgatatgcaagcacccttaggagaggtgacatgttaatcttcaattctagtaagtgtgaataattcacatctgatcccaacttacaagcagattattttagcaccagaaggaatacatgcaggaggtaatggagtgacgtccccaaagaagagatacccatgaacaaagttcaaactgcagagataagctgttggagcccttgtggtcttactctttagtgaggagagacaaataataaaggtaataaataattaaattatgtattatgctataaggtgatgagtcctgtagaagaaagaaaacacagagcagagtaagggagattggagtgctgggtggagggtgaggctgtgatattaaacagggtggtctgcgtagggctattaggaagatgccattagaagcagaacctggaaatgaggacacgagccagtcagatatctgggacagtttgccaagcagaggatactgccaatgcaatggccctggagcagatgttgctcagaatattggaggagtagaaaagatgccagtttcaggagtggtaagatgaagtagaataatcatgtgatgatgttagagacagtcctaggggaccagaacaggggggacaagcgaagagttcagactggagaagtgctaagatgtgacttacatttaaagaatcactctggccactcagtggagaatagactgcaggggcaagagtggaagaaggagaacagtcaggagactagtacaatattccccctgggggtggtggcaactcagaccagtaggtggcagtagaggtattgaaaagtggccaaacgggggtacatttgcggctagtgctaaccttatttcatgaaggattgaacgtttggtgcaagagaagggtaaaaattaaggatgactccatattctttagccagagcaactggagggggagagttcctattagctgagaagaggaagactgtaggaaaaactagttttgggggtgggggggtgggtgtgaatcaggaggtcagctttggacaagttttgacatatatatcagatatcccaagtacagatggacaagttgacagtcaaacataagtttggaattcagggaagaggtcctggctgtcataagcatatagatggtgtttaaagccatgagtcaagtgaattttctaaagtgagagaaaaatacaggtcagccacaagccagaaggactctgattatctcattttctttcttcctctctctctctctctctctctctctctctctctctctctccctctctctctctctctctccttccccctttctctctctctctctctgacaatggattctaccaggttcttttttattttaaaaatgtaagcacaagtaaacaggcttgttcacatcatgaagtcaaattatcccatgccatgtccctttagctgtggcctgctaaaggcttgcatgaacaagcttaggagaaaattcctaaaattctaactgagtaaagatgacaatgcagagtataatttgagtaaatgaagtcatattatcgtaatagcagattgccaaaagttaggatgtaactaaactcatggaaaatacagagccaaagaaacaggagaagtagcagaggaagtgaatgaatagaataaagtaaataaatctgtgacattttgccttagaggaaaccactcctcccagctgtccttgggtgttttatgcccccaagaagggatggaaatcccaagagattgtgcccaggtgtttccacagttataccgactgtattagtccattttcatactgctatgaagaaatactcaagactgggtaatttataaaggaaaagaggtttaatggactcacagttccatatgactggggaggcctcacaatcatggtggaaggtgaaagaggaacaaaggcatgtcttacctggtggcaagcaagagtgcgtgtgcaggggaactgccctttataaaaccatcagatctggtgagacttattcactgtcatgaggacagcacggtaaaaacatccactcccgtgattcaattacctcccactaggtccctcccacaacatgtggggattatgggaactacaattcaagatgagatttgggtgaggacacagccaaaccatatcaccaactcctccttcccctaccctaagtttactttttattctagaatcgaacttttgccatattaccatatataagttgtgaagtaaatacaaatcgccatgtggaaaaggaaattaactagcagagtgtagaattaatttatttagccaggttgttgtgccactcttgccctgcttcacccttaattttttgaatgactacctactatattcctaaagaatggagagctatttggaatccatcagtgactttaatttgctattagaatgtaagttacactcttttgaattcttctgaaggactcctttcccttcccaaaattctagtttccaaactgaaatattaaaaaatatttctgcaagttatttttcccatactctactgtaattaaaccactatttgtggttccccccccccccacacagacacataagccccttgaagatgtgggctgcctctcttctgtttgctcttgtgtctccaacccctaacggaatgctcagcacatggcaggttctcaaataagacttgactgaacgaattaatagaaatgatgctaattccatgtacactcaaaagaatacctctttgaaagccagtagcttcactctcttctgccaacccaagacttcttcacatcatagatacttacaaataagttacagtaagcaacaatttataagtaaacacagtgtgtcaatgcatgccaaaaggatgattacttttcttggctatccatagcaggacataaaatatgtccttagatttattacagatggccagccggtatgcaccagagaaaatagtggaatgggggaagccaaaagttgtgagtctgtcataatgatgtcaagtgacacactttttcattgcgatctaggtgtaccataccttagcaaaaacaatctattttccatttctggatttcttaataacttaaactatataaataagctccttttccatcatatgaactgttcttacatattctctggccttcctttgtccaaatgttgagttgaagttttcattgcatattctctgtgcactttgcattacctaatggtttcctggctcatgtgagagaagtcagcgtcagcagtcgggttttgccgagatattttcttgtcctttccagcatagagctctacaaacaaaggcagggttatcacatgtacccgagagctgcctgggaaaagtgggagctatagttatcaaaattggaaactttatgaagtatgcttttgtctccgtttttgttgcgttcaatcagatcaacaagtgttggctaagtgttgagcgtggtttcctgtgggattgtgtaaggctctgtaggacaataaacgtgttgggggcactgagtaatgtagccatttctgacccggcagccaggaaaatgtgaaacaatttgcttctggaaacaggacagccggggccgtgttcctgcaacagcagaccaagcaccgcggcggacccaggcaagcacggaacaagctgagacggtgcgtttaagcggcaggtggctactcagtgtcgcatactatgcggaaaataggtttggttcccggtgttgtggggcctgaagttacaaactttgggaagctcactttaagaaaaatagtacaacatttttaatatgaaattgccagggctttctctgggactttagatgggaccaggtaatttggaggccaacggctgaaactgctataatttcactgtaaattcactccttgctcaaaatctcagttagggaagctctcaggttgtttatgtatcaccaccagttctacctagctttgtgtgtattctctgctaattttctccatccgcttctttaggtattgcctttccatagcctttcatattggcctcataactgcttccaaagagacatagaaatgttccttataccttctttaactgtgtttttatgatgttactttagctacaaatatttgctcttaggttcctgaggtctccctaaatcaagtgctttgtgtattttagatggagatagacaggtgggagggaggtgaaccatgcagttgtactcatatccatataattttgaaagattttgtgggccacaatgatttcattggatttgaaaaggagtgcaactttgtggtccatgtaagtgcttctcaagctttcctgtgcacgtggatcacctggggatcttgctaaaatgaagatttggctgcgcgaggtctcgggtgggaactgagagtctgcatgtctaatgatcgcccggatgatgcaagtgcacggaccacactttgagtcacatccaagtatttatttgtaggaaatatggtggcacaaatacacagtcaataagggtatggttcaacctcattttatggtaactcgtctcaggatggaaagtctgcgacaaacctactatgtatggactggtgtttgttg

SEQ ID NO: 12653 - DNA, 6000 bp, Homo sapiens
gtcttaaactcttggcctcaagtgatcttcccatcttggcctcccaaagttctgggattacaggcatgagccaccatgcgtggccttctttccttttttaaattctttttttctttttaaattttaaatagaagcagggtctcattatgttgctcaggctggtccggaactcctgggctcaagtgatcctcctgcctcagcctcccaaagtgataggattgcatgcatgagctaccacgcctggccaggtggtgagattttgaaatggaaattcccaagtgaagttagtctttattgctcctaatttacatatcctttctgcactcttgttccattccgaagctttctgttgttttagttccctcctggcaggttggatgcaagacgtggtgtaaagaaagcttagtgaagaggtgagaacttcttccttctggagaagatcctcttctctgttccatttttccagattccaaaaggaaaatattactctggttatcactgaggttgacatcattttttatttttcttcttcttatgtatctctcttcactctctccccctttcctttccttctttttgtatttacaatttcatgattttttccccttctcctctcttcctgaccttggtcctttagttgaccataataccaaagtatatttgttatcgtcagtggtatttcttgagatgttttttgtctctgtttttaataaaaataaaactatttggggtgtaagttttatatatccctttattaaagcaaattataaaatgtattaatttttttattgatacataataattgtacatatttacggggtatatgtgatattttggtacatgtatacaatgtgtaatgatcaaaccagaataactggcatatccataatctcaaacatttattatttctttgtgctcggaacatttcaaatcttctaggtattttgaaatgtacaataggctgggcatggtggctcatgcctgtaatcctagcactttaggacgctgaggcaggtggatcacttgagccctaggagtgggctagcctgggcaacatagcgagaccttgtctctataaaaaatacacaaattagctgggcatggtggtgcacgcctatagtcctagctactcaggaggctgaggtaggagaattgctggagcccaggaggtcgaggctgcagtgagccgtgattgcaccactgcactccagcctgggtgacagattgagaccatgtctcaagaaaaaagaaatacacaataaactgttaattatactcaccttactttgctatcaaacactagattttactccttctaactgtatttttgtatccattagctaacctcccttcgtcccccagcccacctttcccaggttctgataactattgctctacctccatgagatcaactttttcagctctcccatatgagtgagaacatgtgatatttgtctttctgtgtctggcttatttcacttaacacaatgaccttcaggtccatccacgttgctgcaaatgacaggatttcattcttttttatggctgaatagtattccattgtgtatatataacacattttctttatccatgcactattgagggacacttaggttgatccatatcttggctattgtgaatagtgctgcaataaacatggaggtgcaggtatctctttgattactgatttactttcctttgaataaatgcccagtagtgggattgctggatcacatagtagttttgtttttagttttttgagaaacgtccatactgttttctataagggcagtactaatcgtattctcaacagtgtaaaagactttccttttctcttatatatggagtgagatgatatctcactgtagttttgatttgcattttcctgatgataaatgatgttgagcatgttttcatatacctgttggccatctgtatgtattcttttgagaaatgtttatgcagatcctttgcccactttttaatgggattattattatttttttgctgttgagttgagttccttctatatgctggatatcagtctcttgttggatgaatagtttgcaaatattttctcccattcttcaggttatctcttcatactgttaatgtttcctttggtgtgcagaagccttttagtttaatatatttccatttgcttatttttgtttttttggcctgtgctttcaaggtcttagccataaaatccttgtccagaccaatgtcctgaagcatttccccaatgttttcttccagtagttttacagttttaggtcttatgattaagtctttaatacatcttcagttgatttttgtataggtgagagagacataaaggtctagttttattcttctgcatatggatatctggttttcccagcaccatttattggaaagactgtcctttcccaatgtatttccttggtggtttgttggaagtcagttggctgtaaatgtgtgggtttatttctgggttctccagtctgttctattggtttatgtgtctcttttcatgtcagtaccatgctgttttggttactatagctttgtagtatattttgaagtcaggtagtgtgatgcctccagctttgttctttttgctcaggattgctttggctattcagggtcttttgtggttttatacaatttttaggattgttttttctatttttgtgaacaatgtcattggtattttgatagggatcacagtgaatctgtagatttctttgggtagtatggtcattttaataatattaattcttccaatccatgagcatgggatgcctttccatgtttttgtgtcctcttcaattttttaaatcaatgttttgtagttttctttgtagtaaaatatattttttattagtgcttaaccctagactgatgttttcttttgggttattgtttcccagtgaggcttcatgcatatatttctgcaggtcttcccaggaaaaatgacatttaaaaagagaatttttggaaaagagatgcagatatgtgggcctgatgctggaacttccagtgcaatggtgggacagactttttttccagtggcttcttttctggtctctctttctctctctctctttgagacagagtcttgctctgttgcccaggctggagtgcagtggtgtgatcttggctcactgcaacctctgtctcttgggttcaagtgattctcctgcctcagcctcccaagtagctgggactgcaggcactcaccaccatggcccagctagtttttgtatttttagtagagatgggatttcaccacgttggccaggctggtctcgaactccaggactcaagtgatctgcctgccttggcctcccaaagtgctgggattacaggcatgacccaccgcgcccggcctggactttcttttaaaagcggctagagggccaggcgtggtggctcaagcctgtaatcccagcactttgggaggccgaggtgggggggtgggggtggggtggatcacctgaggtcaggagttcgagaccagcctgacaaacatggtgaaaccccgtctctactaaaaatacaaaaattagccaggagtggtggcaggcgcctgtaattccagctactcgggaggctgaggcaggataatcgctcgaacccgggaggtggaggttgcagtgagccaagactgtgccattgaactacagcctgggcaacaagagcgaaactccttctcaaaaaaaaaaaaaaaaaaaaaaagtggttagagtactagccagggggaagcaagcacatttgaaaaatatagtgtgtatgctttaggatagggaggaatggagagagagaggaggacatggaccggggtggaaaaatgtggggtttcgcattgatttttggtgtgagcttgaacaagttttgtactaaaaaaaatgcctgttttactactaaaataagtgcttcctttggagagtgaggatcctctgttactgaggtttgtattttcaggccctagcatataaatctgctacatacgagatattcaactggttttggaggaatgaaggtgaacatggcagtttcctcatctgtaaaagcagggtttggacgaaatgatctgcaaaatgggtctttttgtactcttactactctagtatttacgagtaaccgatgttattccttataaagtctcaactcctggtttgagccatgtctgacgagggggcctaactccaataccaccctgaacactctggggtcagtgggaccctgtttgtacagacgtctgcgtcttccggctctttaggacataagcagtactgctatggaagaaaggaaacctaatttcccatgccttgtccctttctggaaagggcatggcgtggtgtgggcaccacacctgccccagccttctagcaagaaaacaacacaaccttccccgctccccgaaaagagcttctctccagttgggtctagatgcccccttcccaaccagggcggatggccaaaggctccgctcccttgcagggtaggcttggaaaggcacggggcccgccttcctgggcaccggagcctgtgacgggcggagggcgtgcggcgcgctgggttagttacctggcgctgggcggggcaagcgggaggcgggggcggggccggggtgacatctcaggctgtgattgggccgcgccgcgcctgtctccatgtgccgcgcagctgaggcacaacattcaagcccgggggtggggccggcgcgcgccgggaggaagcggccgcgcggcagctgcggggcgtgggggtggtggtggcggcggcggtggtggcggcggcggcggcggcggcagctgaggccgaggaggcggtggctgtggcggacgcagcagcaccccagctagggacagggctccgccgcgcccccttgctggccccatggaggcggcagcggcggcggcggcggcggcagcggcagcggcagcggcgggcgggggctgtggctccgggccgccgccgctgctgctgagcgagggcgagcagcagtgctactccgagctcttcgcgcgctgtgccggcgccgcgggcgggggccccgggtctgggccccccgaggccgccagagtcgcccccggcacggccactgcggccgccggccccgtggctgacctgtttcgggcatcgcagctgcccgccgagacgctgcaccaggtgggtccctccgcctcctgtccctgcgggtctgtggggcagtgtgtgcgggggcggaggttgcgagtggggcgacagggctgcccccagggacccggaggcctcggccagttctgagagagaggactctgcagccggggatggcggcgacgcccttgtccccgggggacaccagcctccttcgcagctcagctcctcgcccagtgctgggtgcgctctccccatcttccttccctgagacagtctgacactctctcccctcccccggccatttctggggttctgcagccgcccagacccaaagtttgtcctgttctggaagtggtgtttgttttggctgctgcctggtttaacctctgctcgctgctcctgcccctccctctcctgagtgggttctcagggtgccttgctgggatttcaacttgaagggtgtgtgtgtccgtagggttcgaggcccagggctgaatgttgtcctctctatgtagttgtaatatataagtatctactatatgtaattgcccataacatatttctaaatattaatattaaatcgaaaaccttaatgacaagttgcagaacagggacacgggactgcaagaggacgtttgtcaagtcaaaaccaaatttcccatttgagattagaggtggacttcagaagtccaccatgggaaacagctgtagtttcccatctatcattacttggacttgaaatagaattgaaaggtaagggatgtcatagctaccaccttttggctgttctatacttggaaaagtactaggggatgatacataccagacgctgtttttgttttgtgctttccttggagcttggagaaagac

SEQ ID NO: 12654 - DNA, 6000 bp, Homo sapiens; identical to SEQ ID NO: 3485

SEQ ID NO: 12655 - DNA, 6000 bp, Homo sapiens
tcgtttcaaacctgagctcaagtgatcctcctgtcttggcttcccaaagtgttgggattacaggcatgagccactgtgcgtagccagcactttgttttgaagtgatcagaaacaaactttctcacaaataagaagtcttagcaatatatgaagacttttaagaaaaagtgaagaatcctgcacaaagctctgccttcagtataagtagtgactggtttagtggctacaacctctaagttttcaacaacattaaactatctggtgaagctgtgagtcccgtgctaatgaagctgtgacgacctttcaccatgtgtttttaaaaagctgactactcctcaattagatttttaattctgatgaaaatggcatctattaaaagtgaatgcccttgaggatccacatcaggaaggaggaagcataaaggctaccaagcattgatgactgtgatgctgggggcaaaggccagtggagatttatctgtggtttttattaggatggttgttttcattagtgctctgactataaagttgcattggatttaagtggtctttcctaaccatattttcccagtaagccctgctattttaggtgtgcaattctgcaaaacaggagattcttcagtaaagacaatatgacattatagtagaatatctggcattttttagaaacatctgcaggacatctagtttggtgttaaccatgtagtatacctgcttaatacctggtaaatacctgcttattcttaggaatcctttaatgcataaacattttgctgtgaccttggaggtggttctcatttttttcaaatccatgtttcatctatgaacgacacagactgttcagatgagaatacactgtagacgggagacatagaaactcagaggggtactatcaggatggtcagaaatcctcaggggtaatagatggctctaaggtcagtttgaagacagaacccagtagccttttattggtctcccccaggactggcttttaaatgctgattgggtgctacattcatgagagtccagagggagagaccacaaggtcagtggttctaacatacatttaagttttgatatcccaattgatggtggtagcctccttctttcttcagcatcagagaagagatgttccatccaccaacctatttgtgtgacccaggagggtaaaaataaaggattacagatgcagagagatctgctgtaggaccacaattggtgaggtgcttggttcataatcagtggacaaagagtccttaccgagagcagtggctcctttcctgtgttagtttctgccaggccaatgaccctgaagcctgaaggaaaggtttttgcttgtttttaaaccactgtttacattaactagagcaaaatgctgaaaaaaacatcaagaattaagacgggccaaaataaccacaataaagtcaaatgtaagacatatcagggacaaactttcattttttgcagaaaagattatcaatcttttacatgtacttctaactggatatgacatgcagattaacctggcctgaggatgatgaaacccaaccttacattcaaaataatatcaatacattttcaagtctatttatacgttctaaacagaagtaattcatattacaatggcctccttattctgcttttccactttttagtttttatttttatggagacagagcctcgctctgtcacccaggctggagtgcagtggcatgatctcggctcactgcaacctctgcctcccgggttcaagccattctcctgcctcaagcctcctgagtagctgggattacaggcacctgccaccatgccctgctaatttttgtattttcagtagggactgggtttttccatgttggccaggctggtctcgaactcctgacctcaggtgatccacccacctcagcctcccaaagtgctgggattacaggcgtgagccaccgtgcctgacccccttccactttttaaacaacagtaatgaaacttattaagtagggggcttcaatctggaaactccttatctgttctgctgcttctcctgccaacagtctccccagctccccaccaatttcttaaccacagggcttctgcacatgctattgtcatttcctttgcctgaatgcccttcactgtccttatttgccttgtaattgcttaatacatttttaatatctttcccaaggttgggcgcagtggctcatgcctgtaatcccagcactttgggaggccaaggcagtcggatcacctgagttcgggagtttgagaccagcctgaccaatatggagaaacccaatctgtactaaaaatacaaaattagccaggcgtggtggcacatgcctgtaatcccagctactcgggaggctgaggcaggagaatcgcttgaacctgggaggcggaggttgccgtgagctgagattgcgccattgcactctagcctgggcaataagagtgaaactatatatatctttcccgatagcatgaaagctccctaagaccaaaccatgtctgtcttgttcaccactgtactcatgatgccttgcacagtacctcacacttagtaggctgccaacaaatgttaacttgaatcagacccttaagactcagctcaaacatcatcttctttgggaaggtgtccctgagcctctgacactccgatagttacctctttcatgtgcttcaaaggcttcctgttcatatctgttatagtgcagtgcagttctttaatggtctgtctctcccagtaggctctgaagttctaaaaggcggaaactgtgtcatcttcatccttcttactcatgacactctgtatcacctagtgtactctaaggagctgaagaaatgtctactgggcagattactgaaccatgtttgcgcttggagggccctcagctatggaccacacctatggcacaaacaggaattacgcattggctaaacaggtcatgtctttctgaagcacccattttgactcaatttttcaggagaggagacatttatataaattgtgtttgtgtgtgtgtgtatgtagtgagttgaattcaaaatatacactaaactttaagtaagtaaaacgggaacttcaacaaagcaaagttaccatggggctccttgagcaccctgtttgggagcatgtattccctcttctctgctgtcctttggtagcttgccaccttaggagtagagaagtcacacctccatgattaaaaagaaagtcagccgggcacggtggctcacgcctgtaatcccagctctttgggaggccaaggcaggcggatcacctaagctcaggagtttgagagcagcctgaccaacacggagaaaccccatctctactaaaaatgcagaattagctgggcgtggtggtgggtccctgtaatcccagctacttgggaggctgaggcaggagaatcgcttgaacccgggaggtggagattgcggtgagctgagattgcacctttgcactccagcctgggcaacaagagggaaactctgtctcagaattaaaaaaaaaagaaagttaatgacaatgacaaagctagaattaaagctgttttcagatatctggtgttcttttcattctactgcccaagttagctgtctccttgcacctatagcatggtcaaatgcatcctaatgcactctcaataaatatgttcagatacaaattccattcagcatattaaatttaggccgaaggggagaaggtcaaaaggagtcatagtctggagatatcttcagtaataggtgtatggcatgtttatagatttcatatttaaatttactttataggtagctttcctagcatatgtgctcctattctatgatggtggttcattcaaatcctacccaccccgtctaatgttctcagtgtgtacctttacttttaaagggcatcatttaaagaggatggaagaaatacagtgtgggtactatattttgtcctgaggacaaaatgctaggtatgacgcaaggacttaagactatcgtcccaacagtgccctgctgctgcacaaaaacacctagcatttgtctagggattttcatttacaacaaagctttgacacacatgatcttattcactccccacaacaactctaaactagttcgggaacctgaaaatagcactcaattcaattgctagctgtatgtaagtgttttggttatagaacctaacaatcccctagggattaagcggtgggcgcctgctgcttcaacaaccctgcagcaagggaataaaggaacaactgtatttcttcggtcacaacgtaatcacgacaacagaaagcactcactctttccactctgacccacacacagtctgtcgaggcaattaatcagcactcccggtggttttcctataggatgccagttcccttgccaatcaagtctttccacagactgtagcaggaccacacccccggagaggcctcagggagggaaggtgctgtggcccacagaagtgaaagctgatactcaggttgacccgccagtgaaacttacaggcggatcttcccgggcctcagtttccccatctctaaaatgggctacccttcctttctcttgactagttccctccctgttctcgctgggccactaggaagtgaaatcagtgcctaaccgcagctgaaagtgctctgttaggctccagtcaccgcgccgggcatgctcagtagctggggccggctcggctgcgggagtaggaagcagctttgcgcgcccgggcggccgatgcgggcactttgaagaatcacgtgtgttgaggccctcttaaagagataggcacctacttttccctccaccctaaacaccgccctgagggcggcggcgaccgtggtaattgcaactgctcaggggcagggcttgccccagcgccgagtagtggcaacggcgtggttgcgtcgggggtgcctgggagcctggagtcccgggggcctgaaatcggcagcttcccgggcagacactctctccctcaggaagaggtgccgccgagtcagcgcggggcagtgtgagcgccccgaggtgctttctcagttgaggagaggtggggttacagggcacaggtgacagggccggagaaagatggagcagcccggggcggcggcgtcgggagcgggaggcggcagcgaggaacccggtgggggccggagcaacaagcggagcgcggggaaccgggccgccaatgaagaggaaacgaaaaacaaacccaaattggtgagtgctcccgcagcccccgccggccttagggacagggagagccccgggatcctcctgccattgaacacgggggcacccggggccccctcccaaggatgaccgcgacctcgctgtgcaactcggggagccgctaaaggagtggccacgccgaggcgcggagacggcgtgggggcggaagagcacccccttctctacttaacccctttctcactcttgtcagcccgggaggcggtgcgggaaggagaaaggcccagccccaacttggggacaccccgagtactgggtagggctgttgtttgtctaacttgtgggcgcaaacctttgcgcgattccattctcctcccacttcttgttagttgctgttttgcctcctaacgcgtagggtccggggcaggggaacctccctcctttttattccaagtccttgggagcccacctacagcttcgcaaatcaagaagaacactatttatgctcccagtctttctactttaccagaaatctcaggaagaggcgcctacgtgcctttttcctcctccttgcctctctccatgtgctctcccaagaaatgtttctttggaagggtgggggcgcgtgggagtttgaggctgggtgaggtaccaccaactgtcgagtgtgtgtaataggcatagtcatacagtacttccacttagttgattaagaacgctcaaaagcagtaggcacaaactgtgcaaatctcaccgtgctgatagtgtgaaccgatggtagcagtccatttcctgccactgaatgtgcagaggaatgaaa

SEQ ID NO: 12656 - DNA, 6000 bp, Homo sapiens; identical to SEQ ID NO: 1363

SEQ ID NO: 12657 - DNA, 6000 bp, Homo sapiens
cctctcctactacttctaaaatttgtttcttatattctttttttgtttgcttgttttgttttgttttgagatggagtctcactctgtcacccaggctggaatgcaatggcgcgatctcagctcactgcaacctccacctcctgggttcaagtgattctcctgcctcagcctcccaagtagctgggattataggtgcccgccaccacactcggctaatttgtgtatttttagtagagacggggtttggtcacgttggccaggctggtctcgaattcctgacctcaagtgatcctcccacctcggcctcccaaagtgctgggattacaggcatgagccaccgtgcccggccttgttccttatattctaaggcttttcgcttgctgtttgagaaagggaagtgggagcagcccctgatatccacaaactgacctcgcactcacaattaggcatgttcttctcttgttgaacataaactcacagaacaccaacccaagacaagatcactgggagcctgatcaagtgagacaaaacaagaccacttcataagcttgtctaagcacagacaaaaacaagctcactgtgacacccagaaaacaccaaacaccccttcttggccaagataggtcactgctactttgccagttaatgtacagctttatcctccctctagtctgccctccctataaataagatttattgaaatgtgcaatcatacaattgcccctgctttctgatgtatctgagacggaactcctgattcctagaccttcccccaaattgtccaaatcctataataggttcattctaacaacttcttattgaaacacatcatagttacctatagtgtgtgttgtccctccctggagtaagagtaataaactcaatctgtcaactatgggtatgtttctggtagtctttggttgaagggcaatgacacattccactgcctaaaatgttcttccccagatatttatatggccctttcccttagttcattccattctttggccatacatcatcttttcagagaggctgtgcttgaccacacaatttacaataacaccctcatcattctctatccctttgctctatttttcttcatagcacttactactttctgtttttgtattatatatttatattatatatatacaaatgttgattgtatgtctcttccattataatgtaagttccatgaagaccaatatctcaacttgatgataattatatccacagtgcctacaacactgcctacaacactgcctggcacagagtaaatactaaatgatatatgtttaatatgtattgaaaaaatgaatgaagtttacagtgtcgggctttataagtttcattgtcacatagtcataatcaatctgttgtttggacttagtcttccacttaaatagattggcttactgcaaaatctccattcttaattctttatttggactcatttcttatttgatttgacttcatatattgccaagtaattttcacaaatgactcataggtagtatattccctcaattttgttcaagtttggaataagctgtctgttgctttttttggtagattgtattattgttagcaattatcgacgactccttttccagtaggagagttatatatccctatccaattgactttggaaagttttaagaaaaaagggcaataggcagtattagacaggtcacttaaagagagatttgttgggattaagcagaaaaggggatagtggtgagaaagcaacatatatttggcacttactgggttccagacactcattcgttcagcattaagcaaccatctctatctacaatttgttgggccaagggatgcttcacaaataagttagtacttgagttgggtttttatggaaaaccaggcacttgccaggaactaaccagacaacaggttaagcgaggtgtggctatgaagggaatgactattccaagctcagggctccaggctcagacttgaaggcagtaaattgcatggcatattctggaaaccgtgagcagtttgacactatgcatagttgattcatttaatcctcaaagtgactctgtgggaaggtattattatccctattttacagatgaagaatcaggcataagatcaaagagctaggaagtggcagtatcagaattccaacccactcacatcttctgcttaagactttgtttcttccactctaccttactagggtttctgcagatcccatggagtgaccttaccaaatctgtaaccataagcataacatataggaagtgctctaagactgaacgagtgtcactttatcttttgtcatcaattaatatatattaagcacccacaagattgttggcattttaacacaggagaggacagttaccgccctcatggaattcacaatcaaggtcaaaaggcaagcaaacgctgacaatacggctataaaacctaactcatcccattttcagccaataaaacctttctagaatgtgaaacaattgatacctccaaatccatttgatataggttgttctctgacctcaggtgatcctcccacctcggcctcccaaagtgagttgttgttgtttgaaatagagttcaaactactgggttgtttgaagtagggttaagccctccagattaaaaacaaaagtaaaagtgaaatgactagttgagaaacagaaaattaattaaactttccagtgatcctgtcccaaagacaattattaaggccactcaggcttcttggtctgttctgctttcctacaaataaaattcctttcctgaccattggaccccctttcattataggtagcttttaaacttgtttagtttttgcttggttagggggtgagagatacagcaagaagggaagagaaggtttactgtgctttgaatgaacaggtttcatcatatgttagttggtactccaaacttttaaaatactttcaggaaagtgacaatggcatggcaattctgttgccagcctcagtgatgtaaatgctggtacaaaataaattgcattgtgccttccagtttactgagagctgaccaacaaacatgatatctagagtggcatctattgccactgtgatctgtatttcaaagatatgtctcattttagttttcatcaattaagccactgaaagataaatagatcctaaactttcaagatatactttgttctaattactaagatttttttttttactactaagttttggggaggataactcagaaaaatggttattaagtactcagttgccaggaaaaatactaatctgccttagtttattttacaacagcatacttctatttgccatgaaatatctttatagtaaacaatgaaacttttcataatgctaagtcctaatcaaaaatcaataatgcaataattcccacatagtttgttttcccacaatacaaaatcttggagaagagcttaaggaattgcatatttccatgtgaaatacagctatattataccactttgatgttttattataccatgtggctttactttattgaggaggatgaagaatagattagggataggtagatgagatgatgacatccatgtctgatttcctgtcagagaaaattagatatagttacatctgttttcagtctaatatcctgatggacattttcagcaagattttttaggaaagaagcacaggaattccactgcaaggtattaataggtacaaatttaagattttggaaatgaatgcagtattatcctatatatatctttttaaaaagataatgaaggtagtgaatggccttaattatggcagaaaaaaagttactatttggttccttagttgaatacgatcaataaccagcctaaaagggaaacattttgctctccaaacacccatcctgttgcttcatttattatggtactcagttggaagggtattaccagaggattttaaaaaattatgtaactcacaatgtattttttcggtcattaaacaatcactgaacacatactatgtgtcagacactaaagccctctgaagatgaaatgttatggaaatagtaataataaaaaattaaaatagtaacaataaaaaattaaaaatgcaagtgttaatattattaatctttcaagatacaggtcaaatgacagcattcaatttgctattctcttctctctgcttctacaccttgtacaaatatttttgtccatgtttgtgtacctacctactgagctccctaaagaggtagagacctttgggttattcatttttgtattcccgagagcctaacatagggtttttgctacagatcaagcagggggtcagtaaatgctagttggaatgagggaattaacatagtactgcaccatttagtattcaattaagaagatagttgtccaaacactaaatttctttcttaaaagtagttactgtaatgtagttgctctcttgttatcccagaacttgaattaccataagaagttgtgaatttctatttgattgtatgtattttgattatatttcaagatggtttatcatctagcaaacagtctaatagagcagattcaaacttgcaaaataaatgaaacctgtatagtctctaaaagtttgtatgccctagaagttcacattgaatttcgatgaaaacgactcgcttcccttccatccaattgcttgcgactgtcttacccgatctttccctttccttttttcccacccgttagccctccggaaagagccgaacacacaagagcttcccagtcttcctccgcccccttgcggaaagaaccgaaggcagagcacggcgccgaagtggagccgcctcaagctcgggcccttccggaccaccccggcctgcgctcggaagaggagggcgcctttggcttcagcgcttcgcccccgcgctgtgccctctgtcggcggcgtggggcagctgtagcagcgttggcggcaggaggcggcggccgcgtcgacgtcgacccagactggagcgacgtttaaagaaggggcagaatcgctggggagtgcggcttcttcttgttgggggactcccagccttccgcgcgtccggaggaggagaagcggcggcgccgggaagcaggtgaggacccggccccaatcagggagggggcgaaggagcgcgcttgccttctccgtccctgggccgcgcctgcgtttgcattcgcctcacttgaaccaggaagcggcagagtcggaggctcagctcctccggctctttctttgtgtgggccggggagcgaaggaggggacgagccgcgagggccgcggcgcggtccccttcgccgttaggggccgaggggctgccggtgccctgggtaggccccggggcttggggaatccatcacagagacccacttggcttttccctcgcccctctcgctgcttttttgtgcctcttttactcccctagcccctactttgatttagagcttttctgccaggcccatcctccccttccgtccccttcccggggcacaacaatgccgcctgcttcgcttcatcccccccccaacaccccaccctgccgttcgccaccttctactttccctggtaccccatattcctcccgccctcactctgctgtttgtacctccgtctgtatttgcaagaagcttgctttgcacgtgaattggggttaaaaacctcggttgcagctggcagggtccatatggggaagagggaggtggaggaagggagatgaggttcagctgccgcagggagccgcgtgtcggtttgtttcactccctcgcggatggcttttatctctttccaccgtcaccagctcctccgaactggccctcggtcaagggtttcacagtgatgtggaatggcttttccacagtcgaatcgcatatcttcggagtgggttcagaccgacttgtgctgtctctggggccaccctgagtgggaggagggggacacataaacgaaacgaaaccgagtcccagtgtcacctggacacgtacatttgacgcattcccatattggaagaacccgggag

SEQ ID NO: 12658 - DNA, 6000 bp, Homo sapiens
ctacacagatgagggcaagttcccatggaaaattcctaaaagtctgtttctgctcaaataaagatacaaccccactagctattagtctgcccctgagatttctgagctatgcaagcccatgagtttgaagtagagatttcctgtgtcgatttttttttttccctccagtcatccaagggtattcactaggtcagcccttctcgtgattacagagtttgggaagcagtggggtttgcagtcatgtgactaagaaagttacttttacaacccttgttaagaaaattacatagtgatccacagagtcctttagaatattagactttcacattgaaatcagaatcgccaggaactgcagttcatacacaaaacagccagtgcacctccagagactctgcgctggggtaaaacctggataggaagataaaagacacagcaataaagctgaaaaaaatgactgtagattcgctggatcctatatataaatattaactacagatgtggtgcaggtagtatgttcagttctctctatacagcattgcattctgtctttacgccacctccaagaggtaaaattacccttattgtacccttgagaaatctggttttaggaagggagaatagtgtgttctaggccctctggccaagaaatagcgagtagtaggaggaggtggtttgagctctactatctgtctgactcgatcacctatggctctgctgttggttaaagccttgcaagaaaagtggattttaaagatcttatgacggaggcagagggatgatggctccccagtggtaagggcctcctgggtctcctgggctgcaagtttccctacctccacatttctagaggaaagggggtctcgatggaggatcagggttgcgtgatgggaagtgagctagcaaacctgtttggatttccttctgaatgctctattttatatatatatatatatatatatatatatatatattcacagatgtcttttgtagatcaaagacaaaacaggcaaatgttgataataaggacatgttgtcaaaatgctggttcaggaagagaaatgctgctaaccagaggaacagtgaaaagcagtggctggtaaaagtcactggtgcatcctgcaacaagctgcaatccttcaggttccatggcatctggcgattaggagggctccggccttttgttaatcactgagcttttgcttgaagtacattctgtagctacaaggactgacctgcccttcatttgatcatccctcctcaccctccacatggtggaattattagcaagcagatgaatttaatttaaccgacatgtactccaaacctcttgtatttaaggaactctcttggcacttcaagggattcaacaattaatcaaacatggtccctgctctgggaacacatcaccaagcaagcaggcaacattagcaggacaaacatcaaaacaaaaaagactaaatgcagcaaactatgcattttatttaaaaaaagtacagaatgacgagattccataatgctttatttgtggatttattgtacaagttacgccctgggacttttctaatctaggcatttatttttattagtatgtgtgttattaaaaataatttattgaggtgaaattcacatcgtaaagtaaaccatgttaaagtaacaatgtcatggcatttcgtacatcctcaatattgtgcaaccatcacctacatgtagttccaaaacgtttctgtcaccctaagctaaaaccctgctcccattcagcggtctctttccgctgctcactccccttcatcccatgcatgaaatttgcaaagcagaattgaattagttgacttgatattttatttacttcacacttgtaaggaattaaagccattatgtttgagttaaccatctcatttccgtaaacctgtgcctttaactagacttcgataaatcatttttggggtgcagattgtacaggtaacacaagtatttagaggtattgatagatattatctattaaatgtgccaataataatccccctggataaggtagtataaacagatttccttactgcagagaaatccagacttttttaaatgttttttttttttgaggcagggtcttgctctgtcactgtggctggagtgcagtggtgcgaacttggctcactgcaaactctgcctctcaggctcaagcaattctcccatgtcagcccccagtatgtagctggaactacaggcatatgccactatgcctggctaattttttttttttttttttgtagagatagggttttgccaggttgcctaggctggtctcaaactcctggactcaagcaatcctcccgccttggcctcccaaagtgctgggattacaggcgtgagccactgcgcctggccaaatctagacatttcttaatagaattcaacgtcagtcatgcgcacattcattcattcattcattcaattgaacgcttagtgtatgctaagctctgtgctatactccaggtgtcaagaagctatgacggcataaaaagaaggtgagtgattgtccacaatgcaggaaaaaagcccactttagcaatgggcatggaggtaaggaaatactatacaatggagattgaggagaactttgtcaaaacagtggcgtgaaccaacaacaacaaaaatcagggatgtgctacttgttcttgacaagccagatctatcaccaaaaggaagatcccagggacaggctgggaagcacagggcatggcacaggccacccatggaaaacttcagccttgggtttgaggatgatggcatccctctaagtctcagtgatgggctggaagggatgaatgagaaggagttggtggaggaagaagttgtcaaaatctaagacatatccatgcaaccgcagtgagagaggtggagagaagaacacgttgggccaagagattcttaggcatcaggatctaaacttggcaaccagttgactatgaggaagacatgaaggagaggcagaaggcaaggatggcttgagtttctagtttagctgacgagatgggtggcaacatcattaacaagggtaaagagatgttcaagagacagttgttttttgttttgttttgtttcgtgatttaatcaatgggtttggggcatgcccagaaagaggctacctaagggcattatttgactaatccctggaactatgtcaacacacactgaaaactaaagctagagaaggaatgaattcccatttatgaaccagtatttcctgactatcaactctgtggaagccaccctaggcgcaggaggcaggtggtgaggaattcctagacgctgtgtttcttaggaggagctaagatgaaccacgcttcatgcaggggaagcaacttgtttcttaggcttagtccttccttcctcctgaaagccccctgacagagtgctggacgtagggcaggacttctgaatctaaagagcaggcacttctcaattatactttctccatgcattgccttttaaaagctgcatgcctgctgggctgggtggctcacgcctgtaatcccagcactttgggagtccgaggtggatggatcacttgaggctaggaattcgagtccagcctgagcaacatagtgagaccctgtccgcaccaaaaaaaaaaaattagcccagcgtggtggcgcaagcctctagtaccagctgcatgggggacggaggtggagaatcgcttgcgcctcggaggcagaggttacagtaagccgagatcgcaccactggcactccagcctgggcaacagagcgagactctgtctcaaatacatagatacatatatacatacatacacacatacataaatgccgcacgccatcagcctgcttcaggggcatctcagcagacaggattcgttgtacaagtacatggtaccactgggcttgtaaaaaaaattttttttatactcacagatgtcttttgtagatcaaagaacacaacaggcaaacactgaccctaaggacatgtcaaaatgctggttcagggagaggaatacggctaaccagaggtatagcgaaaagcagtcgctggtgcaccctacaacaagctggtgcaatggtgcctttccgggccctacacacctgtctgagctccatgtttttaccccaggttggctctgctgactgaagatactcgcctgacctctccccaccattccaggtctgacttatccaggaagccaggcagccgccgcctcctcttcctctgcctcctggaatagggacctaccctctgcaccctctactttttgccttgtcgccaggtcgctcccaccctcccaccgccccctccccagacaataccatcagactctccgaacgtcccaaccctcgccttgcccctcgaatgctccccaagccggaggggagccgttccacctttctggcaggaagactctggcaaggggagggaggcgggcgccggggagtcctggagaggcgggagggcgtggcggcggctctcacgttgcagccctgcctgcagctagtgggatgccggcggggccagcccgctcctgcttgcacacggtctgggaagagctgccgagaaaacaccgtctggcccggagaagcgcaaaccctgctccttctctctctcctgaaaggaacggaaacgttcccagcgctgcttaggcgctctccaagcgcggactctactgcggctcccaccgcgctccctgcatctcgcccttccctcctggggtcctggacttctctctgacaaagagccctccttccccgagccgcctgcggttcttgcagctggagtgggcgaggcatgcccacccgggcccaggcgcaatgaagacgcgagaggaaggctgagcgcagagcggcgcggccagggtcccttggctcgggcccgcgccccgtctccccggggtggggcagggtgggggtgtgccgaggcgtggacttggggaagcctcgcagcgccgggaataaaagggcgccggcttgctgtgccgcgctgggaagccgagctgcctcacccccggccccgggaagggcatggccccggcaaactcccggccgtgactcgcgcgccccggctcggtggatgctcccggcgcaccgctcccgtgtgcggcggcttcccaaggacaggtgaggacccagggtggccagggcgccccagggctgccgtgtctgcctgcagggggtgaagggatttgagacacccaagggaaacactgggggtaaagggcctgcatgcaggcagattgcaccgttccccagcactgtttgaagttgctaagaaatcaggatacctgaattcctgcaattttaagtagctaaggatcagatagggaggagagccggatcttgaaggaggatgcactgaataggtctaattaagcccagacatcccatgcctcctttcctccctctccccaaagcgctccccatccctggctctctctggagaccttcaaccccgccatcccgcgtttctaggaagctgccaacggaattcctaagtgaagcccactctgctcttgcaatcggtgggggaaaggacgcttgaggagcctctttccaagttgctcaggctgtggctacttcaagtctcctctccctcctctcttccccctctccttccccgcctctttcctcctactcttacccaggctttccctggaaaggggacagcccaacgcctagagtgatccgagccatgcaaaaaaaccgggacagtcatcacgcagacaaaaggggtttggtgtccgagtcccgggcggcggggactcgcagggccaccccagccgcgttccgggaaagctcgtaattcatcccgcagccagctcgacgcgacccagcggactctggaagccggccaggggctcagggctgcccgcccggccactccaggttgtctgcccagggccaagacgaaagcagacggcctcacgcccccacccctgcttcccggcggggttcgcagaccgtctctggcggcctagctggcgccaggccgctt

SEQ ID NO: 12659 - DNA, 6000 bp, Homo sapiens
tttgcttttctcctaaggaagttgcccagagagagtgccctaagcagaggagagggagcagaaagaaagaggttactgaaaagaagaaaagacttagaaaagctctatggggcactgaagattaatctcacacctaaagcaaaacttagctccaaaaagactagcattaagattcttgccttctttgtgagaaaatgatcttcccaaagtgtctggtttttatacacttattttggatcaattaaggtatgatgctccaagatgctgagaatttgactgtcaatgttaaaagatttctgtccatatcatgccaagatcaactttaactttccctctcctgcataacatcatgtgaaataaggatctgtcaggttctgtgaagccagtatttgtctttggccagcatcctaagactttttgaaccactttacttgatcctcagtcaaactttttgttcttgtttaaacctaccatcacattttgttcagttatttagcacgaagataagcgggcctggcatttggacaaatatttgaagatcaagtttgtcacagggccctccagtttcccttccagatcccaccccacttggagcgtcttccctttctttcccacccttcctgctctactgccctcccaccacatgtattattttaacatcttgacacctacaaaatctttagctatatggcatgtaaagtaagagaggataactaaaccaagtcaaagggtaaggaattgctatccttatctctgaattttaaaagataaatctttaaagacaccaccctgagccagtcagggaatacacttcctggttgagggaactatccaatggccacttaactagataaccctgtctcccttggtatcctgtttcctgctccccttctgtaccactgagaatttattccaacttttgaggttgtatgttcttacctattttcagaatgtggtttcaaattttgctatttaacactgcctttcagcaggagattcctatcgaaagattataggtaacatctttctgatatttccaataaaatgtctcttgcactggtctgttaagactcagatttatgggtagtttcaccaaactatgtcccttagcaaagctgtagtatgtttggctgaacacacagatatctcctactctgtttactgccatcatggagtggatggtgtacaggtatgacacctgaagctggctcccagggccatgcctcttaggtcactggttaacagtactggctaagtcacttaggctgctggggctcagtgttacatctgtaaaatgacttctaggtttcttataagatttgacatcctatgactgccttcctgtatttaggttagagcagtctctggtttaggagggtcacacagcaggcatgtccttctctagcattagtagcgtggtcacgaatatgggatgtggagttagactgccgggattcaaatctagctccacccactagcagtgtgacctgggcaatttatttatctattgcagctccataagctataagcagggaatgatgttacaacttactctatagggtgaatgtgtcacaacctatcccatgggctgggagtatcacaaaatatcccatagggtgggggtgttctggcctaccccataaggtggaggtgtcatgagctaccccatagagcagttgtgaccagtaaactctaaacagcctggcacatagtgagccctccttaagcattggctaggatcattatcataaaatcactctcatccttcaaagtctaatttcaatgtgctcccttctaaaataccttacttggctaccttaaggaaaaaacaacttttccttccttggacctttcatagcaaagtgaatagactctactctagcacctacatttttttccccatcttttcttttttaaaacatagttggtacccacaatgtgccaaatactttcaccataaggtttctcatttaagtcccgtaaagtaagagagttgttacctatctcaatttacagatcagaaaactgaaggttagtgcagggaaggggcttggccagggtgacacagtttacaaatgacagttctgtaacctcctccatgccttccgagtctgccaccccacagcaatctttcatattaattagttatgcagcccatctctcaaacttgttcattgtcactcagggccacggacagctgatctttatttctggaaccagtcactcaatgttggacacactgtaggctcaaaatcaagcatgccaaatagaactgccgacttgaacttcttactctcatgacatcatttccttataaatcctaaaaaactatagtgattataagtcatgttaattcaacacacaccttttatgtatgtaagaggttaacgaatggctgctggcttccttataggaaatactatattgatttctgccaggtttttgtgtctcctctgtgccttaatcactttctagtttcatctgtttatggaaataggcagcctgggctatttggtaagcaaattgataggtctattctatgtgggtggtaatatgagagtccacccagatcccactagctcttctatggaaatagatttcttgttaatactgactgggtttaggatctcattttactataaaaggttttttgtttcaccttcccaactgaattttccctaaataagcataagaagagcagggtttgctagttgttggacaggcatttgacttaacagtaagccctgtttatttattgtcacaatacgaggggggaagatattgcatttctaaaaattaatcatcagcaactatccttctatatcaagagagaccacagaaatgttttcaaattagaatttaggccatgtagaggagaaaggagaagtataaggaagggacagaagtaaatagaaggagaaaggcaagcccaagcctgagcagaaaccacatggtttatcttagaagaaactgatctggaaatgaaaaaagcttgagtcatcaaggtggggtccttcaagactgttaggaagcctcagtagcccagcttagggagtggagctttgaaggactgttcctcttggatgggtacctcaaaaacgtgtggcttcaggtgtttgttacacgagaacaacatattacggactcaagtgcacagtatgtgaacccatctttgagaaaataagcatatgtacataaatatttgaaaagaaaaacatctagagatgtgctgtgtttttcttttccctgtctgtatctcttggctttatagaataaacatatattgcatatgaatcttaaaatgaaagcaaaaaatgtataaagggcaggattttgaaatgaacaattatgttgaaatttcacaagttatatttcatcagatgcaacaacgcttgtaaacccttggaggtttactggagaaggtgcttgagggctcaataccttcctttttactcaatgttcttcctttcaatacacagaggcaactttgtgaatttgtcagtggtctctgtgactcatcttattaattttttatataaaattccaaaaattctcacctttagtgtgatgcacataaaagttttatttttcttttcttcttctttctttattattattaattttttttggaagacagggtctcactctatcgcccaggctggagtgcagtggcgtgatcctcctgcctcagcctccctagtagctgggactacaggtgcatgccaccatgtctgctaatttgtcaaaaaaattttctagagacaggatctcactatgtttcccaggctggtctcaaacttctgacctcaagcgattctccctcctcagcctcctaatgtgcaatatgctggggttacaggcatgagacactgtgccctgcctaggtgtgaaagttctatagacagaaaaatatgtataccagcacatagtactgggaaagactgaatagcaccttggacattgggatttttacatttttaatacagtgttgttaatgtcacaaatcaattcagcatctaaaaaaattaaaaagtaaattttctattcaactaatcagatctatttaattagcactctgctttgaggaatgatgtttcagctgtggatataaaaaattgacaagagttttcacagttttctccttctgcttcattagtaaaatacggaaatataaaaggcaaaagtaccctacaaccatgtccaatgtgatattgcctccccaaaggaggctttcactcaaaaaaagtagaccctcattgtttccataagtctccgagcaaattctcttccggccacagactttggatgtagaaaataagcttatctgggcaggtggatatgcagagtttgcaatggaagcaaagataaaaggaaggcatgctactcttacctccataggctctactctaccctgatctctgccctgtctttgatcactgggcaaagaaaccagtgaccatggcaaatagtacccattgtactcagaagaaacccattatacttttgtgaaagaattatcctttttaaatagctaaaacaatatcccagggaaaaagtaaccaagactttattatattgaatggataagatttccactacttctgtctaaaaatcaaataatgcccttggaggacattttaggaattaataaataatcttttgttctacatagtaaataataaaagctggttttcttaattccactttgagagttgtgtggtctatgttaggaggaaagctggctggagccaaccatggttaattcaatgccaggctgtatttcttagtctccctttcatttcactcttctgccatagtgggtccatcatactcccaggccagtgagaagtgccctctagtgattggatgggttcgcttggcgcccgcctccatgcagacagagcaatgcctgtgtgggtgcttcctgatcaagactgatgagtgggatgcaaatatcttctttttaatgcatgaccctggcatagccagagggaatatgagtgatggtgcctcaaagcagtaactttttgcttagagcttgagagtcaaagttaaggacccacatgtatacttcggctctagcgagtctaaggtgagtaaagccttcagattatcaataaagaaagattttaactattgggcatgtgaattcaaataacgatgcaatttcacaaagcaaagaagaacataagaaagtttgtttctctggcctactgctcaacattgctacttttcatgatcagacctgatattagactgagggttgaagtaactgtcttagtagaattagaaaattaatgcatttatttttcagaaataccttaagttttaatgttttacatgattttgggataaaaaggaagagtctttttactttgtaaatgtactcattttttcagttcttttaaatctcttttgatagcatctgttagtgcaccctcatacattttcctcattttatcttatcttaggcatttactttgattttaaattctcatagatattgaaaattatacctgtgtaatttatgttaaagatctggccatgatcaggggctgcaggtgttatttacaataatgtcagtgtctcatagtggtttgggtaatttggtcaaattacaggccgttacttcataaattgtgagctgtctggagttaaattttctgaagttttattatatccaattcaattcaaccaacacatatagaatgtttaaaaagtaaggagcattttgataaggtggtctggagaatggggcaaagatgatgaatttattatccacagtgggaggagtcaaaagtataaagtgctttttaaaaatcaacatatttataaaacccaaagcaaaggcagcagaaaaactgtagctattgtgtaatttattctataatcctacatcagtctcatttattaaaatcagcatttatattatcccttaataggaaatcgttgaggaaaagatatgaaggttaaagagaacttacctagatgctgcaaata

SEQ ID NO: 12660 - DNA, 6000 bp, Homo sapiens
caatatctgggagccctacttaagtcctaatataataattgatattcataattcagttagtgtattccattgttccttggaggtatctgttgaatgccagtaaggcactggtcagggagcttataaatactgagcatttatttcttttctccctcaagaagtacttggaagtagagtcatcctcttatgggtagatcagggtgcaaattattttatgtgatcttgtttcatctttttagatcctttttcctgactgagctggagcacatacctgagaccaaaaccatagagttagcttatatttgatttactaagaatctagagtttcttttctcttgcttttttgcttttgaagcccattcctgctttgagtgctggagagctgcccgagattgggaaacattaagattggttactctatttatgtctcttgggcccttggctgattgatcacacagggatttgtcatattgcctgcttcttttttttttttctggtacagaattttgctcttgttgcccaggctggagtgcaatggcatgatcttggctcactgcaacctccgcctcctgggtttaagcaattctcctgcctcagcctcctgagtagctgggattacaggcgcctgacgccacgcctggctaatttttggtatttttgtgtagagacggggttttaccatgttggccaggttagtttcgaactcctgacctcaggaggtccacccgcctccgcctcccaaagtgctggaattataggcgtaagtgagccactgcgcccggccgcctgctgctttgaatcaaatgtgaacatagcaactaaaagtaaacatcatgtggatgttagagaaccaggggccttctttgcctggggaactctaggatacttgcttgctgttgctaagatgttttctggccttagcacagcatcagtcattgaaagtgcagctgtgtttttggaatagagagctgatggaagtgcaaaggcacactgatgagtattatcctgaacaatggatacagatgcaaatcattatgcataatccataatgtccccatttttgtagggttttgtgctacgtgattgtgtgtgatttgatgtgctgagaactagaagtgtgccaaagtatcatttccgctttcagaatagttttgttagaattttgaaagatgagtaaatataccagaccgttgcttttcaactctttgtagcattttgagtggctaatggttttgacagaagaatgtggctgaatgatagattgattgctctgacttgatattgttttccttattccattatgaaaagacaaccagagattggatgtgaaaattccttaaagaattacataggatgagaaactgttctacccactaagtttgccataggaacaagggaccattctgtagagcactggtaaagtaccagcttgcctgcattcaaaccgtggctctgccacagatgagttgtgtgatcctggggacattacttagctcctttatgactgtttctacttttgcaatgagggggtggtaatgatagttttatcatacagagttgttgtgaggattaaatgagttaatatttgcaaatctttaatactgtgcctggcatatttaagcattatatgaattttacctgccaccatttgtcacttattattgtattatacagtgtcatatcctttttcttggttattgaaggatgaaatgggagatcagtcccaaatctgaatttattctgcgatttggcaacattgaaaaatgttaagccagaatactttggttaaaccatagcattttaaaaatcaggacgttattataggagtactcattgtatctaaatctaaatttatatttagtgctctggaatttttcctcaaaaatgattcatcgtttggccattgagttccccttttttgcagtttttaaattaagtctgactagagcttctctgatttctggtcccaaagaattgcctctgcctcgctttatgatgtcaaagaatgatggtgagatacgatttgggaacccagctgagctgcatggaactaaggttcagattccatatttaactacagaaaaaaattccttcaaaagaatggacgatgaggataaacaggtaaacagtttgttcagatgtgttcatttgattctgaccatgaaaccgcatgtagcagggcctcgtatctactgttcagcttccagcaaatctcaccatctggaacccaattacagacttggaagtgagccagtaaagttttctcctagcaagaaagagagaccgacacatatgaatcaccaccacccacttaagggccctttagagcctactttaaagtagaattgtgtctaaaataaggctaccgatttaatacatttattgatttcactagctcagtggttttctaaatggattcttggaaatgtaacttccaggagtttttaataggttctcttctccaaaaagaagtctgtagaaaaggtttctcctattataataaatgtgtttggagaatgctgcttcatattcccttgttgagggaaggactaaatcctcagtcttggaaattcgtagtgcacattagcacggtaaaagccctgagaagttctgcagtgaagagacctggaaatgtgtgtttactaaacttctttcaccaggaaattctttcttggggaacatatttggaatactatcttgggaaatgctgccattacccatttagcaggtttggaaccagaacagggaggataggcttttaaaattagaccactaattgcaatggtcagatgatgattggtggagacaacagtataaaatctcagaagagtgggcagatccagaagaagtaaatagtctacacattggtgtaccctgcaggcatcaaggtatagctcatacttccagcaaagatactgaatcatgcagagaagtcaaattatgttcaacatagtgtcttctataaggtaaagaaatttattataggaacacttgaggctgggcacggtggctcacgcctgtaatcccagcactttgggaggccaaggcgggtggatcacaagaggtcaggagttcaagagcagcctggccaacatggcaaaaccctgtctctactagaaatacaaaaattagccgggcgtggtggcatgtgcctgtagtcccagctacttggaaggctgaggcaggagaatggcttgaatccgggaggcggagattgcagtgagccgagatcacatcactgcactccagcctgggccacagagcaagactgtgtctcaaaaaaaaaaaaaaaggaacactcgaatgaaaatgtttttaaaatgcaatgaatattaaatgattatgttggaaaactaacttctgtgacttaccctgtgatgttgtgtagatgaggtgttgctacagaagttttatatggatagttaggggaggtgtagcacatcctgttaaacaattccatgtactgtcactttcataattctgacacattttaaatcagttcttcagggatatatttaaaaaggaagaggtataggaattttcagtcaatattctttggcatattttcccaccagcatttggagaggaatgagggtccactgtcccacggtggttgatgccctgggaaatttccaggcccagtccctgattgtgtgaatgagaatacatcctttcacttcaggctgagtttatgcatgccccacccaatctatgggtgtgagctcatgctttagagcaaacatattttgctttttcttgaagaagagtatttgatcagtatttcagattacatatttctctttagactaagggagcctatatatatagtctgtgtgttgatagaaagcattgttttggctgggtgtagtggctcatgcctgtaatcccagcagttggggaggccgaagcaggaggattgcttgagcccaagaattcaagaccagcctgggcaacatagcaagacctcatttcaaaaaaaaaaaaaaaaaattagctgtgtgtggtggcgcatgcctgtagtagctactgggggtgctgaggtgggaggattgcttgagcccaggaagtcaaggctgcagtgagctatgatcacgccactgtgccccagcctgggtgacagagcgagaccctgtctcaaacaaacaaacaaacaaaaaaaagcactgttttcttggtacttgaatactccaaagttaccagtctactagtaaagttttttttttttttttttttttttaaagaggaaactcagcagcagataaggttgcttactttgcctagggttctacatcaggttcatatttgaattgagattcaaattgtagcttgttaagatttcatcttagtgtttgggagtaagctggttggaatggtttacctataatgaattgttttgcagtctctcattgttaaaaaaaaaaagctagcattttactttgacatggtaagctccaagaatattaagtattaagcatttagaaatatatattttaatattcacatttgctggaagacttgataagtataaatccaggaaataaatttattaatgaatgaaaatgaaatctatccacagagagatcacaattgggagcgggtatgaatgttatttcatgtgatcagtgtctttcattttccaaaggaaaatattattggaataaccaaaagtgtttcaggctggttttagtaatttaggtaactcagcactgatgagattttattctctgggagactttttgaatcctcagacactgctgtttaaccatgctgcatttttgagaaaacatttccccccatttgttaaaccagctgggtcaccagcagtagagttgcgttatgcttcctgactgcagctcagaacgccaggcttgagtgagcgcctctgaactctgatctggttctttgaagcaggaaacacagtctcccacgatgtcacccctcgcctcccctccttcttccccgcctcattaccagagggtgcccttgagccatggctacagcaaactgcggagcagcgcagaacagatgcatccaggtaagaggcgacctgggggccagctgtcccaggcagtgtcttagagactccttaatttaccaggcggtaacgcttcaagctgcttaatttcctgatttaattacccctgtctttggaaacatggctcaatttaattttatattctcaagcaaggtttttttttaaaaattgatttaaacatatttgagtaatgtttcatctcctgtcctagaaactagttcgtctttagacttgtaaacagctagatgatttaatctttcatatacagattttattgaatagaacataccatattaagggcttgtattttttttggaattgttattcctttctgtaagcacaccaaagatatttatatagtaactgctttaatgaaatttcttaagaaatataactgcaaaagcaaaagagttgatccaacctttgaagactgagcacgtaaatgaaaatatataggtcctgtgctttggaataaggataaaggaaatgctaggggtagcattttgctgaggggtatgtagcatgcacagttgtggggttgccttcttgctcacatttatgctctgctggcctcgttaggtggtaaaatacgttagttctgaggatgacttgcagagttggctgtttaggctgcagtgcctaaagcactggaaattcactgcagcatcttgtgcctcctggggttcagactcctagtttaagatatgaccaattaaaggtattctagaactggatatctgtaaacccccacccccccagttttgttttgtgggctgtggccccaaatgacccagtttctgcaggtttttactgcattaaaaatagtggtgacttttagagggacacagaaataaaactgcgcgctaggctgaataaagagaggctgtaatcttgcagagagaagcaggcgtggcataatggcaatagcttttgattggaagcagaaggtgtgtgggtttctgtga

SEQ ID NO: 12661 - DNA, 6000 bp, Homo sapiens
tggaaaaaatgaagtgaatgcaatgaggtccttttatgttgaaacagaaaaatttagctacaattactttcagaaaaccaagtgcccgcataaatatttgaaattgcttctgtgtttataaatgaataattgtgttctgccctttattacctaaatatgccgttgtcaaactgttattcatgtgttaaattttatgtttatatattaggatctaaaagaaaaagagaatgatgagcttgatattcagttgaaagtatttgatgaaaacaaagaagatgacctaactgaattatcacaccgtctcaatgacattcgagcagaaatggaatatcctttgacaaaccacaaaacaattttgtttgcattgtgagaaagggatttgtgggcgattttgtggaacattattagagttcttgtctgccctcccaatttatatccatttatttatattagaaccttactatgatgctgtccttgagattcatgttgaggaattgtcaggctgtcttgatgatttacacagagtgtattgaaatctgcacaatggctcacagtattatagatatactctactcagtggtcttgaataaagaatagcataaggcaatatatcttacatgtaaggatttttttggggaaaatttcactgcgttcatatgtgactataggtgaaatacttattcagtttattaaatcaagcttcagtgacttagagataaaaagcaattcaaataaatgtcttattctgtattcaaatatttgtgtttcttaacaataacaaaaatgtttagatgcaatagaatctgaatatagcaaagctatgtggtagaagcatctgagtcaaatacagctagcatataaccttccgacggcagcaattttatataaaatgattttagatctaagagatggttgtcacagcattgctggccatttgtttcgcacctgttatgtttcttacttaatggattctggtgaacctgggaaacatgtcaaaaccaaagtgacctttgagttggattttttctcaatgatgttttcttccctttcctactgcttgcccccactccccaaagctggaagtaatattcccctccttgaaatacccaaagtaccttgtttgttctattttatttatgtacacttctgtgcccctgtgagattgagggcagaaatgttatgtttaatcttttttccttcaatgcatctatgaaagtcttacacataggtattggataaatgtgtgtgcaatgaataacaatgttattattttaaggaataatttctagtaatttttattcatcattagtggtgccagtctactgtggcttctataatattaaatgtttttcatatcaattaatatcttgctttacatagattcctcttataatcaaacttcaccataaaactatttttggatgcattgtgtagccatttaaggacctcatgagactttagcacaacactcttatgtggggtctaagaagtaagccatcgtatgcttaattctactttggagaaaatgttgacatttcaggttattttaggatattgaattacatcttgtcttttatctttattttaccttggttttccaggtcctcacttttattacaaaaatggatccatttgtgaaatctgatttctagtttactaaaagcatctaaatttctgcaactctatatcttgtctctactttccattttttatcaaataatgaaatacaaatgaatgcaaacaataataatttcagatttagtatttcatctggataacataaaactgattttgtgacctcttagcagtttacagcatgctcatttgccttctatcttatgtggcagtgaaaatagagtagtagtgatttgcatgaataatataggtcctctatcacaactacagggagatcaaaaggaaaccattttcactgatggcattgctgttccaatggtaccagctataatctggactttaaaatatgtataacggatcatttaagattttgacagtcaaatggtcttggacatgctcttgaggtctgtctctctagttaaaagatcaaaatgattccatagaatcattactttatgcagatgtttaaatactggatcatagagttgaaggtttaaaaacagtaatggaagcaagattataagtcaatgttttaaaaagttaaactcctttgttatgaatgagacttccatcaaggatctttaatatttttcctttactttctactgatatgaatgaagtctaccatcttctatataatatgctgaaggacactgctgctgaaaattacttcttatctattctacaacattttttgcttatcagaaatgattattatatcaggtaagaggcagttctgagagtactatatttataatttgaatcggatattaaaggaaaatgaacaatgtagtggggcctaagcaatatatgcatatgtgtgtgtatgtatatatatatgtatatatatatgtatgtatatatatatatgtatatatatatgtatgtatatatgtatatatatatatgtgtgtgtgtgtgtatatgtgtgtgtgtgtatatacacacacacacacatatacacacacacacacacacagggtataagagtttgactctttaggtaacattttttttttttttgagacggagtttcgctctgtcgcccaggctggagtgcagtggcgcgatctcgactcactgcaagctccgcctcccgggttcacgccattctcctgcctcagcctcccgtgtagctgggactacaggcgcgcgccaccatgcccggctaatttttgtatttttagtagagacggggtttcaccgtgttagccaggatggtctcgatctcctgacctcgtgatccgcccgtctcggcctcccaaagtgctgggattacaggcgtgagccaccgcgcccggcccaggtaacattttttaaaaggtgttcattttttaaatttggccagaagagacagatgcacttgtaaaaatggggtactccagcgacaggactttggtagcaatgaacccaacagattgcactggccctgcaatgaattttctttgctagatagtgatatcacagaaaaagcactgaagattctgggatagaactttaaaggttttatcttgtgcatattaagtaaggttttactgttatttctctttttacagtatttatctactaataaatgtgatcttaacatctaagaaaataaaagtgctaatatttcagttttatgtctagtagtgtcatccttcaaaataaatgagtatgaaaataaccattaaagttaaaagttttagaatctagttaactgggaatatatcggaaaaccacaaagttatgaaaaggcttctgagtgactgaaattatccacagactggtgaccatgatgttacatttaactgttcaagagactcttagttgttcttcatactctgatttgcgtgaaattctgacaacctaggttctttgatttctcaaaacctgcttgattaaatggaaaaggaaagctaccatgaggtcagcacagtctcaacaaaaattacaactgtaaagcagcatagagaactattatagttcagaccagtacagtaatttgttgggcatcgtgacattacagagagataaaaaatgtttaaaatattaaattgtgtgctgttttttaagcaacaaggctggttatacgttaaaaattattgttgtatttttaattaagttctaacaaatttaaaaggggtactgtgcccaaaggtactcagttacctggggaacatcatttatgtgaaagtatccatttctcagcaactatgaataaataagaagttatcctcatatggcatgtttttcatcctaagaacatccatgtgaggcagaagtgtgacaagcattttattccacttagggatgattaacctggccccagctgtgttttccttatttaaccattgactagactgaggttataatccaatattatttactctagacccgaagatgacttgaaaaaaaccagatttgtaatatgtattactatttattcttattcttgggaccagacccattactaaagacatagaagagcaattagagtctatttggcttcatttacaaacttttagtaggttggctatttatcagcacactatatttagggaagtttatatcataatttgtctatagtcgtacttcttactactgatttttctctgttgaatttattatcctttgacaaatactaaatcttacccaaattttaatgcaaaagtgccttttaaaaaattttgcagtatgtgagtggtcatttttaaggccagaattacgctgatggattacagaattaggatatgttttaaaacctctgacactttaaacaaattgaagcaatagccatgcatattaagtgtgtatgcttttataaaatgggtcttttaaaatgtgttgcataaatagatccttggatagtcttgtaatataagtggctctgtccagttttgtaagctgttatagctatcttgactaaaagtgctgtagtaaattcaagacattgcttgccacgtaatgtgaagaaactcatcccttattgaaattgagaacctgtggatgcgtagaaccatttctgtatccatgaatgtaggactaatggctcatttgtttttattaactttagaaacaatagcataagtaaatagaaaaggttgataagtatctttcaacacaagcatgaatccctgcaaactagattatgaagtcactagatgtagttgattacatcacaatgggtttggtactgtaacacccagaccatccttaagcttaggcatgcttgtcctaagaaagtgtagtggctgcaggattttttaaaacaactccagaaaaaagacctagttcttctaatatgttgaatgttttctaaagcaaattgatctgcatggttagaaaggcattcatgagtactttctctccttttcaggccacaatattataaaataattgaggaatgtgtttcacagatagtgctacactgcagtggtatggatccagacttcaaatacaggcaaagattagacatcgatttaactcatctgataggtatgtatcataatcctcattgtcctctgattgtgttttgtgccttctgtattataagcactttttaagtgaagaagttcagtaagaagcttcagttcttactgaacttctattcatatctggtaaatcattgtgtctctgggcactcaattgctgtaattgttaattataatgatcatgagagttctgcctgtgtgattagaaatattaacctgtttaataagttccaacactcctggaggtagtttaagcttagtgttccacaaaaacccattacattattatagatgaatgcattactatttagaaacatgactctgaaatcttttcattttatactggtaccttagtggtcttgtagaaatcatgtatacaatggggtctcattatagttatgttattaatgcccaagttttagaaaagaaatacaggctcatttcaatagcttgagaccttctaagggtatcaaatggatcaatttatattttcatagaccttagagttagaaagaatttgaggtgatcatattcatctccttagattgctgaggaaatgactttatatcatcctagactggtagttagcagtacttttcagaacaacctctgaaggatgatctgaaccttcccttgtgaaatgtgctatgctatctagccttatggctaagcagtcttatttatacttaattggaatcactattgttaaggtttaagcatgaactcatttgtcttatatttaaagaaagaaaacaactattatatgccaattatatattatttttgactccacagcacaaggcagatacacagtaacattcaaagatggataacttattatttatgtattatttctgttttaaatgtaatgcatacttatttcaggcaatcc

SEQ ID NO: 12662 - DNA, 6000 bp, Homo sapiens; identical to SEQ ID NO: 1364

SEQ ID NO: 12663 - DNA, 6000 bp, Homo sapiens
gaggcacagagaagctaaagaaattgcccaatatcctatagctaaaaagtagtgttgggaggccaggcacagtggctcacgcctgtaatcccagcaacactttgggaggctgaggcaggagcatcacttgagcccaggagattgaggctgcagtgagctatgattgtgccactgcactgcagcctgggcaacagagtgagaccctgcctcaaaaaaaaaaaaggaaaaaaaaaaaaaaaaaaagtagccctcggcatatagcaggcactcaataagaattgaatgcattcttgccttccctgagattctcccttccgttcctccccacccctaatgcctcaggcccaccgtttccatggtcgaaggtcagggcgagaagaacgtgaccttctgggggagaccgctgccacggtgtgaggagctacaagggcagaagctggtggtggaggagaaacgaccatgtctacacgtgcctgcttgcaaagaccctgaggaagaggaactctaacacttctctcctccactctgagccccctgaccttccaaacctcaataaactagcctcttcgagttcgtctacgattccttaaaggaggaaaaacaacctatccccttccccaaaagtagggtgatagcatctcatagggcaaacagcacagcacgggccaagacacagcagcctgttgcggaaaacagtattttccactgtggtcgcaggttggcaggagtgaaagcgagtgtgcagtcccagcctctccccgccgctgccataaccccaatgtctgggccctgcgcagcccccttagagcctcagggccgcccggcacgttcctctgcagagctccgcgttacgggtttcctgattggctacttgtcctggcaggcacttcttgattggccggcgtgcttgttcgttgtctccccgtctcctggacctccctagattcccaccagccggaaccctggaggagcctctgccggccgactccgactccgcgtcagtcgaggatgaacggcagaggcgtggccgaggctggcaccctgccgcccgagcacctgcacccacccactcccgacagcccagctccaatgccacaattaccagcgacaaatagctcggcgaggcggggggcgggccgaggaagtgcctgtgttgcgctctgagctgaggaggggcaaagaagctagagtcagtatccgcccggaggagcccccaagacaaatccagacactttcctctggtaatttgttcattcattcaacacttattagcgcctgctgtatgctaaagctgagtctgagcatctagggtggaggagggctggtagaaagaggacatctgagtgagggaacagactcagaaggtattcctttcgtgtgaacatctattcaacacttaacgcctactgtatactaacaatagtgctggacatcacggagaatagagaagaagaggaatcagagcgttacgtgtctccgcagtaaagggaacaaagccagacaccagtgcttttagcatttgctcattcatttaccacttactgaatgccgggccccttgtgaagagacgcatcataagaatcataataatcatggtaatagctactacttagaaagtacttactgtgtgcttagtagtgtcttaaggctttccatagcatgaactcatttcgtccacagcaaacccatgtgggtaagtattattatccccattttacaaaggaaacacgcacagaaaggtagtaggctggacatttttgaagcatcatggattgtgatgaggtcttaaatgtcaagagtgctgtgggtggaggggacccgtctgtgtgggaaggttcgggtaggaggtttgtgacatgcacacccagagtatattggtacacttacttgacttctctggttcgttttccccttattcaagtggaccagtcaatgagttgaagtgaagatgaagttgatgagtacttacttggtcatcttgggaagactgagccaaagtgaggggttctggttgctactacagggtatgagagaggtatacgtttacaagaaagtgggaattcagctgtgtgtgtgtgagagagagatgcagacctttgggcctgtgcaagaattaaggatgtattgatatgtggcatgtgtgtgaggttacaaatgtatgtatgccataacaatgcaggagtcccgtgtgtgcacatacacattaaggtgccatggacatgtatgtgtgagtcacaaacatgggtacaatactgaatgtgaacatatgtcaggggtgtgtgtttgagagtcgttgctcaccaatgtacagcaaaatcattattggggccccttttgtacgcctattcctgctgaacaagatggagacagtttgggggagcctaacctttgccttagtgaattgaggcactcctgaggtgaatcctcattcctctacaaaacaatctacaaaaaattaatttctggaaattgagccacgtggaaaaatgaaatggtgctggggccacaagtactaggaacctaggaatggggaccccaggaagaggcgcagcctggagatagattcccgaggaacctgaattcagacctaaaggagtcagaaagatctgtagacctgcagctgttcctgtccccaaagagggcaccgcgccctgcacagcttgtttgcttccgttactgggcaaaaaaccagggagcacatacttcaagacattggaaaatatctgatttgcggggagatccccatctgggtaacactaggatttggaatgccagagaaggaatcctgaagggaggagaaaagagtggccaaatcaaaggcctggaggtgggactgaagctggctgggttggaggagggagtagaggatggtttgggaagtgtttgacttgggtactgtggaagcctaggggaggaggggatagaatctgagacctgggggtgaggggttcctgcagacagtggccaaaggcagccctcgagagagaaggagaggacattcctggcagaagttacaacacatgcaaaggtacagaggttgcccccttcctacccctctccttagaggtgggttagagatgtatcctttttacagatgaggaaaccaaatctcagaaagattaagtcactttcccaagtgtatggtggaggccccacttgaacccaggcactgtgtctccagaccccacactattactgccttgtttaaaccagccaatgatttaatgaataaaggatgaacaaatgaataagtggatgagtcacctgaaaattctgcaggcaaaagagactccatatctacttacttcttgcctatcttctgccacctctcctagtccaccatcactgctcactatggtcaaggtcctacccaatctggcccctgctaccacaacccccttcagcttgttccagccacattggcactggatgtttcctcttcctggcacattcttaaaaaaatgtgttgatcataaagtgaacatgaccctttgggaattaactggagttcttgtattccctcatctgtaaaatagacattatattatccaccccactggattgttgtgagggttggatgaaatgatgcatgtaaacagcttagttaagagttgggtacaatcagtgaacaaatgattatgaattagtgcttttattgtagtcagaatcataaagatttgacaggttcccatatcccacctctgcttggactacctcatttgctcatatgcaaacattatttggtacctactgtgtgtgcaccatgggatgggcctgcctctgtggaaagttcttgggtgcagggggagacagccatgggcactgatgacatcaggtagttatcgtgagttttggcggtgtccagagcaaagggatggtggcgtatataccaagtgtgttctggtgtgggggtggacacgcaccagggctagggctgcagagaatgtctgtgttgcagatctaggtttctccatgatcatcggtgggaatgtgttttgtctgcaagtgtatgctcatatgagtttccctgggtctctgtgtgtcagtgtgttacctgtgtgtgtgggggtatgggtgtatgcatgcatgtatgtaacatgcccatgtgtgttactctggacttgtatgtctgtatgtatacctagattggcgtgtgttctgtctgtacatgccctcgtatgtttcctcacttttgtgtgtgtttatatgtgtgtcatttcttgtgtgcctccaggccccccttgccaccttgggcaagggtgtgtacaccacccaagtgtccacctccgcttgtctgatgctgtctgtgacgcccccgctctctgcctagctgagcctgtgtggatgtgggagactaatctccccgcgggcactgcgtgtgacctcacccccctctgtgagggggttatttctctactttcgtgtctctgagtgtgcttccagtgcccccctccccccaaaaaatgccttctgagttgaatatcaacactacaaaccgagtatctgcagagggccctgcgtatgagtgcaagtgggttttaggaccaggatgaggcggggtgggggtgcctacctgacgaccgaccccgacccactggacaagcacccaacccccattccccaaattgcgcatcccctatcagagagggggaggggaaacaggatgcggcgaggcgcgtgcgcactgccagcttcagcaccgcggacagtgccttcgcccccgcctggcggcgcgcgccaccgccgcctcagcactgaaggcgcgctgacgtcactcgccggtcccccgcaaactccccttcccggccaccttggtcgcgtccgcgccgccgccggcccagccggaccgcaccacgcgaggcgcgagataggggggcacgggcgcgaccatctgcgctgcggcgccggcgactcagcgctgcctcagtctgcggtgggcagcggaggagtcgtgtcgtgcctgagagcgcagctgtgctcctgggcaccgcgcagtccgcccccgcggctcctggccagaccacccctaggaccccctgccccaagtcgcagccatgaactacctgcggcgccgcctgtcggacagcaactttatggccaatctgccaaatgggtacatgacagacctgcagcgtccgcagccgcccccaccgccgcccggtgcccacagccccggagccacgcccggtcccgggaccgccactgccgagaggtcctccggggtcgccccagcggcctctccggccgcccctagccccgggtcctcggggggcggtggcttcttctcgtcgctgtccaacgcggtcaagcagaccacggcggcggcagctgccaccttcagcgagcaggtgggcggcggctctgggggcgcaggccgcgggggagccgcctccagggtgctgctggtcatcgacgagccgcacaccgactggtaagccactgccgcggacgtctcccgtgggcctgggtccccagatcgttcttctgcgaatgagcaattatcgagcgccgcttgtgtgcctgacacctggccctctcacctaaatctttttcctttaaattattaagctggatgcttcctctgtgccccgcccttgtcgcccccctccgccccttaaaccttgatggatccagggagcaattatcaggcacctgctgcgtacctgttccctactacccctcccccaaaagtctttggcttcaatatatcctatgagccttcgaaaaccgaacgtgtccttcctaccctccccaacccttgccccataggccttgtcctctaatggatcttgtgagcacttatctagtacctgcagtatgcctcatccaagagcccttccccaaggcctttgatttcaatgaggtttgtgagcattctttgagagcctgatactgtcctgttctcctcaacccttgccctgaggccttctctaatgggtcttgtgagcatgtgtccagtctatgctatgtgtcccaccccagctccgtccttaaagccct

SEQ ID NO: 12664 - DNA, 6000 bp, Homo sapiens
gcaatcagaaacgaatacaggtaccaggtatagaaaatcatgaacaaatattacaccctggaataatgcaaacagtgtaacttaaagtcccctttaaagaggatggagggtaaaggatgctgggaagtgcctgtgtgatactctggtaaaagtctcagagactaacactgagatcggctgcctagtgtcactaatgcctaggtgttggaggtctgggttggactggattcgtggaagaatccacactgtactgtcttaacacaagaagtgtgttttgaagtaggagtatgtctttctcctctaaggtaatgagtcacttataacagtacttataacataagacttataatagtcttatgaacagagtgccttgtgtaccccagtgaaccacgagctccggatgtcagctttctcaactgtaaggcaaggaggggttctacactggactatgatcagaaccacctggaggactcatgaaaatgcagattgctgggccccatccccagcattcctgattcaggaggtctgctggaatgaagccagagaatctgtatctctaacgggttgcaggggaggctgtgctactggcctggggccaccctctgagaagcgctgcattagaggctctccttctctaacactaagtatttgggctattttcctgttctgcgtctttcccattagcactgacttcatggttctcagcagcttgctctttctctgtcactctctcttcccttagtatagcatttcagatgtccatcgtgcttagcattgaacaacagtccaggctatacctggttgatatgaagtagccacagatatacctagaaagccattttcctcccccactgcctccgattccctgcccctgcctgtcacatagttaactcggagaaagagcagttcttctggctgggagctggccaggcacccacagctgggccagggtgtcctgttgaacagaaacaattccctagaaaaccaacatcagacaaggccactctgcgaccaggatggaataagatgaaaacaagaccacacattaatcatgtctgaacacggacaaaacatgcaccttgtccaaaccacacacatgaccaaatatcccccaatcctggataatgcaaatgactgctgctgctttaccaaccatagctgtggcctgcctccaatgttccctgctcctagagaacatttgttaaaatacccaatcacaaattccccctggtagcatccaatccaaagtaatgcccagcttccttaaacacgccctcaagccacctgacacaggtgcaagccctctaagtcatccttccttgtaccatcttactgagatgccccgcggttcccacggtgctcgttttcagtctctgccacaagaaccaggtgtggctggagggcagtgatgactcatactcaaccagatttctgctcaaacacaatctcctctaagacactgtcctgggcactctccaggctaagtcagattggccttctccactcatctttcatgcgctctactatggctttcagctacatactgccatgagaattgcattcaagtcagccttcattagactgagaagcccaaagtgtcatgtctctgttctgcacctgttcttagcacagtgcctatgcaaagaagatcaacaaacattggatggatggatggatggatagatgaacaaatactgctgtatgcaaaatacattaaaaacaactacaaactcaagagttgatgagagaatgtcagtaacgccaaaagaactgaagtagtaagagaagaaaccaccaaggtttgtgtaaccagagccacagcaagcttttgctcgtgccaagatggatagaagtgggtaaagcttatgtacaattaaggtgggagccttttcttccatttctaactcaagacatttgtacagaccaacacattatgttcattttagctttagtttagcatacagcagtctaccgccaatacaataaatacattgccaaaggctatccaaactttgttgttactctggaattaaacagaaatcatttgtgggcttgcaaacccttcactactcacagatttgggtcaccataatatctgtttaattgtaattataagaggctttctctgtgtctggcactgtaggcatgcatctcctagcaagttcagagggcacattctgatgggcttttataagaggccatgttgcaactaaccagcttcacttcagggttagggatttggttcttttctgttatttttcagaaaacgaaatataagatacagttttactatgttatccatcaagagaaaactcattatcaggccaggtaagaatataagtgtatcagaatcaggcacagtggtgtgagcgtgcagtcccagctacttgggaagatctggagtccaggagttcaaatccatcctgggcaacacagcgagaccctccctcttaaaaaagaataaaattgcatcaaattgataaactggataaatctgaaaaccagagacttgggggaaagggtgggcctctgtctgcatacacacaacctcagcccattagatcactccattggaagacatacagaatgaaccgttaaataactgcacttcattacaaatatactgctggagatgctttcaaaagagcaggtgatttttagccacaaactactataagcaccttaaatcccactataaacatgaattaaattacattcgttttgacattatcacctctaagtattaactcctgaaataaatgaaaatcgatgccccctccccctgcaataatggttgcagtaaagattaagtacaaaaggactaaaaactacaggagcactctatttttcgtaggaagttctgaagaatgaaaacagttcaaatctgaaaaataggtctgattcttcttaaatgagactcagtccccttctcattgagatacagaaagcacagtctggccatgggagaagacatttggattaacttctttttgtgcataaccctctcggtgacccacccaaaatgaaaggtgatcaaaacagaatttttggttacctcgggagaaattaacccattactaaagtggcctgtaaggtttaaagtatatacttctgccaatgaactaaatcatcttatgggccaaagcaaaacaagagtgagctaagtgttctgtccccagcagaggaggaggatttcatgcccctcattcattcattcaacaaatatttaggtcctgctctgtgccacacaccaaaagtgctgagcaaactatgcaacactgtgctgtccctatggtcacagagcttacagtagaggagataactgttacgcacaaatatgtaatactgctacgaaaaaaaaaggtgttgtatgagaaaatggaacaggaaccaatttagactacaggtgggagagaagggcactgtgaaaaaagtgacatttaagccaaggggacaacagatcaccactacttagaaaaggaaaaccttttttggcaaatgaccacaaatgggattttaactttgcctgtcaacaacggactgggttaaacctcctcttttccaatccttcaggctttctgaacatcctgactagtgtactggaatcctattacctgaacacagaaaggtctcactttattatgatttattattatctgcagccttcctatgcctggcctaggaacatccaaaaataatctgccagaggctgaaaaacagaagctggctgtcagcaagaacattacctgggtagaccaaacatttaatagcccaagtaatcataagtgccttgccaataaagtggcagcttctctgggcagcaaggtggttccaatgctccggggtctaaatcaaatgggacccagggggttcaaaggttagttggctacttcgaactgatgtttactcagtaaatcaaagaccggatcaccatttccaggtcccagaccctgaagacttaaaggacagtatgggaagtggccttttagcatcacggagcagagagctcgccaggctggaggaaggcagcagcgaaagggtcggggccgggaggaaggggggcgcaaggagaggagcgtcaggtgctctggaccccgggactgcgagccagaccaggaactggggcgtttcccgccccaccccccaacccctgtcaacccccagcaaaggcaacccagccccctccaagaccccgaggttccagcttcccccgagacaggaccaggaagacaccagcagccccgcgcagggccggagcccaccaggtccgggtgcccgtgtccgcagcgcagaggagggcgcgctcgggtgcaaaaatggccaagacaaaactctccccgcccacccgaaaaaccaaccacaccccctgcatccctcagcccgagccgcccggggccagcccccgtgatcgtctgctcaggcccccgcgggttcccgtcggcgccgcgcgcgggctcggcgggcacacgggcgcaagtgggagtgaatgggggtgcgcgaggcaggcgagggcgcccaccgcggtgtcccccgtccggaccctgcccccggggcgccctcccgggctccgcggttctgggactggcgcgccgccctcaaggctgaagtggacgcccggacgcgggcggcccccactcacccattggcgtcgagccgggccgggccgccgaggcagcgtgaaagttggcggaggcgggcgtgggggttggggcgccgggatcggggcgctgggatccaggcgcgagggtccggacgcggcggcggctgggccggcttcttcctcagtggcggcggcggcggctcagcgccgcccgctgctgcctctgctgctgctgccgctgctgccccggggcgactcctgctgctgctgttgcatcgcggcccaatgcgcccggctgcgccgggtttcctgctccccgcgagtggaaattgcgaaaaaaaaaaaaaaaaaaaaaaaaaaaaaaaaaaaaaaaaaaaaaaaaacagcgccgcccagcccagcgcccggcagccgcggccgcgccgcccgctctcccctcctcctcagcgctgccgcgaggctcctgcagctccgcctgccggggacgcgcggccgccgggcgggggcggggccggagaggggcggggccggggccggggccgcgtcggggcaggcgccgggggcgtccctgcggctgaggggcttgggcgccctcctcaccgcccgcgccagaggcacccctctccgcgcggctgccacccacccgcagcggctgggctgacgccccgggaagtgccgcgagactcctcgagaccggaggagaggggcttcttgggggaggggcgtgggagtgcaggggcacgtggagaaggaggagaagggggctgagcgggagggggcgacaagaggtggaggacgggctggggatggagaccagggcaggcccggggccaaacgcctgaccagggtgatggcaggtggccctggggcatcgaggcaatctggaatgagttttcccggggggctgttggaggggaaggaaaagggtcccttggaagggagagaaacgcggcgtcccttcggtggggcgtgggaacgcaggcaggccaggtgcgagttccgcacagaggaggcggtggcactgacgtggggaaaaacgggcgaaggacgcagcggggccgaggggacgcatcgcctcgctgggacccgcctaagccccgccccagtgcctgggccaggtgcggttcgggtgttcaggaatgttcccgagctctgacgttcccaggaatccgctgagatgagggctggctccctccctagcaggcattattgtgccttactgactcccagacctggacggccgacccttgagtgggcgctaaaatgttaacagggaatccgtgggcattcgtgggcaattcagaagctccgttttgggtccattcaccaccacacctttcgccatagatactctgcctgccaccacattcctctaccggcccgttatttccttttccctt

SEQ ID NO: 12665 - DNA, 6000 bp, Homo sapiens
tcagttcagggacaaaagacaggctttgctgcctgcctcccctttcccctattcctcctaatctatttgaaattcttttatggataagaaagctaccatttagagtaaaagttctaaaatgcaaatgttgggaagtaaggcatagaaacttatttacaccaaagcacaataagacaagattacatgactgagatcctggcattttctgaattaaaagaagtttaaaaaaaagggggcgggggggtcaggtacggtggctcacacctgtaatcccagcactttgggaggcttggtggcgggggggtggggtgcagatcgcttgagtccgggagtttgggaccagcctgggcacacatggcaaccccatctctacaaataatacatattagccaagtgtggtggcaagtagtccagctacttggaaggctgaagtgggagaatcacctgagccctggaagtcaaggctgcagtgagccatgattgtgccactgcattccagcctgggtgacagagcaagaccctgtctcaaaaaaaaaaaataaagagtagaacctaggtctctaaaaagtcaaggcagagagtaaactctaggatgagagcatgtatgttgagggggaagggaggtggacaagcagaaggaaaaaacccagaaatctgagaccaaaacaaaaccacctaagttgccaaggttgtcctttttaccttcaatagttcacacacaagcatcacatattactgaagtaactgtttccctaaagactcataaagtatacctcgaacactggctctacattaacatattaatcctgacagtttttagggaaaatacactatttaggaacttccatggtaagttcccaaactaattaattaataattaccacaatcaaaagtgaaaaaagttgtatacctgtgtatcaagaacaaaaataacttttcctattaaatttcccatggtttacaattctttttgaacaatatttttattgatgcattaagcatgtacagtttcacagtacatataatttcatacatttatataatttgtaaagatcaaatcagtgtacttgtgatatccatcatcttaaatatttgttttttctttatgctggaaacatctgaattattctcatctagctattttgaaatgtacagtagattcttgcaaactagtcaccctactgagttatcaaacactagttattatttcttctatcaaaccatatattgatttatgacaattctaaacattcattcattcatgtattaaatcaataaatacttagttaagccctgtgtgccaggcattgttctaggcaccagggaaagtcacaaacaaatcaaaatctctgtcctcatggggtgggaatggacaacaaactaataatgtcaggtggcaataagtgctgtaaagaaaaataaagcagcaagtaagaaggacagagtgaaggggcagagtactattttataggtggtcagagaaaatctttctgataaattgtatgtaaacaaggacctaaaggactaatgagaaagcaattcacacagatttctagggaaaaagcaaaggctctaagatggcagtgtgctaggcactaacaagaaacatcaagaaggtttggaggctgggcacagcggctcacgcctgtaatcccagcattttggaaggccaaggcgggtagatcacctgaagttgggagtttgagaccagcctggtcagcatggtgaaatcccatttctactaaaaatacaaaaattaaccaggtgtggtggtgcatgcctgtaatcgcagctactcgggaggctgaggcacaagaatcacttgaacccgggaggcggaggctgcagcaagccgagatcacaccactgcactccagcctgggcaacaccgtgagactctgtctcaaaaaaaaaaaaaggtttgggaggcagaggtgggaggactgcttaagcccaggagttcaagatcagcctgggcaacatagtgagactcttgtctctaccaaaaataaaaaaattagctgggcgtggtggcgcatgcctgtagttccagctatttgggaggctgaggcaggaggagcagttgagcccatgtcgagaggctgcagtgagcatgactgtgccacactgcactccagcctgggcaacagagtgagaccctgtctcaaaaataaaaaagaaacatcaggaagggtaatgtggtcggaacaggataagcaaagaggagagtttcaggacatgcagttaaagaggtaagggacaaaccaaaagtggttaagaggttggagaaaaaaaaaaggttaaggaacagagaaggcacatcatgtaaggccttaaaggtaagatgaccacatgttctggttttctggtttgcccaagacagtcctggtttatgcctcttgttctgacattattatcatcagccccattatgctcaaaagtgtcccggtttggactataaattttatggtcactatacagatgattatcaatatttttttttttttttttgagataggatctcactgtcacccagtctggagtgcagtggtgcgaacatgctcactgcagcctcaacctcctgggctcaagcgaacctcctgggcccaagcaatcctcccacctccaccttccaagtagctggaactacaggcttgggccaccacacccagctaattttctatttttggtagagacagagtctcgaactcctgggctcaagtgaccccctcccctgcctcagcctcccaaagtgctgggattacaggtataagccaccacacctggcaattatcaacactttttaatctcagtgagatggggaaccatcgaagggttctaagcagagaaattttaaaagaatcatcctggctattttgtggagaagaaactatagaaggggcaagggaactacagagataccagtgaactgactattgcagtacacaggtgaaggattaggtggcttggaccagcacttggtggaagtgttgagaaatggtcagactctgaagtcaaagataacaggacttgctgatgtatgtaggatgtgaagagagaggagccaggagttattccaaaatatttggcctgagcaacaacaggaagaatggagagactagtgagatagcaaagaaggttctgcaggagggaggacagtggaatcaggagtttggtgctggagttgctatgttgaaatgcccatcaagatactgaaatgtaggcatctggatatagagtctggagttcatcagagaggtctgtgctggagatacaaatatgggaaccatcacataaagggtgtgggactataactacatacttattctacggcaataaaacagatgttcctctcttcataagccaagtcctaaaatagtaaaaagacaaccacaattcaaggaatttctacaaatcccctatggaaaagcaaattacaccaccgatagcagcagttttcaacattttttttcccacagctctatataggcacatacatgaaactttctcatggatattcttggatttttatgaaatccaacaataaatggtgcagagaggtatatcattataatagtccctaaacctgacagcgatttaaatttctcattagccatgggtaggcttctttaacactacttttttctgtcccattcaaaaaagtacaatacatcaaaactgagaatgacgttttacaggagttaagtagagcctactctttcagtcatctgcaaacaagtatctgttatcagtctctaaaaacaaattactgtgacgctttagagcctaatatctgcatactaatgtatctcaattgataaccctgatctgaagtcttgcaatagataaaaaataaaattctgattaactttttctgaacctgggttataagatgtacaacagagtcccaaaatgttacggtgccttttcttcacacactgaaattcgttagtatattctgatcctattctgaagggattaacaacttaatcatgccccaaggcatttcatgggtaactaggtgatttataaacccccttcatactccaagaaataacagactacttacaaaaaaattttactcacactaacttcattaagacctcaaacactcaaaagttccagaaaaaaagtactttgaattcaaatttgtattttatacacaacgtatgtagctcctgcattaacttagaagcaataacagcttacatttaaaacgtatcgtcaagaggctgtaatacaaatttcccatctatagagttttttctaaaagctcgaatattatgtattccagccaagaaatcaagagagttctgttgggaactcggacaaaaatttcacacaattttcagtggaagtgtaacaacacgcaaaattaacaagtctctgttgcatcgttgccaggaagaccccagatacaaagcttcttctccacctctgctgaaccccaggagttcaaaaattctagactaagcagtccagcggagaacacagcagcctctcggggagagggaggtgcaaacgtctcagccggttgggcgggaaggggggctggggaacaggcaggggtttcggggcacttacaggtccgtcaacaccataagctccgagtaggcccggtgcagcagaaattcaatgagggtgctcagccggtagcccgggctagccgcagctgcagcggccgccgccacggcggctcccgggggaggaggggctggggctgacgggggtccgccgctgcccccgccgccgcctccgggcgggaccagctggtggttctccagctgcactggggccatggcggcgcaggaccgggcttggcgcaacggcacacgatgcggtcctcgagcctcccgggcgctcggtcaccgcgccgaaacgggagcgggcagagtcgccaccgcctaccgccgggccgcctcagaacaggaagccgtgcgccgaccgcggaagcccgcccccatgtagcgagaagtccgccgaccccagggacaggagcgaggggcggggggaggcggggatgggggggaagcagggcggccccgcagaggggaagctgcgcctccgcaaacgctcagaagcagcttcgccagacagccgcaacgtacatgttgactgcccgaggcggaagtcgatcggcagagcggaagggggacctgcagaggaccttccgacaggtctgtgtctgttctctcagctgtctagcaccgcagcgctggggggcgcgtgggagtgaggcggtacctgtgagcgcgcgggagagcggaaaagggagccgcgcgccgccggaaaccagggtgagggctgagccggagtcgtcaccgggaacgtcagcagttgccccgcccttaccctcgccgctctccctcccgcctccgccccctggcgttgtaaaggcgacaatttgcccagagaaatccaccatcgcttcctaagtggggcacaaacacagccaggggaggcctcctctaaatgttcgtgaattctggttctggaatcgcgaagaaatgggagcggccgcgcgcttgtgattctcaggcctttgctcctcccatacacgtccacggcgcgttacgtgggagaacgttttcgcccctttttttttttttccaaactgtgggaaaaggtgctagaaaatatgattgcgggtagagacagggccgctggcagagtaactcaattttaatagagtcgggtgtatgctgaggtcgtcaccatcccccaaatcctgtcagtcccacacaaaaacggcccttaaatcccctgccacgggctctcatatagtttttgtccttgctcttgcagtcaccgctctattctgaagggcttttcagttcatccatgcctaccgacactcccgtcccccccatcaaagtccacgtttaattttttgtacctgctttaaaacagcgattctcaaccttggctgcactttgcaattatctgaggagctgttttttaaaaaaatacttagatatatgggttccacccctgtagatt

SEQ ID NO: 12666 - DNA, 6000 bp, Homo sapiens
ttggattagataccctttgtagctttcaaaagaaaaagtagtggctcaacacggacagactgagtgacatgtgcatgaacaccaagcagtgctttcctttcttcccataacagcccattcctgggattgaatcccttgctggtattttcctcctccacacgggggactccttcccctatctagaaataagcttaagcctctcacaccttcttttttaaaaaccttgtcccccactcctatgtctatgagtggttaccacctcgtctcctgtccttcacagcaaagttccccaaaatagtctacacatgctatttaaatttctccacctcttcacacttcgccccattacatcgagagttctatctccactattccactgaaaatgttctggcaaagggcattatatgaaatgctcactgtaaaatctaccagattccttcctcactttcattgaactttatgcaacatctggcattggtgaaatttctcattccactctgaaggtcccttcttcatctcctttgcctgccacttgaatgctggtgatctaatactttgtcttattttccccagacttccatacttacaccaaccacatcccaccagaaaatcaggcttctcttaatgaaagtcacatagacatccccaaatcaactcaccccaaaataagccgagttatctagctcaccttgtaccccatcagcaaaccagaaatgtggagatcaccccactcctccctttccttcgctgctctctccgctttgttgttgtcgttgagggtctcactctgtcacctaggctggagtgcagtggcccaatcagggctcagtgcaggcttgaactcccaggcacaatcaatcctcccacctcagcctccagagcagctaggaatacaggtgcatgccaccacgcccagctaatttttttttttttttttaattgtagagacggcggggtctcactaagttgccagggctggacttgaactcctgggctcaagcgattctcctgcctcgacctcccatattcttcccacttctagaggtgaccaagtcttatcaaacctacctatttgataatggctatttagtgacagccctcctttctagcgcctgggttcaggatctcacatagtctcctactgatcctgcaggtgccagtctcagcccctcctgccctcatccattgtctcagttcaatcttttaagatatgtaaacctgatctttttccagccctgtttaaaatctttgcctctaagcttaagatctgagttgcagccccatgtcaatcactaactggcatatggccctagacaagtcacttctcccaaatttgcattctttataaaattgaagtttgatcaacaacggcagttttcaaactcaagaactgtctcctgtgcagaggggtaaaggccaagtgagccaggatacaggatcctcattcctgatttcacaaggagcagcctcacttccactcattttatttaaggttctacccatggggcaaaaagcttaaaacaaaacaaaacaaaacaaaatcacctgactagatcactgtaaaacatctctcacctctcaaatgatatgacttttctataatctttaataagaccaaacgaaacactggatacaaaatcacccaaagatacaaaatcaccaaagatcattcaataataaagaggagtcctcagtatttaagaaacttatgtcttgtaatctccatttcttcccagccatctccctgacaaaatatccaacccatatttggagtgcaataaagggaagctgagaagaaaaccagacttctctcccaccctcattgtatcccatactgttacttccatgtatactccccacacaagagaactttttatatgcagaaatgctcttatcttaaattcagcaaattattcaaaaagaaacaaatggggaatgaagtaaatgtcccctcaaaaaatgttctgtaaaagaagaaagtttatttcttttaacctacttagaacaatcttgagaaatttattttagggtattcagggtttcagatatttataaaataaagacgtatagcattaaaaaaattttagtgttaaaagccaatctatgagtcattttgtaacatcaaatttttaaaaaatctgtccttggaaaaattatctgtcatatttaattgcacccccaccatagcaacaagggtacttaaaagttaataaacactacttacaaacacatctcatgtatacacaaagtttttaaaacatctatgtgattgaaatagtctacatagtcaaggtatttacacgtgagtaagattctaaaaatcagataaaaggcatgtcaaatattagtcattactttatagattttcggggaaaaagaattagactctatctgtacttgtctcaattcagagaattactcacacaatttaaaatactgaccctactttcccctgcaatgaaatgaattcattaaactcttctataaagatgattaagcatgaataatcatttatgcctttaattatataactagttttcaaaggatttccctgcctttatcatttcagcctcagtaattatcaatcaaaacactagttattttaaaaacacaaagctttaccttaaacctatttcatctaaatctttattaatcgttatttataaatgtcatcactgaagtctgcaatttcctaaatgacctaacatttgattctatttcacctttctgacaaacaaaaattataccttttgtaaacaatcttcagatctcgccactcaaggaagctgcacattttaggtttccgtgctaaaacggtctgaacaagttctcttgtgatctttttcttctctttgtctgatagtgggacataccatttttgcagtcgaagctttccctgacgactaaaaagcaacataaactgcatctgttaagataaataaaatcaagattacatgtaatactttgaatcaataaagttaagattatgtgtttcacagagaagttttgggggatggggcatttacatgacaaatgattagtagccatcaatatttctatgccaattaaaatagcaagaaattcttttggacagatcttcctctagatgcaaaccttccaatcccaccttgttccacattaagtttgaaggggagtgtgcaggagaaaaaagaaaaatgggtaataagctgaagtgaaatttttgaagaaaaataaagatcactctttcaatttaagaaactattttctacctgtgctatacattgcgcactctctatatgcatcaaaagagaatggtagacatcatctggtttgggtacttttgaaagaaacagaagacctgctatttttcatcctgaggccgttctagttccagggtgaattacttgcagacagtagcttatgtcttggaatgttctcctcagtttatgatggcatattttaagcaaaacagaatgatccaaaatattaactgaaaaatcccataaatacaaattttcattaataaaaaagtatgttttcatctgacttttaaagcattccaacttaaatatgtacaaaatctagaactgagttaatgtattatgaaaaagaaaacaaacgtttaaaaggccacaataagatttacacttattaaataagattcagcattgaaacattacatgaaatacttcatttaaaataaaaaatagtatctacagatggaatggatgctgaattctagtgtgttttatacttaaactaatttgtatgtatttatttgtgatctgcaaatgtgttgattagtctgcatgtttcatttttaacgccaagctttttgtaatccaattggtcatctcaactgcaaacagaagtattgtttctacaaaggtaatttaaaggcagaattcacataggtatccttttttcttttaatcactgttaagttcctttaacagcgttactgcaaataagattcaagcatgattctcaagattcaccacaccatcttgaatttgaacacggggaggggaaatttacagaaccaatgtagaataaaaatgggccctaaatttcggtaagaaattatcgtcgctttttgtaaccacccaaaaaggtatcaacaagatatctagaaatgtatgacgtggcaattcaactttagtaaagttaaaatggtcttattacctcacttaaaatgcgtcaggggaacaaaatataaggacattattaggtgataccaaagtgcctcccgtgcaagtcctgaagatagcggcattcgaagggggcaggaagtgaagcatcaactgggcatttactgcaaacccgttaccagaacttggaaaagaatggacctcgtattcctagatcttggtgaccagaaagggtgagggtttgcctgcgaagagtatgggctcaaggctgtctggagcagggtcctgtatccgccctaccactttgcaggacgaaaaaacaatgtattctccttaaaataaattatgtcctaacatgggacgaaacccggttgcaaagcacgagtattccttccctcgtgttaaaaaccaacgctttgattttgccgcaaatcacagggcaccacaattcctcgagactggcattaaaaacaatgggctcagccgcggcgcgggctcggggccagcgttcctcgggtccggccgtcgccggtgcctcccccccactcccgtggccacactccatcactgaccaagcccgggagaggtgacaggcaaggagcggagcagacaatggcatccgccgccgcgcagggggcgccaagagtcctcggccgccaccgcccccggcccctcccgaaagcgccccgcaaaacttgaggcgattcccgaaccacaggtgccgcgaggctgtcgcggagcccgggactggcccccacatccccgggcgcggcgcggagtggtgcggagggcgcggacacggagagaagtgagttgcgggcgcggcgacccagtggcgggccgggcaggctcggggtggggtcgtcggggcgcgcgcggggtggcggggggcgcgcccagtcctccctccccctctcccccatccccggcgccccctttcgcccccagggacttacggcggccgcgggccgcgggcgcggcggagcttggccggcggcggcggcggcggcgaaggggaagcccctgtcgccgtgctgaggaagagaagccgtggtgctgtggggaggacacccggctggcatagggcaggcttaggcggagaggggagggcaagctgacagaccccgccccgggggccggacgagggaggagccggggctgcggcgagctgaggggcgggctaggcgacgcgcgggaagcggctcagcggtcgccagcggcaccggaggcagcgcgggtaaccgctgagtccaaggcagccgattggaggtttcttcgctgaggggaggtgcgaaccggaagccgggccacgtgacccggaagcggcgtttgccgggcccgagcgcccgcgcgcccgcgcgctcttgcaggtgcctccgggacgcgcgcgggcggctgtcctgcttgtttaatgataggaggacgggattctgcagcgtccttagcctagcgggtggtgcggggcagggaagttccggacagcgaagagccacgttcgagctctaatgattctctgtgtccccagagaggaagtgtgaagtgtgacggctgacgaggagggtgggaggagacgagggagtgctgcaactctggaaaaacaagtcagctcttctgtggagctcgtcacgcattcacgggccttttgctatcattctgcctcaaaattgtccggaatccgccctctccttcccattgcactgctccagccctagcccagacaccttccgccccgagcttcgcgggagtctgttccctgggctcgcctcgcccatcctcggtgctgcggactggatgagttaccgtccgttcggctgaaaagcccggacagcacctcaccttcgagatcccgcttccttcacactgggtc

SEQ ID NO: 12667 - DNA, 6000 bp, Homo sapiens
gagcgcaggcatgaggggcctgcagggctcccccgcagcgccctgctgcagcctctccacctccacctcacctgaggggaccccagctttgaccagtcaggcttgagatagtaaatgatgccatccagggcgccaggcagcagcactccacgcaccagcagcacgaccaggaccacgtaggggaatgtagcagtgaagtacacgatctggggggccaggctgctcagcggaggctgtggcaccacctccctcacacccccactcccagcgcctccggtcccccttgcgggcaggtatgttcagaggtccccattgtcctccgagccatggctcccgccagaggaagctaggggcaaggctgcgccccggcagccctggccaagtgcagtggggaagctccctgggcgcctcgtttgtctgcagggacgcgtgtcggtggggagcaggcgagcctctgggagctctcctcagtggggacaggaggcgtggagcacgtggggagtgagagctgtatgagtgtgtgggcagtgcaggtgtgggaggcccaggcagggagcgggatattggatccgggtcgggtccccctcctcttctggagagaggtgggggttgagcaggtggagagtggaactgggccaggcagaggcaggcgagatgcagctgccacactgtctgccccctcttcccacatgctgctctggggaccttgtcccccagggagctggccatgtcccacagctctagacactgtcttctttgttcaggtgactccccagcctgaccaggagcccccaagggatgtggccagactctgctctgggtccccaaggcaagataggtaacagatggccagaccaggtccaccagactgtcacaagagtcagagactggcaggagggcaccagtgggggtgatgggcacagggaagggacagtgcctgccagggcctctatccccaggagcaaaggctgctgggccctggatttgcagggtggggagcattgcttggctttcagtacctcccccttccttagggctagactctgtctggtcacctcccgttgccacaggtgtgcctggcacagacatccggctcccagggctgagccaccctccccgctgcatgcctctagtggtacctttcccgtggatttgacccccttccagacacagaagtagaccagcacccagcaggccagcagacaaagggtcacctcccagttgagggcccctggcacctccagtcccccagacagcctcaagactttgttcctaggggagggagggaggtcccatgaggcctgtgccagcagaggatggagccacagggtccacccccaggagttgtggctcccttctctcccacagcccagggttcagcgggtccctcttgtccaattgggctgggcctggagcccacgatcccctggccattgggaggccactcccatcccacctcacatgcagccccagctcccccatcaggggggagtgaccaggacagtgatcggctgccgaacccaggagcgaggctggccccaggactctccgaggacaggcaagggcaggcagggtccaggatggactgccaggcaacaccctggtgccccctcagggccactcccctggagccgggcaacatgagggagacctgggggatgggatgggcttggcccagaggtgccggactcactcccagaactcgatgacaggggaccggcggtcagcaagctggtcacaggtgaggttggccaggctggcattggcacagtcttcatggcggaagatctccacgcagtcgggagtgttccaggtgtggccacatgtggcccagggcagcgtggtggtaaaggacttgaccaggtaatagaagccccaggccagcaccatgatgtagtaggtgttgcagtagaagacgatcaccatggaggcgtagcccaggcctggggccgggaagtccttgccatgtagattcttccctggccacctccccctgccacccctttatgtccccacccaggctggccgtgctcccaccatctgtcctcctggagccttgtttgtggtgctcctgactcccctgggctcccccttgtgtgagccccaacactgcgctgactccccagcctgtctcctctcctccagccgccccctagacccaaggcagagcgagcccctctcctcctgtccccatctgaccaagtgctgtggagtctccagcctcatacacctggccccttctgtgggtcccactgccaccatggcggttccaggaggtccaagcctctgcctggccacccagtagcctccagtcctcagcagctggtgttgatggtggtggtggggggggggggtttctagtcgcctgaggtagtgttggagacagtcgcccctgcagtgggcaacctcagtacgtcgctccacctgtctgtgccccagcgtccttggggatagtaacagtaggacctacctagagagccaagggtgctgctgggcaggtcccgtccccagcccggctatgcctggcctgtccttgccttgtggagctgcctatgccccctctagtccccgcttccccaagttcgctgtgcggcctgaacatctcctccaggctcccccctcgagactgggacgccatcacgtggccccaggcctggtgctcacgacaggaaaagatttctcaagtgggagccagctgggagaagggggcagtccctgaggctggccaagggctgctcacctttgaacaggggacagatgttccagacattgatgctgccggccttcatgaactggcccagcgagatctctaagaagaaaatggggattcctccaaccagggcgatcaggacgtagggaataaggaacacacctgggggtggaggcacagcgtggactcagggtggcccccagccaggctgcccaggcccagcgggccagcccagactccaaaggccccatcacaacttccgactgggtgagtcagtgtaggggtggccactgactcaggccccaggtggagtcttgagggggtgggttgagtgtgttgaagaggggctacagtagcccctgagccattggagccctattccctgggtggcagaggggccctaggcccccagggcttccacccccacggtcacttggggcgatggccatggaggacacacacgctcagacacgcgggctgtccctagtgctgcaattccctgtttcaggcagcacagtgagggcacgtgcatgtgtgcatgtgtgccaaggctgggtgatcaggcctggggggctcatccaaaggcagggagcgcgactgtcctgcccttggacgcttgcctgcaagtgtgaggtctaaggcagagggtgggtgggtcacagtcccctgctggtgggatggcgatgtgcaaggacagagggatacaggtgcggaagaggggccaggccggccttagcaaggccagggagtcaggctctgcaggagataggcagggcgtgacacaggcctatctcctgaggccagcaggctggggtgggggtggcagaagggcagggagagctgggtgccactacccccttctcctctctgggcctcctacccttgccctggctgggctcgctccactactcagaggctgagcttggctgcaacttgcctgactccaggtcccagcatccttctcctgaccttgggcaaaggcctttgctctggacctctgtttcccacccatcaccgggtcacttcggcttccagcaaccccagtgctgttttgtagtcacaggacacacgcgtgcccatcgctgttgctaagctgggcccgggcgggcgggcgggcgggcgggcatgggacgtgcatgcagtgtgtccagtggcggcgccaggcgggccaggccgcaggcttcccaagcctggctcgggcacccagtgttccaggcccgggccagaggggaggggcgggagggccgcgaggggaggggagggcagggggagggacagagtggcccattgtgtgtgtgtgtgttcgtgtgtgtgcacacgtggggggcccacacaatgtgccgcttgtgtgcccgacccgtgggggcagccagggctccttacctcgcggagaccccaaggcgcaggcctgctttcccacctcggcggccaatcgctcctcccagcccgggagtctggggggcagcctcgcgggcatcgccggccccctccccccaccatgccaggcacatgactgcgaggggggtggaggcgcccggcccggccaccgagcggcagcggcggacgaggggcggccccgacccccgcgtgcccgggggccacccgttgcccggacttcacccctccgcggcggctccgggggtcgggcgggggccggcggcctgctgggggaggaggccgcggcgggcgggggaactcacctccgccgttcttgtagcacaggtaggggaagcgccacacgttgcccaagcccacggcgaagcccacgcacgacatgatgaagtccatctggcgcgtccaggtctcgcgcggcggcacggccaggcggccgccgggtgtccccaggcccacggggccgtcgcccttggccggggccccgtcgggcccgggcgcgatgagggggcccttcttctcgtcgccggacacgctatagatgccgttctcggcgctcttcttcgccatggcctcggcgggccgcacggccgggccggggtcgcggcgcctcacggggggcggcggtcaggcggggggcaccggcggcaccggggagggccccgagggcgcgggccggccgggggccggggggcggccgggccgggggacggggcggcgggcgggcggcggggtgcggggcgcgggcggcgcagtcagaagcagtccacgaagcacttgaaagtgagcctgaagaatctcatgtgtgtcgggggcccgggggcgcgcgggcggcggcggggcccggccgggcggcggcggcggcggcggcggctcccgaggctcctgcccgcggctcgggcggcggcggctgcggcggctcctcgcccgacccgaggctcagcctagcggggcgcgggcgacatcggcgcccgcggtctgcaagcggcggccggagcaggggcctgtggcccgcgccccccgccccggccggggcccgcggaggctgcccggctggcccgcgactccggtggcggtggtggcggcggcggcggtggcggcggcggcggcggctcgggcgcgcctcgccctctccttcccggcggcggcggctgcagccgctctcggggccgcggcgggctcagcgactcgccacctcgctccgactatccctctcttccccgtccccggccggccgccgcttaaaaaccgactccggggtgatgtcactatcgccccacccccacggccggccggcccccctccccctccccctcccgcatccctccctcccgccctcctcgtcacactccgcccacctcctccctgccctcctcccggggaggagacgccgctccagcgggaggcaggatggttgctacctggggcggccgccagctcctcccgcagggctccgggccgcccctcgccccagggtcgccggctcctagtgcagcccaggcttcccggccggcccctcccagccctgggaagacgtcccccgggccccctcagccctccgcctccccttctctccctttctccccgctcctggcaggctgcagccgtctcctcccggtgctccctccttccttgagctctctccaccgctgcccactgggggctacagcttcccggctaccctggaagctggaggccgggaccagctcttcaggtgacaggcctctgtgtctccacagtgggcagaggggagcctgcctggctgatgagcaagcctcgactttgtcatcaaggcagagaaggggcccgggtaaatgaccccggcggcccccacccctgcctggcgtgagagtgggtaggggcttcggacttgaggggactggagcgggaacaaggca

SEQ ID NO: 12668 - DNA, 6000 bp, Homo sapiens
ctctattaaaaatataaaaattagccaggtgcagtggcaggtgcctgtaatcccagctactcaggaggctgaggcaggagaatcacttgaacttgggagtcggaggttgcaatgagccgagattgagccactgaactccagcctgggcaacagagcaagactctgtctaaaaaaataaataaataaagttaaataaaatatactagtgtctattacaatagtagcaactacaatttatgaagtattagctgctaggcacagagacaggtgcttgatgtacattatggatgtacattatgtctatacaagcctcacagttgccttctagttttttttaagtgataaagactacattgggtagattgcttgattttgtgtaacatatttaaaaaaaagaaatgcatttttttcattttatttttattaagcactacataacacattgcatgctacataatacactgtaaccttctagcaggggtagatggccataactgagttatttttttcatcaatcaggaaaatgcttccttaatcaatgttctccaaaccctgaaaaacagtttaaaaaggagaatgtgacaagtctgttcccatcaaagatatgccatgtacttttatttccagtgtcattaaatggcattgttattaaaaagagtgcttccacatcccacatttctctaactgcaacaatacattggattaaattttataatcactaaagaataacctgtaatgatttctagttttcattttctgacagcagcatattgctttatatgaaacaaaccttccccgacccccaatcagaactaaagtcaagcaactctttaccacctggatcctttttttttttttttgagatggagtctcactcccgtcatgcaggctggagtgcagtgatgcgatcttgcctcactgcaacctgcatctcccaggttcaagcaattctccttcctcagcctcccaagtagctaggattaaaggcatgtgccaccatgcccagctgatttttgtatttttagtagagaaggggtttcgccatgttggccaagctggtctagaactcccgacctcaggggatccacctgcctcggcctcccaaagtgctaggattacaggtgtgagccactatgcctggcctccacctggatccttttacaaagcacctcagtgagtcagaggacaagaaggtaaaatctgttttaaaaaataacagccaacatgaggtagatactattattctcattccattttttttacaaatgaggaaatggaggctcagagaggttaaaagtcacctgcttaagtccataaggaattagcagagccagaattcagggaccccaactcccgaacccttctctgacaagcactacactatctattcaaaatacctactggatcttactaagttgacaaccaaatacttcagaagctataaattaaaagattacacctggcgtggtggctcacgcctgtaatcccagcactttgggaggccgaggtgggtggatcatgaggtcaggagttcaagatcagcctggccaagatggtgaaaccctgtctctactaaaagtacaaaaattacagcgcacctgtaatcccagctactcgtgaggctgaggcaggagaattgcttgaacctggtgggtggagcttgcagtgagccaagatcattccactgcactccggcctaggcgacagagcaagactccgtctcaaaaaaaaaaaaaaaaaaaaaaaaagactcatcagtgatgacacttcttctaggtattaaataacatagtccaggtatttggtttactattacaggaagaactgccttaagagaagttaaaactgtatcttccttggagccatctcttagaaatcctaattctgtctcacatgctaggtgattctgatggttattcttggaccatactttgagaaatatggctccagataagtagatatctattatcatgttcattggattagattctcaactacctctctactgagaggtgtatcacccaggttgagtccttataatattacttaatcactctgacccttgtctataaaatggaaatactatttacttaggtttgttgtgaggaataaatgaggaaggagaaaatattaaaaagtaaacatttttaaaagaagtatgagaatgaactactcctacaaaatataaaaacatactattagggccaggagtaggggctcacgcctgtaatcctaacactttgggaggttgaggtgggcggatcacttgaggtcaggagttaggaaaccagcctggccaacatggtgaaactccatctctaccaaaaagtacaaaaaaaaatttagctgggcatggtggcaggtgcctgtaatcccagctactcaggaggctgaggcacaagaatcgcttgaacccgggaggcgggggttgcagtgagccaagattgcaccactgcactccagactgagtgacagcgtgagaccttgtctcaaaaaacaaaaaaaaagacagaaaaacaaaaaatatactattaagttgagccttatgaaatgctactgcttggtcgtttttgacctacaaaaatggcaatgtcataattgaatcaaaatataaaattatagtaattctttaaatgaagtattgttgcaggaataggcagacctagagtatagaaaagcacatccgtgaaacaggcccatgtgtacatggaaatttagtttaccagagtggtattacaaataaaaataaattgggtgcttggtggttttttttttttttttttttgagacaggctctcattctctcgcccgggctggagtgcagtggtacgatcctagttcactggagcctcaaacccctgggctcaagctgtcctcctgcctcagccttctgagtagctaggactactaaactcttctataaatgggtaattgcgataactagctacctgttggaaaaaagtaaagttaatcctcctttcacattatactccaaaatgacctgtagatgtaaccaaataactaattttttaaagaaactaacaatattaggagaaattattttttaaaagtatttttatgagccaggtatagtggcacacctgcagtcccagctcctccgaaggctgaggcaagaagatcacttgagcctatgagtttgagggccagcctgggcaacacagcaagactgtctctattttattttttgaaagtatttttataatcttagatagaaaaggcctttgtacgggagacataaaaacctagaatccagaacaacaaaacatgatacattgaatatcaaaatttagaactacctgatgaaaaacatcataaagtaaaaaagacaaacagcagactgggaaaaatgtcatatataaaatagacaaaaaaattaaagtctagaatatataaagaaccatagctcaaaaagaaaaagacaatggaacaggcaaaggatataggcaacaatccacagaataagaaatatatgacagaagaaaaactaaaaaaaaaaaagaaatataaaagattaaatatgtaaaaagatgccaacctcactagtagataagaaaatgctagttatatattagcactgtatgacccttggcaaggcattaccagaacccacctcaaccctggcaaaaggctggcatcagagtggcatcttacctttgacacatagtaacgatcaactccagagatgcgcctatctctttccatcagactccagtgatacccaaaatgagcaacccttttttccttcaaataagagacaattattgttgcagtttataaaagtgagtgacccaattgatagatactacaatttttaaaagggacattccagagaaatggaatcatcgtttaaataaaaatgcaaattagtagtacaaagaacagaatctcctaaataaaatcagaccactaaactttaggattaagttggtacctgtgactttttacactattttaaccaacatgaattttttttcctttttttttaaaaaaaaaaaaaaagaaatatctagttgttgtcttttgggacactaagaaacaacagctgtagatcacacgtgaagaacaataacaaaatcaaaaagtaaataaatttatatcctgtactcttgagatgatgtgaaggactaggaagaggggaaaatgaatcctgatgtaaaaaaacaagatctcgcagtaaattcctaaaggcttgcaagagaaagtggggaataaaaaagtcaagggtggccggtcgcggcggctcacgcctgtaatcccagcactttgggagatcaaggcgggtggatcaaccgaggtcagaagttcgagaccagcctcgccaacatgatgaaaccccgcctctacaaaaaaaaaaaaaaagccaggcgtggtcccggctactcgggaggctgaagcaggaaaatttctttctttatttatttttttttgagacggagtttcgctcttgttgcccaggctggagtgcagtggcgcgatctcggctcatcgcaacctccgcctcctgggttcaagtgattctcctgcctcagcctcccgagtagctgggattacaggcatgcgccaccacgcccagctaattttgtatttttaggagagacggggtttctccatgttggtcaggctggtatcgaactcccgacctcaggtgatccgctcgcctcggtctcccaaagtgctgggattacaggcgtgatccaccgcgcccaaccaggagaatctcttgaacccagaaggcggaggttgcagtgagcgattctcaggcttgagccaccttttctaatctaccttcccggcccccgcgtcgctactctgccctaaggcccactctgatacacccagaaacgctgtttttcactagagcaggatgtagtttctatcgggcttcgtttcgcaagcctcggcttctaggcaaccggaagcaagtagagggccgacctcggagagagggttcgcaggctgacggtctccctgcccaccacccttttcggaaatcagcccgtggagtcggcccccgggccgaagccggcttaccttgcccccgttagtgaacctgtggatgtacgcagtagccagtcctggaatcaacaagcacacgcccatgacggagagtccggggagaatctcgaaccacatctctgccccgttacctaggccaaaaccctacttctgggtccttgaaaggtgacctggcttcgcctctcttcccagcaagccccgcggccgcccgcgagcggggcggtgccacgtacggctccggaagaagcgacggaatctgctagggcacaagagagacgggcgctcgggctctcgcagtcctcttccgtcagtgtcttttgcttcgactcccggcggagcgcgcaacgtggagtgacgtgcaggggccaagtgcaacccaggcagccacggctgtttcggagctcaggactctaaaatggcagagcagctttctccaggaaaggcggtggatcaggtgtgcaccttccttttcaaaaagcctgggcggaaaggggctgctggacgcagaaagcgcccggcctgcgacccagagcccggagaaagcggcagcagtagcgacgaaggctgcactgtggttcgaccggaaaagaagcgggtgacccacaatccaatgatacagaagacccgtgacagtggtaaacagaaggcggcttacggcgacttgagcagcgaagaggaagaggaaaatgagcccgagagtctcggcgtggtttataaatccacccgttcggcgaaacccgtgggaccagaggatatgggagcgacagctgtctatgagctggacacagagaaagagcgcgatgcacaagccatctttgagcgcagccagaagatccaggaggagctgaggggcaaggaggatgacaagatctatcggggaatcaacaattatcagaaatacatgaagcccaaggatacgtctatgggcaatgcctcttccgggatggtgaggaagggccccat

SEQ ID NO: 12669 - DNA, 6000 bp, Homo sapiens
gtcatgtctagtcagtgagaatcctggcaggacagaggaaattcgaatgcatggtaaggtctgaccacatgcttcacttctccacatttttggagcacacatcctcccttcacatgtgctattttagaatagtgtgtgtctacttaggcactaacattacggatattacgaaacatgatctgtaatcattagtgaaggctataaagctgatgctggaatttctactttcttgttattaactggaagctacattttattattttcataggcatgtctttaatccctctgtccattttttgacagttgatttaaaaattaaataatataagccataaatacactttaccttaatatgtacattgcattatgctgaaatcaaataaaatggttgagagcaatgatgtctcccctcctccctgcaaggatacctggagaaaagaccaggacacaagaacattcgccagtgttcacacaaatattaaatgttagggctgggtgccatggctcctgcctgtacttccagcactttggaaggccaaggcgggcggattacttgaggtcaggagtttgagactagcctggccaacatggtgaaaccccgtctccactaaaaaatacacaagttagctaggcatggtggtgggcacctgtagtcccagctacctgggaggctgaggtgacaggatcgcttgaacccggaaggaggggagttgcagtgagccgacttcacgccactgcactccaccctgggcaacacagtgagatcctgtctcaaaaaataaaataaaataaaataaaaataaatcttggtaaacttaacacatttgctacttctttacattaaaataataatcctggccgggcgtggtggctcacgcctgtaatcccagcactttgggaggctgaggggggcggatcgcaaggtcaggaaatcgagaccatcctggctaacatggtgaaaccccgtctctactaaaaatacaaaaaactagccaggcatagtggcgggtgcctgtagtcccagctacttgggaggctgaggcaggagaacggcgtgaacccgagaggcggagcttgcagtgagccaagatcgtgccactgtactccagcctgggcgaaagagtgagactccatctcaaaaaataaacgaataaataaaataacgataataataataatcctaagccccctccccacaatgaagtagctggtataccccaggagggggtcaatggtctagaccattggatgccctggttgaaaggcagatgctgagttggtcagtctgggggtggcagctgggattctgcatttctagtgagctcccaggggatgctggcactgccagttccgaccacatctgttatccaacactgcagagaagcaaactggacctctcgctcagagccagtttgcactctgatggtgaaggggttcaaaaacaatgaccctccccacacaaaaataccagatatgtccgagagtacaaagccaggagtggcgaattcagccatctatgtcaggctcccttccagagctcactgggcttggaggaaagcagcagcgggaaggggtgagaatattcagtgcctctgaagcaagagacttcctaagtcagcgttgcaaagccagctatctaggggaagaaggcaggtaagtctgcaatgaggagctcaaattcaggccccatcagatgaagtcagagctttctggtctctcagcatcatcaagaaaagtagactgtgtacagccactgagaaagatggtccctagtccaacctgttaccctccatctacgctgggcaagatttgtacccctagaaaagtaaagagaataacagggcaaagtgggctcacagaaaacagatacagcagactggaaaccaaatacaacagataacaaaagcacagagacacaggaaccaggacaacaaactaaggaagttgaaataagctaagactccctacaggatggcatatatatacacacaataaatggcatgtttaagtttacatgttgtgtgaaagaagagcatctgtttatttgtcccattgataatgtgcttttgatgccatcgtactgtagtttactggatcatttctattgtgtcttaaaattgtcaggaaaagtaagttattgtcccatggggagaacacaactgtacaaaagtaaactgtaattcatggaaggaaatgcatccccatcagcatagaaactgcccatctttggctgttggagaattatgaaaagctaaaaactaacttgttatatgtgtacaaaccacattgctagaacaaaatttcattcttttccaatctagcttgtgacagagaagcattcaccattcagtttgtttttttttttttaagcaaagaggagtcttccatcttatgcatagaagtgatgttactgaaaagtgtagaaaataagactgataaaaacataatgtgaagcatgttttcacatctgtggagagctgaagtacctacgatttcccaatctgtctcttccacaatcgctgtgaggctttgccatttcgtcaaaatggcattggggccttttttcctttgaaaaatactcttttttggccgggggcggtggctcacgtctgtaattccagcactttgggaagccgaggtgggcagatcactaggtcaggagttcaagaccagcctggccaacatggtaaaaccccatctctactaaaaaatacaaaaattagctgggtgtggtggctggcgcctgtaatcccagctacttgggaggctgaggcaggagaatcacttgaacccaggaggctgaggctgcagtgagcagagattgcgccaccgtgctccagcctgggtgacagagtgagactctgtctcataaaagaagaaagaaaaaagaaaaatactcttttttaatttaatgactaaacagaaatgtgaggtggttacaataccaaaaaaataacagtaactctgacatgtgtgcatccatttgtttccagagaatggaaggaaactgggagggagaattctacagactccaggtgggaaatactgtcatacttactgtaggtaccacagctatgtgtgtgcaatgcatctattatggaattgtgttcccaaaaatatatgttggagtcctcatccccgctacctcagaatgtgaccttatttggaaacaggattttgtcagaggtaatcaaattaaaatgtagttattagggtggtccttagtccaataagaatcgtgttcttataaaaggagaaaatttggacacagagacacacacagagggaagacgataggacaagatacagggaaaggaaagcaggttcaagctgaggagaaagacctggaataggtcctttcctcacagccctcagaaggaattaagactgctgacatcttgatctaggacttctggcctccagatctgtgacacaatacacatctgctgtttaggttacttagtctgtggtatattactatggcagctgtagtaaactaatacagaaaccacgaacgactgtatttgaggcgcaagtccctacctaatttgctcataaattgccttctctgaaatcccgtgtcctcaaagggaaatcacgattgcattaaatgggggaagctctcttatagtaccacctctaagaacacataattttattgactatatattatgcactggtactaagggcttggcctgcctcacctcctttatcacctccattttacccaggaggaaacagacacaggtgcactttgtctatcatagataataattcttgctgaatccaggcatgcccctgtccactatgtctgcactaaactagaaatacactctcatgtttacacctttttttttttgtctttttccccttttgtggagaacagggtctcgctatattgcccaggcagttcttaaacttctgggctcaaactattcccccaactcccacttctgcctccctaagtactgggattacaggtgtgggccactgcgcccagcacaccctcacgtttttaaagtcttgaaattctcctatttccgcttctcaaaaggtccaatccttttccttaaacgtgaatataccacataaacgaacacgaaatagaaacagggacaaaaaagtatttttttgacgatggcaaacgggaaaaaaaaaaaagaaagctgtttaggtggcatttgaaaagttaaaaaagaaagaaaactcagagcagcccaaaagacagatgatacctaagaaggcacaaccagcaagacatgttgactgttagtattatttcagcatcctccttgagcagcttggctttgctctgggacaatgcaccagcctgggatgctcagagatgcaggcacggaggttgtgcagcctctccgcacactgcgcatgcgcggctgccggttcaagtcgcggtccaggaccgcaaggaggcgggcaagcgaaactgagaaaaacccacccacggtccagggactgggggctcgggcgaacccacccagggacctcctgaccaaggccatttgtctgcaacctgatggctagaagtgataccaccctgagcatcttcaatcccctttccccactctacagccccttgtactgtccctccttcctcattcacacccctgatccaaactcaagcactgaatttgtccccagacgagggcctcggctctgcgcggccgctggctgagtagcttggcccgattccgggtgtgaagtgaggaggaattgatgcgggtaaacatacagcgccggcccgcgccgcatcccgggtctgcagctacagctgcggcgaaagcccaaggtgcgcgtgcgcggagcgccactaggcagcccaggacgcgcgggctcggagccgggcgaggggccgcggaaggcgcgtgcgcagagcgaccccgggcgcgcgagaaggtcctcagtgcgcgtgcgcggggcgggcgggtgcgcgcgcacttcctcctcgcccccacccagacccagaaggcgccaccatggcggcgcccccgcagcccgtcacccacctcatctttgacatggacggacttcttctgggtgggtagtgtgcagccgccgcctccagtaagggcggtcttgtgtgggcgtggggacggtcggcgcggggtacgtcacggcctgggggccgcggcggggcggtgttcatgcagggacgctcgggctcccgcgcgctctgcccccggctggccccgaagtcgggcggcggccaggagcgcccgcgggcccatgtccgggctggcgggcgcgcgtggccgcggcgtctacgcggccccagcacccgcttccggtcggcggcccgcgcgtggggccggagcacgtgggagcagtccctggggtccaccgggcgggcgcgcggctccgcgtcctctcctcagagcgaggcgcggcgggacctccgcgctctcttttcggttacgcatgcgtgcgaccttgagcggtgcccagcctcagcttccccgtctgcaaagtagcctggaggatacttgcctgcctgctccaaggttgctgctgtgggcgcactttgatggtagcatcctgcatggtagcggttctctacctggcggttttgcagccctgagggcatctggcaatggcgatgtcaggagacattttggctgtcacagctggcgaggagtgatggggtcactggcatctagtggagtccagaccagtgatactgttaaacttcccgcagtgcacaggagtgccctatgcaaccataaggaattatcccgcgccgtcaacagtgtagaggcacagaaggtccgtcaagtggcctggctgcctagggtgaccagcaccggggacatcacctgtgggctacttgtaaatgtagaagctggggccccaccctacccctgcccaatcagaatctgcattttaagcgcgtgaacgtttgagaacagctgctctatcaatccgaggcattaagaaacccttggcagtgtactaaggtagtcagtcttagcacatgtgaacttc

SEQ ID NO: 12670 - DNA, 6000 bp, Homo sapiens
cccaggtagagcttttcgcagaagtcacagcttgggggcgggggtatgtccacccagaaaaatctcctagctcccccatcccaaaatgaaaactcatttctggttattttgtggttaccctttaaaaacactagacctggccgggtgcggtggctcacgcctgtaatcccagcactttgggaggccgaggcgggcagatcacctgaggtcaggagtttgagaccagcctggccaacatggtaaaaccccgtctctactgaaaatacaaaaattggccgagcgtggtggctcacgcctgtaatcctagcactttgagaggccgaggtgggcggatcacttgagatcaggagttcgaaaccagcctggctaacatggtgaaacctcgtctctactaaaaatacaaaaagttagctgggtgtggtggtggacgcctgtaatcccaactactcaggaggctgaagcaggagatcacttgaacccgggaggtggaggttgcagtgagccgagatcacgccactgcactccagcctgggtgacagagcaagactccgtctcaaaacaacaaataaaaacacttgaccacactgagcagaggaaagcagaaaagcagctctgtgacagaaggggaggctgatccagggcaccttctttgaaggagctaggtctcctggcccccttcttccatcccagatccaccctgaggccacatggagggaggggaatcaccttcacaaatgccgtgctgagtgtccagaaagaagggactcctgtgaggccacatttcccagcctcggtgacgggggcttgtggaccaggagtcagggatattggagtgtgtggggggggatggggtcaagggtgcaacgtccagaaccacccccatccccagcaatcctggtgttcattcacttctttcccaagcttgttcctctgacagctaggacccatcaccaggccccagacaaccttattcatgtccctaattcacatcttcattctcccttcctgctcatccatcccatagacatttactagagcccacttgctgtgggcctccaagtcctagggcttccaagtccctgaagcaggctctgcccctcatcctaaggaggggccccataggcagttcaaggagtccacacataggcatttcaaaacgggctttaaatactcatcagggtgccacacaaaggagctggggtgagaacttcgtacatgtgagtgtggggctggggtgccctgagagagaaaaaggggacccatctgtcagggcagctggggtgccccacccccaccctgggactagggagcagagtagaaaccctctctggagggtcccagggctaactgggagccagccctcccttcgaggtagaccatcggggagggaaccgagaagtagctcccatggtggcagtggcttcctcagtggtactgctgatagctggggtagcctggggccggggtgccatccttagggggcagctggctggggtcctccaggaatgggggcgctggagaagggagacttgggtaaggatgagtggaagaggccaggtggagtatttcccactcccccgaccaccagttactcaccatttcggaactgctgggctgtgtagcgagtgaggaggatgccaacgccctcaatgagggccaacaggatgccccccatcattgctgagcccaccatggccagtgggccacctgggggagttggaggcagagaaacagaggtgagagcaggcagaacagggtggaaggggctggggccagggccaggggtcactcactgcgggcagccagcacagccccggtcaatgctccactggtgatagagttccagggatcctccttgccccgaagccgcaccaggccacagtcaatggtggagaacaggcccccccacactgcgaagctacctgtagtggaaccgaggcctaattagttcctgggaaatcctgagaattcacatctcaggggacttccaaggcctgaatgctttggccaagaacagggagaaaaacccagacacaaaggcagatagcaaacccacacagagtatttcctatctgtccccatcctgtggtagctcccacttcaagccgtctataatcaccatcaacattcccttcatctttatggggagttgacaaatgtttacaagcagatttatcttcatatggcttttaacagagcaactttgagcttcataatcaccacacagagttggaattctgatttgggtttcagtgagaaggaaataggttaggaaacccagttaatatgatagttaaaatgtttactgagggcttactgtgtgccaggacctgttcgaggtgctctgttatttgacttctgcaattttaaattagttaatgttattaaagtgtttagcatagcaaccagcacttagtagtatgtaaattacataaactataaaactaccgatgaaatggttactgttatcaccacccccacggtacaagtgaggttcagagaggttaagccactagcccaaggtcacatggcagggaacagtcaggacctagatttaaactccagaacccactttcttcccctccatattcaattgttgggaaacatcacccccctagaaagtctctggcaggggctagaatctgaacccctaacttgcagcctagacccaaaggatcaaccactcccacctttgccaagacatctcctatatctatctccccaagtccctcacctccaatctggggggctcggatcctcacagcattggcactacctctcaaccggtgccgaattccctggggaaaggaaggaagggcgttagggcagggctgaagccactggcagacacgtttccaacttttaagagagggaagaagatgggagacctgttagaggtatgagctgtagagatgtggagaagtggccaagaactagtggcctggagagcgccccaacatgggtgttctcagagctaggttgagaagtgctaattcattcatacatttgttcattcattcattcagtgaatgattaacaagtacctactatatgtgccaagcaccatgccatatgcagggatacagccatgaacaaggtaggtctgctctctgccctctcagagctcacattaacggtgggagacacagatcttgagcaagagtagataaacaagggagcttcagacagcaatctgcactgtagaggaaatgccatgaagaaatatgactggggctgaggggtcaggaaaggcctcttgaaggagggggaatctgtgctgagaccttgaggatgacaaacttgggcaaagatccagggaggagagttccaggagtctaggggagggacggggctacatatataaattgcagagaccttggctaatagatggcatttaaagtcatggcatttgcgatcttctgggaggggaggtggtcagagaaaaagaattatgttaaaagaattctctcaacttcaaggctgtcttccgtctgccaattaaattcctgtcattttcctctatccgggtttctgagccagaatctgcctctaggtaaaatgcgcagtggctaacacctgtaatcccagcactttgggaggctgaggtgggtggatcacttgagttcaggaattagagaccagcctaagcaacacgttgaaaccccgtctctacaaataaataaatacatacataaataattagccgggcatggtggcgcagtcctgtggtcccagctacttgggaggctgaggtgggaggatcacttgagcctgggaggcggaggctgtagtgacccatgatcaggccactgcacgccagcctgggcaacagggcaagatgctgtctcaaaaaaaaaaaaaaaaaaaaaaacatggccaggcacagtggcacacgcctgtaatcccagcactttgggaggccgaggtaggtggatcacctgaggtccagagttcaaggccagcctggccaacatagtgaaaccccatttctactaaaattacaaaaattcgtcaggtctggtggcacatgcctgtagtcccagctacttgggaggctgagacaggagaattgcctgaacccaggaggcagaggttgcagtgagccaagagcgtgccactgcactctagcctgggcaacagagcaagactgtctcaaaaaaaaaaaaaactgtctggctttgcacatacatttaaaatttggtgatgactctttgaacgacacagcatttccacagaggagctccagttgggtggggtggagggtggaagacagaggccatgtttgcaatccctacaaaatcccagatacaggagccaggctcggcacatagtaggtgagtgggcaccagaatgaataagtgcacgtgactggcagctccaagcagttttcagagcagcctcccttgtgggcaagatagctaaccccacaccaacccagggaaggcctggactcacaacaggggcattgcggaaacccttgatggcctggaagactccgccaccgatgacacccatagtgaaggctccaccgcaatcatccacaattcgccatgggctgcaagcaggaagggaaggacggggttaatgtgagccctcccccaggtcctgtcacacgaactcttttctaactgggagaaaccaagtcaccagaatgggaagttcctaagtaggaacaaacacttcagataataatgagctagttctgtcacgctttttccacacacccccccattaaagcgagaaatggggcaaagggggagaaatattagtcttcgccctgtctaccaaccaaggaatcagccaacggttttactgtgatcaaagattaaatgaattggcacacgcagagttgacgtttcaataagcgacataggcgtgttaactagccaagacagactgtcagcaaagcaggaccgcgtcgcaccccttctccgacggtgagcccgtccaaccatgccccgccccttttcaatccggcacaactgggaaaaaccaagagcgaccgcgggaagcatccaccgtccccgccggccctcaacaggttcatccgtgccccgccccccactgacaaaggcgacctgggaaaaaccactggcggcaactctggggatttccggtcaacaccgtaccacccctagccgggatggatcgtccagcgtgtcttttttcgttaacagggctaggagattacgaagtcaggagaaacatggcgtggttcggccttcgccgcaccttctctggttgtggcccctcataacggagcccgaatgacaggaaccgagtgggggtagcgggagatacgttaagagtcccccgagtctggtacatggctctgtgcggccgatgcctcccccgcccgacccccacggctggccttggcgtcgcagcaatattccggatgcctgtgcccattgccgtaccagggctcccgagcgtactcctccatggcgctggcgtctggccgcgcagtcaggccacgcccccagcgtagacgcacaccggcgtcggagctttccgcctattaccgggcagcgattgggtcgctataccgcatgtcacgccaaggacgcactctcattggccaatcgagtttctgccatttgttcattgcctcctgagcgtagtccagttactttcaggctcggggagtgaaggcctcgttgagagaaggtctcattcggtgttttgggaagagagtcgtgtgggcccaggtatcgtagcggcgacacgagagagacgggcggtgtgacagccttccactacctgcacgagtgtattggtaacgttggggtgggtgcactcttttggagctggaggaagtgctgccctctgctcccccatcccagcgctttggtttctcccacccggcagtcatggggacgctggatgagcccatttctgaagtgcggaggggccgggcttcttaggctgtgggcggagcctgggcctgggagaggaacagggccctggagcacctggtttcggggacagtagggttgg

SEQ ID NO: 12671 - DNA, 6000 bp, Homo sapiens
aagtgctgggattgcaggaatgagccctggtgccccagcctcatgcatctcttgacctcgtgatctgcccgcctcggcctctcaaagtgctgggattacaggcgtgagccagagcgcccagcccctgctttcagttcttttgggtatatacccagaagtggaattgctggatcatatggtagttctagttttaattttctgaggaagtgtcatattggtctccatggtgactgcaccattttacgttctcgccaacagtgcacaagcggtcaagcttattcttttattgtttatttatttgggacaaagtcttgctctgtcgcccagactggagtgcaatggtgccatcacagctcactgcagcctcctgaattctatgtttcccaggctggtctcaaactgctggactcaagtgatcttcctacctcagcctcccaaagtgctgggatttttttttttttttttttttttttttttttttgagacagagtctcactctgtcgcccagactggagagcagtggcgtgatctcggcttactgcaacctcagcctcctgggttcaagcaactccctgcctcagcctcccgagtagctgggattacaggcacccaccaccacgcccagctaatttttatattttttagtagagacagggtttcaccatcttggccaggatggtctcgaactcctgacttcaggtgatcagccggccttggcctcccaaagtgctgggattacaggtgtgagccactgcgcccagccagtgctgggatattataggcctgacccactgcgcctggcctagtctacctttttttttttttttttttttttttttgagatggagtcttgctctgtcaccaggctggagtgcagtggcgtgatcttggctcactgcaacctctgccttccgggttcaagtgattctcctgcctcagcctcctgagtagttggggctacaggcgtgagccaccgcgcccagcccccccccttttttttttttttttttttgatagtctcattctgttgctcaggctggagggcagtaatgtgatctcagctcactgcaacctccaccttccaggctcaagtgatgctctcacctcagccttccgagtagatgggactacaggtgcatgctgccacaccaagctaattttttttttctttttttgagatggagtctcactctgtctcccaggctggagtgcagtggcttgatctcagttcactgcaacctctgtctcccaggctcaagagattatcctgcctcagcctcccaagtagctaggattacaggcacgtgccaccacacccggctaatttttgtacttttagtagagacagggtttcaccatgttggccaggctggtctcaaactcctgacctcaagtaatcctcccacctcagcctcccaaagtgctggaattacaggtgtgagccaccgcgcccggctaccaagctaatttttaaaatttgtttggagagatggggtttcaccatgttgttccaagaccccagtgcttttcgcctccattagcaactacaggaacatcttcgttcatctctgtctccccacttgtgagatgttctctttaagataaactcccggcagtgaagggtgtgtgcattttaaaaggtctcagatatggccaaatcatccccattgcaacctgtgatggggactctttcccatgcccctgccaccactggggagcccttcttgttcatctcaccagctggaggccccctctctcagtttatctttgtctcacactcacctgaccttgcagggctcggctccttgctccacgccctgtccatgtggcttttgcatcctgaggcatgagttcctctgctctgtctgcctgcttttctctatcaacctgtcaccttcccttcgggctcacttcctacctctctgaggctctgtccgtctctgtctcactttccctctcgtctctggtttcccttctctgtctctctgttgcggtgtctctctcctggctgggtttgatgtctgtttctccctgaccacctgctctgtcactcatgctagtttgggttccctaccctggtgcctattctgggatatacatgggtatgtgggcagccctgggctggcacatgcagccttggaggctctggcgtcagggacccccatgagggctaccagtaagaaccagagagagtgacggttcctggcttcagccccaaaccctggctgtcaatatcagccttggtgggagccctaggcttccctctccctctcaaaccctccccaggcagaaggcaacttcctcccttcttccgtctccccagggggctcccatacctgctcagaccagcttgtcaccaagtctgcctcatccttaagtggatcgcgataccccagaagagcagctcctgcctgaatagggctaggaggggaaaaaaaagaggaagaggctgtgttcctgagccacccggccaggaagggcctggctgggccggacgccccacccttgccaacaggcaggcccgccccgtctccgcctcgccgccaacaaggaggaccagcaccaggcctgggaactgctgacctgcccgcccaccttcccacccagaccccgccttcccgggccagcgggacatgacagacctgtgagtcactcaagcctggggcaaggaggggctggtgcctgagtgagaccccgagcttcgctcgccaggcccgtcgctcagctcccggtctgggtccccagtcagcagttgctggggaaggcgcaggagctggaagtcatgcctgatgccacgagaccgggcaccccaagggcgtgagtcttctgtccctgttgttgggttctgagtcccagtgtggctgcacacttctgagttaggggtgtttgatgcaagcgctctggagacccaaagagagggacagtccacacatgatctggccacagtcgtgaagtcaagggaggactgaggatctgccccagagaggaggagacccagggagctggcagtccaacgtcctgggggtcctgcagtaatgctgttgggacaaatgaggtgctcggacagggtctgtgagcaggaggtggggctgaatccactcagcttctcatgggatggctgtagctaatggattcgacgtggtaatagaaggctggacaaattttaaaaaatcaataaattatgggctgggcgtggtggctcatgcctgtaatcccagcactttgggaggctgaggcgggtggatacgaggtcaggcgttcaagaccagcctggccaacataatgaaacccgtttctactaaaaatacaaaaaattagcccggcgtggtggtgggcgcctgtaatcccagctactcaggaggctgaggcaggagaattgcttgagcctggaaggcggagcttgcagtgagccgagatcacaccactgcactcgcactccagcccgggcgacagtgcgagactccatctcaaaaaaaaaaatcaataaattatggtttaaaaataaaaaacaggccaggtaggatgactcacactttgggaggagaggcaggcagatcacctgaggccgggagttcgagaccagcttgaccaacatgaagaaacccagcctctactaaaaatacaaaaattagccaggtgtggtggcttgcgcctgtaatcccagctactcaggaggctgagacagaagaatcgcttgaacctgggaggcagaggttgcaatgagctgagatctcgtcactgcactccagcctgggcaacagagcaagactctgtctcaaaaataaaaataaataaaaataaaaataaaaaactgccgggtgcggcggcccatgcctgtaatcctagcactttgggaggctgaggtgggtggactgcctgagctcaggagttcgagaccaacctgggcaacatggtgaaaccccatctctactaaaatacaaaaaaaaaaaaaaattagccgggcgtggcgacctgcgcctgtagtcccagctactcaggaggctgaggcaggagaatagcttgaacccgggaggcggaggttgcagtgagccgagattgtgccactgcactccagtctggcgacagagcgagactcctaaaaaaataataataaataaataaatataaaataaaaataaaaaactggctgcttaatgcatagggggctttctttccgggtcatgaatatgtttcagaactagaggtagtagctgacattgtgactgtatcagatggtataaaatactgtttcttgtattacatatgatacacaatatgtttgtatatattgctgtatatattgtatattttgccatacagtagattatacattgctacatacacatagtatcatgtagtactgtaactatgtcaaattgtatatgtggctgggcggggtggctcacggctgtcatcccaacactttgggaggccgaggcgggtggatcagagtgtgatggcgggcgcctgtggtcccagctactcgggaggctgaggcaggagaatcgcttgagtctgggagatcgaggctgcagtgagccatgatcccatcactgcactccagcctgggtctggctggaccctgtgtcaaacaaaaaacagaaacactagagagacaaaaggcgagcgcaggaggctgccaggaagcgggagccccacggggtgacggccacttcccgccgccccggggctggcctcgctgccgtcaagcggcccgtgcgcgctttgcgacagtcggtcgggctgggcaccggcgcaggttcgctttccggcggttgcaccgggccggggtgccagcgcccgccttcccgtttcctcccgttccgcagcgcgcccacggcctgtgaccccggcgaccgctccccagtgacgagagagcggggccgggcgctgctccggcctgacctgcgaagggacctcggtccagtcccctgttgcgccgcgccccctgtccgtccgtgcgcgggccagtcaggggccagtgtctcgagcggtcgaggtcgcagacctagaggcgccccacaggccggcccggggcgctgggagcgccggccgcgggccgggtggggatgcctctgcacgtgaagtggccgttccccgcggtgccgccgctcacctggaccctggccagcagcgtcgtcatgggcttggtgggcacctacagctgcttctggaccagtgagtgggcccaggccgaggcaggcccgcccgggtacccatgcccggccggaggtgggacttagggtgggggacgccgcggccccgacctagcgggcgagcccggagcgcctgacctctccttccccgccagagtacatgaaccacctgaccgtgcacaacagggaggtgctgtacgagctcatcgagaagcgaggcccggccacgcccctcatcaccgtgtccaatcaccagtcctgcatggacgaccctcatctctggggtacccgggccagtgtgctgggcagggggaggaaaggcgaggattcgggacgggcccagcctcgtcagaacaaaccccttctcgctgccttttcatggagccctggcactccggtttccgggcgttctgccccagggctgagacttggatttgtggctcctgcagcatccctgagggagcatgatttggagagggccttgggcatggagcaggaccaaggaacggccacagggcatatcttacagctcctttaacgtcaggcctccagaaccctctgttctctaaaccatccagggccccacagtcttgggaaaaatttgggggttggacataggatatcctgtgaggaagttctgggccagggactggaagcccagtgtcctggcttcaggtttgcccctggctgggcgtgtaccgttcagccctatttgggagcctggttgccacacctagaggttcctgctctgctgacttcacaggaagttgcttggctctggtaaccagatggccgggtggaggggtgcctggggcttccactcctgaacagagagcttaactgt

SEQ ID NO: 12672 - DNA, 6000 bp, Homo sapiens
gggttcacgccactctcctgcctcagcctcctgaatagctgggactacaggtgcctgccaccatgcgctgctaattttttatatttttagtagagatggggtttcaccatgttagccaggatggtctcaatctcctgacctcttgatccgcccgcctcggcctcccaaagtgctgggattacaggcgtgagccactgcacccagccccctgatcattcttctaagttccagaactgcacaccccactgcctctgggactgctctccttccacaggtgaggggctcctcagatgcagcacaagcaaaacaggactgaccctctcccctcccagcccccgcactgctttccctttgcacccttctccccgtggctcagctccaacacctggtgtcatctttgagttctcttcctcaccccacctacacttaatctatcaacaagtccagagtacatcccaaagaagtccccttctccggttctccaacgtgacacttgggaggcccagccacaatcatctgctgctggagctactgtgacagccctgaactgggctcctcatgtccacctagccctgctgcagccacattgcaactggaatggtatctctctcttttttttttttttgagacggagtctcgctctgtcacccaggctggagtgcagtggcgcgatctctgctcatagcaagctctgcctcccgggttcacgccattctcctgcctcaagctccgcctcccgggtttgtgccattctcctgcctcagcctcccgagtagctgggactacaggcacctgccaccatgcccagctaattttgtgtttttagtagagacggggtttcatcctgttagccaggatggtctcgatctcctgacctcgtgatccacccgcctcggcctcccaaagtgctgggattacaggcgtgagccaccgcgcccagcctcggctaatttttatatttttagtagagacggggtttcgccatgttggtcaggctggtctcaaactcctgacctcaggtgaaccacccgcctcggcctcgcaaagtactgggattacaggcatgagccaccgcgcccggcagatactacctcttaaccacagatacaagcatgtcaccacctggatgagagagcacagtcaaatacaaaaatcttttttttttttttttttttttttttgagaccaggtctccctctgtggcccaggctggagtgcagtggcatgatctcagctcactgcaacctccacctcctgggttcaagcgattctcccaccccagcctcccgagtagctgagattacaggcgtgcgccaccacatccagctaatttttgtatttttagtagacagggtttcgccacattagccaggctggtctcaaactcctgacctcaggtgatccacccacctcagcctcccaaagcactgggattacaggcgtgagccaccccacctggctatctaatctatctaatcaatctatctatcttatctatctatgtatgtatgtatctatctatctatctacctacgtacctacctacctatctacccacctacctacccacctacgtatctatctatctacctacctacctacctatctatctacctatctatctatacctggggtctcactatattgctcaggctggcctcaaattcctgggctgggttgggcacaatggctcatgcctgtgatcccagcacttgagaggctgaggcgggaggatcgcttgagtctaggagttcaagaccagccctggcaatgtagtaagaccccaactctaccaaaaaaaaaaaagaattagctgggcacactccttagtcccagctgctcaggaggctgaggtgacaggatcccttgaacccaggaaacagaagctgcagtgagccatcatcacgccacggcactccagcctggacaacagaaacagacattgtctcaaggaaaaagaaaatcgagggctcaagtgatcctcccacctcagcctcctgaggagctgggactgtaggcatgcaccaatgcagccagctaattcaaaattcttttttttttttttttttttcagacggagtttcgctcttattgcccaggctggagtgcaatggcaggatctcagctcaccacaacctccacctcccgggttcaagcaatgctcccgtctcagtctcccaagtagctgagattacaggcacacaccaccacgcccggctaatttttgtatttttagtagagacggggtttcaccatgttggttaggctggtctcgaattcctgacctcgtgatccgcccgcctcggcctcccagagtgctgggattacaggcatgagccaccatggccggcactttttttttttttttttgagacggagtctcactctgtcacccaggctggagtgcagtggcgtgatcttggctcactgcaagctccaccttccgggttcacgccattctcctgcctcagcctcccgagtagctgggactacaggcgcccactaccatgcccagctaattttttgtatttttagtagagacggggtttcaccgtgttagccaggatggtctcgatctcctgacctcgtgatccgctggcctcagcctcccaaagtgctgggattacaggcgtgagccaccgcgcccagccagaatccaaaattcttaataggattattctagaaccttcatattctacatacaactcatattttctacctttcttttgtttaaaatatttttatttttaaagagacagggtcttactatgttgcccaggctggtctcaaactcctgggcttgagtgatcctctcacctcgacctcacaaagtgctgggatgacaagtgtgaaccgctatgcctggcttacctttctctcttctttttccagcacctggcatgtgcctgcctgtgtctagaacacctttcccctcattctctgcttggaaaaattctgctcctgcagaggaaggagcaatctggattcaaatcctggctttgccacctcctaccccatgaccttgggccagcagcttaatctctgtgatcctccctgtctggagaatagggatcaaaatggcccctatcccctggggttctcaccccacaagcctgtttgttctcctagaagcaaaaccctctggcctgcaggtacatgctactgccaccatggaccaatgacaacgcactgttctcaatgagtctcttagtgacatccctgagagaaggggttatggataatgcctccttgaattctaatgccaaggctccaggtccacaggatccctgggcagttgcagagagttgaggactttccaaggacccatccctcctcccacagcctctgtcccctctgctggcatgtgatggagctgggcctcatgttggctcccgggatgcctacccccataggtccctccaaaacagagacactggccaccagctttcctgccccagaagtgcctccctgcactcgctggaggagcagctcacctcggcacacaggcacacacttgcccaagctgaagaagtgggagtgtagctccttggtgaagcagatgtctgcagctgcaggggtcctaagcagggacagatgcaattagtcctgccccctgcaccccgctccaccaccctgcccccagcatcagcatgcagaagggaggcacaggggagggcctgcggggccccaccccatgccctgcctggactgctggacgccacctcctgggcagagcaggaggagggcaaatctgggcagaggcaggtggggccggcccggcccacttcgaggggcccattcctcctcaccaacgcatcaacttcaggttccagatgtggcggagtttcaggatccctagaggacaggaaaggcttcatgccccaacttcccatatccccagggagtgcccttccttcaccccatctcagggaatgagggacagcagcactaccatttccctacagcccaaagtggcatctttcagacccttaggccagatcattcagttctccctggctcctccctctcccccaccctccacatcttactaatcactgcacctggactgcctacctccccaacatacttggacaatgcccattcttctatacttctccctgtactgtcactgcaaccagcccagtctaggctagtggatggctccaagtcctccttcctggcctcccaggatccacctgtgacatctataggcctttctccacccagcagccagggtgagctctgaagggctccagtgtggctaggtggctccccatgaactctaggacagttaagctctctgttcaggagtggaagccccaggcacccctccacccggccatctggttaccagagccaagcaacttcctgtgaagtcagcagagcaggaacctctaggtgtggcaaccaggctcccaaatagggctgaacggtacacgcccagccaggggcaaacctgaagccaggacactgggcttccagtccctggcccagaacttcctcacaggatatcctatgtccaacccccaaatttttcccaagactgtggggccctggatggtttagagaacagagggttctggaggcctgacgttaaaggagctgtaagatatgccctgtggccgttccttggtcctgctccatgcccaaggccctctccaaatcatgctccctcagggatgctgcaggagccacaaatccaagtctcagccctggggcagaacgcccggaaaccggagtgccagggctccatgaaaaggcagcgagaaggggtttgttctgacgaggctgggcccgtcccgaatcctcgcctttcctccccctgcccagcacactggcccgggtaccccagagatgagggtcgtccatgcaggactggtgattggacacggtgatgaggggcgtggccgggcctcgcttctcgatgagctcgtacagcacctccctgttgtgcacggtcaggtggttcatgtactctggcggggaaggagaggtcaggcgctccgggctcgcccgctaggtcggggccgcggcgtcccccaccctaagtcccacctccggccgggcatgggtacccgggcgggcctgcctcggcctgggcccactcactggtccagaagcagctgtaggtgcccaccaagcccatgacgacgctgctggccagggtccaggtgagcggcggcaccgcggggaacggccacttcacgtgcagaggcatccccacccggcccgcggccggcgctcccagcgccccgggccggcctgtggggcgcctctaggtctgcgacctcgaccgctcgagacactggcccctgactggcccgcgcacggacggacagggggcgcggcgcaacaggggactggaccgaggtcccttcgcaggtcaggccggagcagcgcccggccccgctctctcgtcactggggagcggtcgccggggtcacaggccgtgggcgcgctgcggaacgggaggaaacgggaaggcgggcgctggcaccccggcccggtgcaaccgccggaaagcgaacctgcgccggtgcccagcccgaccgactgtcgcaaagcgcgcacgggccgcttgacggcagcgaggccagccccggggcggcgggaagtggccgtcaccccgtggggctcccgcttcctggcagcctcctgcgctcgccttttgtctctctagtgtttctgttttttgtttgacacagggtccagccagacccaggctggagtgcagtgatgggatcatggctcactgcagcctcgatctcccagactcaagcgattctcctgcctcagcctcccgagtagctgggaccacaggcgcccgccatcacactctgatccacccgcctcggcctcccaaagtgttgggatgacagccgtgagccaccccgcccagccacatatacaatttgacatagttacagtactacatgatactatgtgtatgtagcaatgtataatctactgtatggcaaaatatacaatatatacagcaat

SEQ ID NO: 12673 - DNA, 6000 bp, Homo sapiens
cttatgcttaaccctcactcacaacacccctaagaaatatatgagcagtccaggagaggtggctcacgcctgtaatcccagcactttgggaggccaaggcaggcagatcacctgaggtcaggagtttgagaccagcctggctaacatgacgaaaacccatctctactaaaaatacaaaaattaaccaggtatggtggtgcatgcctgtaatcccagctacttgggaggctgaggcaggagaattgcttgaacctgggaggcggaggttgcagtgagccgagctcgcaccactgcattccagctgttaaagatttcatagtctttaacagcactgcaatctcagcactatgtaactgtaccagctctaatcctctactctgaatgggcgacagagtgagactccgtgtcaaaaaaaaaaaaaaaaaaaaaaggaaggaaagaaatatataagcgctattatatccccacttcacagacgaggaaactgaggctcccggggattaagtgacttgcccaaagtcacacagtaatcagcagagccaggattaaaatccaggtatgtctgattgattctagagcccctgaaatctgcctcctaagaactgtcagtcaccatttatgtaatgcttattatgttctatggtagatgcttggcataaattatttaatctttgcaacaaccctctgaggcaggcattattaatagcctcattttacagataaggaaaaccaaggtttagaaaaattaagtaacttggcctaacacaactgaacatcagagtccagaacttcagcccaggcctctttgataccagaacagaattcttaataactaagctatactacgattcaggtgcctggccagaggacaaacataaactctgggatccttgggcattcatccatgccatgcagacctctctgtgaatagctcttatacatgccagtgtgtgggatattcctcaagaatgagctttacatgtacacatggagcacccgttctatcatttttaaagttgtggcttgacagacataatgctgcattcttagtacaaatctcatggcaaaatccactggatttgagccctaatcaagagatacagaaagtccaaacactgtcacatggattccaaataagggtttattgaaaataaacataaatgccctccattgactgggcttattagcatgaagcaaaaggcagatgctatttcctctttgtaaggttagttttgaggtcgtggccaatgtctggccctcttcataatctttaacagcactgcaatctcagcactatgtaactgtgccagctctaatcctctactctgaatggaattaaaaatggcttgaggccaggcgtggtgactcacatctgtaatctcagtactttgggaggccgaaatgggcagatcatgaggttaggagttcgagaccagcctggccaacatggtgaaaccccgtctctactaaaaatacaaaaattagcccggcatggtgagaggcgcctgtaatcccagttactcaaaaggctgaggcagaatcgcttgaaactggaagggggaggttgcagtgagccaagattgtgtcattgcactccagcctgggcgaaagagagaaactccatctcggccaggcacggtggctcacgcctgtaatcccagcactttgggaggccaaggcaggcagatcacaacgtcagatcaagatcatcctggctaacacggtgaaaccccgtctctactaaaaatacaaaaaatattagccgggcgtggtggcgggcacccgtagtcccagctactcgggaggctgaggcaggagaatggcgtgaacctgggaggcggaggttgcagtgagccgagatcgtgccactgcactccagcctgggcaacagagcaagactctgtctcaaaaaaaaaaaaaaaaaaaaaaagagaaactccatctcaaaagatagataataaataaataaattttaaaaaattgctctagctggccaggcacagtggctcacgcctataatcctagcactttgggaggccgaggtgggtggatcatgaggtcaagagatctagaccatcctggccaacatggtgaaactgtctctactaaaaatacaaaaattagccaggcttggtggtacacacctgtagtcccagctacttgggaggctgaagcaggagaatcgcttgaacccaggaggcggaggctgcagtgagccaagattgcaccattgcactccagcctggcaacagagcaagactcttgtctcaaaaaaaaaaaaaaaaaaaaaaaaaaaatggcttgagccaggtgaaaatgaaggcaactggatgaaattggtattgattctaaaagtttaaatgaggtgatattcatgcaacaaacgtaaccattttaaagtggataattcagctcatggctcatgattaataaccataggactagagaaggtgggttcacagtatttcttggagaaagctcattcagctatgatcatccataggcaatggaacaatgttttttggatgcactgggcctgaattcctttgctaatgtgttggaaatgtttgtgggtggcacaaccaagttattctgttaagcggactgctgacaattggttttaaaaagacagttcttcatctccggagatactgtagcatttattaaaaatgtagcattcactaaaaaggtagtatttattcgaatgtagcactcaaatatgcatttttatatgaaaatatactgcagacaaaatttattttagatatttttatttctccaaatttgttatttatcaggagtgactgaaataaaaaatacaattgagtcccatcatcatcatcatggaaatggctttaagagaaaactggtcagatgaatattattgcttcccattttcaaccagtaaatagttgccactgagaaactgacagccaggagtctgtcaagaatgctcaagatatgttatataatacaacatgcctgttcacagggggaaaaatcctaggaaataacttatgtgtacttcttgatttcatcatacaagacaagcacaaaagcaccacccatgcctctgagaacattggaccatgcacccttgaaaaaagctttgcctccttcatcacgagcaatcttccgccagcagtcaagcgtgcctgtgtacatgatgtcagctgcaaagaataaagacatggagttagtgactgaaggccgatgaaaaatcctaagattcactaggctaaataaagcagagccccacctctaagaacgtcagctttaaatccaacattcacacattagcatgggcaacactgaaatattaatgctatgaccacaggaatacagactacccattggtcttaacctctaacaccatttaagcaccctcattcataggcatctgaagggccagctcaaaggcagttgtggaacagacacagatgctatcaaccccatcccttgacttggacagacagccattttaaaggtatgtatcaccagtttgtggcagcagattgccccacgactacaactttatcttctgctcaagtggaacttacttcctttgcgccctgactgcatcatcatgcggcggcgaacagtgtcaaatggataggaagtcaacccggcaacagcagtgacagtctgtgcgatcatccagctgatgacgatgtgagtgttcttgggatccggaagcattcctgggaataggaaagagatgcttttaccaaaaagcagagttttactgacttcctttccccacatcccctaaacacgtcatctgtacacaagggttgcattggatgatcttggcttcctttagcaattaaaaaaacaactctttagctcttggactgttaggttggtacaatgctcttttaaactgtctcctaagaacacaacgttaaagcccacagcaaacttaccctttgcagtgtcatagataccgaagtaggcggctcggtagatgataataccctgcacagacacgttaaagccttggtacaggcccttaatcccatcagatttgtagatcttaaccaggcagtcaccgaggcctcggaattccctttcagctccagctttacccacatcagctgctagacgggtacgggcaaaatcaagagggtacacaaaacacagggatgtggcccctgcggcaccacccgatgccagattccctgcaaagtagagccaaaactgggttctcttgtccacaccacccaggaagatctgcttgtatttatctttgaaggcgaagttaagagcctgggtggggaagtatctgatgacattggccaggttaccgcgccagaaggacagaactccctgctccttgggaatacggaccacgcagtctataatgcctttgtattgcttatctgcagtgatctgcttgctggcatgctgcacctaacagacaggaaggaagccaacagggacagttataaccatggggaagggaaagagaagagcttatgccatctcgatcaatgccctttaaggtaggctcccctctctcaaatctagtcttcgtatatcatactggctggaccctcccaaccctctgaggctgtcacaggggaagaggtgatctgcaccagtagcattaagcctccacccctctgagtggagagggggcatcctccagcggacccgtgaccttcagacctaggagaaaggtcattacctcaaacccaggttcagaggcattagggcgagtcccacatagggcgcggtcaccttggggaccgcagcctacgcctcaagtctcctgagctgcttccgtctcgctccgcccccactccgctcccagaggtgacccgagcgccgccgccgccagccctacacgctagcccaggagcgccctctagagccggcactggagagcgcgcggcgcagggaggcaggcggagacgcggcggcagcggccgcggctgcgcgggggcggacgtaaaaggcacacgcgcttcccggcgccggcttccggcccggcgaggtttgagcgcgtccgcgggctgggaggccgctggacccgggcgcatggcctcccccgggcagttatctccttgccgcgaccttgaggtcttcggtaagaactggcgttcctctttctaacgccggctttcggccttcgcccttgacgcccaggcccggggaggccgtcactcagaaactgctccatccgagtccgccgcctcggagatgccgagagcctggtcctgccctctgcccccggccccttcctagactcactacttcaggtcactaaaggcgcctcccaccagtttgacttctgttctgcctctgcgccccgctctggcctctcctaagccgcttccctggccatgtctttagagttcgctccccgccacccctcgggcgcccgccttctgtgcgacccttccccccacttcctggttgggctcctggatcccaggacgtacctgcagcagcagcttgacccgctcgatgggcgctaccgccgtcttggagatggctgcggccactccacctgccaggaagtccttggcgaaggacacagcggcatctgtcatgttgaaagaggaggcagactgctgcaggacgggactgggccgggaaccggctttgactccggcgctgcggggcggagcgaagcaaatggccgatttatatagggggagccggagctggagcggcaggcgtcggaggcggggccggggcggggtctgggccccggcgcgctgggcggcagagccgctgagtggcccagctcgcaggaggaggagtcgtggagggcgggccgggactgctctccgcgccgcccgtgctcgccctcggcacctgacccggcgagaggaaggggcgggtccagagaacacccgggacttgaacgctggaccctgagagaggcctcggagaggggaggaagggtgaggtcacgatgtgcctggacaaaaacccttggagcaggaccaggactagggtgagacgcatttgctacagggatgccaaaag

SEQ ID NO: 12674 - DNA, 6000 bp, Homo sapiens
aaataatggaaaaccacatttttccttcttatattatatatatatatatatatatatatatatatatatatatttgcttttatctaatgtgttgcaatggctgagaaaaacattttcagcaaagactagttcctagttaatgtgttagcatatgcatacatgtatgtgtatacacccgctcatacacactgccattcttaccatgtagcttcagggcatgagggcatattgtctcacttaggaaaacagttaacaatgacatattttgtttgtgaaaacatgcatttacttttgtgagtttccccacctaacccattcacagagttatagtcacagagagtactgaagagtggaataagttaaaggcactcagttgcagcgagcttcttctgcccccatcccccatgcttttgagaccacagttccatgctgaacagctctgaccattggagtcacacggcatgcctcactgagttcttggacttgcccgtcccatactccagagccacatattggtggtgttgaaatactaaacatggaaaatggcaccgcatgcaacttcaccacagccatcatcacagaaccaaagaggccttttctgcactttacaaaaacaaaccacaattcaccatagctcttttatcagtgccaataacacttttagtaacctcagtcctttcttttttaaaggatccaaaaacttaccaagtaatgcaacttgaaacaacccaagttccttttcagcttatatgacaggctaagtttcactcctgaaaaaggtgcccttagcaaaatccgtgtcccctctccccaaccaaagcatacaaacaaccaaacaaaaacaaacagaaaatgagcctggatgaagggttgatgtgggagccggacagatgcccacagatgttaataaaatcacatgtctggggtgatggctttgagatccaagttttcatcatccaatcaggtaccagcctcttaaaaccaaaatgatcaccgatattaacaggtggagctaagaaagtcctgttgtaagccaaaaatagcactctgttactttgacaaaccatgatttctttatataatatacattttaaataaaacaacccaaacaaaattctgggccatttatccacatttccagagagcagtgaaagcctagatcgtttcattagcactatactgaaattaacatttctctctttgaaatgtattcctcaactaatgaggacctaaatgttcattgtacttcatctcctttctaaattatggaggattactcttttcctgtctcaaataaattcaataaaacctcatgatatggtttggctttgtccccaccaaacctcatcttggattgtagctcccataatccccacgtgtcgtggagggatgtggtgggaagtaattgaatcatgggggcagtttgccccatgctattcttatgatagtgagtaagttctcacaagatctgttgattttataaggggtttcccccttcactcggttctcattcctctccttcctgccatcatgtgaagaaggaagtatttgcttccccttccaccatgattgtaagtttcctgaggcctctccagccatgctgaactgtgagtcatttaaacctctttcctttacaaattacccagtcttgggtatgtcttttttagcagcctgagaatggattaatacacctcatctcactatatatataataataagatatatagtgtatttttatatacatgatgcagaccttactataatatgtattaccatatatatattatatagtaggatacatatcttactatatatagttttttatatacgtattttagtattgttggggttaggtctgttctccttcaggtaccatttctgggaagatgagagtgccttgggaagatgtggtgtatggaggtgttccgcacacacctgggacacgtgaactgaacacgagatgtctaaagtttgaaatctcagcccgaggtagatgggctgttttccaccaccaaccttccactcccgtaatgattttatgaggcttttatttacttattttttgtttaatgtaaccacctgcagagggaaagccttttcatctatacatttattcaaagcctataaatggcacaatgacaaactgctaggagctatcaccttcttttttttcttgttcatgtgtgctactgtgctccaagaaaaatgaggaagggcttcctacactgccgttcacttaacaaagaacagtggagcctttcaaagtccaaatgtaggttgtttagagaaaaatgacagaactggaaaatattcgttgagtgaatggtagtagagagcacagcagatgacctaattgcctcagcagcctgggcttcaattttgattctcacttcctctaattgactgtgcaaaagatgtatctttgatttaaaactggtagctcaggagtttaagaaatcagtggtggctattcaaatctgtctgaatatccattcacataattaaataggagacgaagtctctcctctgaaaaagtacagtactcagacaaaaacacacacaaaaagagcaacagatttaaactaaactgaacatatttccccatttgggaatagaatacatattgttaaaaggcagaaagcagtacagaaagaatacattctggtttacaaactaaaatcgtgtctcttacacttgacattcacatcttaagaccaactctcaccttatttggaatataagtatattttaaccagataagcctatctttagaaggaggatactaaaggacttaaaatatttgtatattgctacttcatttgaatgcaatgcattcgctcaacaagttgcattattggcaatattcaacagtattacaaaaggtttgaaatgtggcgtaccaattaaaaagaaagaatgttaaacggaggtcattccctcgtgcacttgaatgtttagttttttgagaaccttttggttgtggtctagaaataaaagcacagtattccaaatggcttttaaagagacccctgcacttccaaaagcaagtctctgttgcggagtcagtcaacactctcatctttgtggagagactataagctttccacaaattactacacacaaaacaatgaaatagccaagttcacaaattttaaaaaatctatatatttaccattaggctacattccaggccaacaactatgaactttcaaattctttcaagtctgcttgtaaatttcacagcatcaagataacttcattatctaccttatgcagccaccagtcccttatcaagtatctgttacattctcaggtttgggtaaaaatcagctaggttactggtttgagggccaactgtatactcggcattagtttatttaaataaaacgcaaagaaaagtagcaattcttccactggagaagaaaacatcaaagcatctttaaaactgcatccacgcacaggcattattatgaaaatgcaattattattctgatttcaaaaaaaaatgaagccttccattttaatctactgacttaaaactgatgaagtaattttccacttgctacaactggccctgattatgttcttacatgtcaaagaaaatactctttaaaatggccatatatatatatatatatatatatatatatatatacacacacacacacatatatgtagaaatgtagaatgcgtgtgtgtatgtctgtatacacacatacacacacacgcattctacatttcattgagtaataaaatactgaatttctaatctgagaaaatacatgcttgcagagttctccatgaaattcctgtattcttaattttaggatacacagaaattccatatttttttctggaaatacagggattaatgcaaccatgtgccattagccatccctcccccacttaacattttgctcatttccacaggaaaatctatgctgaggatttaatggattactgctaacatcttccccacagccaactaaaggtatgaaataattctccactctccaaatctgcccccacaaaacggcagatttctttgctatctgatttcaccccgctctgccatcccctaggaaaaggctcagtgcgtccattcaaaccatgcaggtctcttgcagtttctgccgctttgttctcatcaaagtcaggtgtttgcaccctggccatttaatttctagctggagaaggaagctaccccggatttcttaagcatgcacttctatgttgcccgcagaacgcccacacaaactggcaattctgcttcgtcaggataacgaggtctccctaaactttttcttttccttttttttctttctttttttcttttttttttttttttttttttttttttttttgcttttgccttcctcacatcaccggaagggctgattctgagatgggagctcacgcacaccaccccctttcaagaaaatataatgcaacgcgctccgatgtaaaccctacgggcaacggatgccttcaaaaagcataagataagagcaacaacaacaacaacaaaccaccgccccccccaaaaaaaatgaccaaatagaaataaaataaaataaaaataaaaagaagccatactaccaccttgtggatccagctcgcaagaacatcacctgcttagttccaaaacccccacccaacccccaccccaaatttcttaagttgggtccaaatgacagatcgggatcctctgtcctcactccccgcagactcgcccaagccctaggctgaattcgtgacgcgcgcgcccagcacccgggcgagttgcaagccccggcgcaccgcaggggccaaaaccccgccggaacctcctaggaccccttcacgctgcctcctgcaccccctcccccgccatccccgagatagcagcagcacatacacaaaaagaggctgacacctgccgtaggttcagaggaagaaggcagagaaaaagaaacccgcagtccggaaaaaaaaaaagccttctggggaaggggaggggtatgatgcggaggacgtcctccggctgcccctcgctctccatgcagaacatccgttcccagggtggcccgggccaggcctcgggggtgcaagggttggcctgacccccctgctcccgcccccgccgctccgggaagaaagggcgctgtgtctggcggcgagcaggcgccggaatcgtgcgctcgggcccagggttgcacggagcactgggcccggataccgggggcgcaaagcttcgggtgcggcccaggagaaccccgccgagggaccccagcctaccggttctcggaggggcgaaagagccaggtcaggttgagggacaggaggaggaaggggtgtccaggagactgactgaaggatgagagtgtcctccggggtagcgaccggcctcttggaaaaccagaggcggagggagcagccgcggagtggagggcgcaggccgggacctgggcctctcctcccacagcaagccccccacccacgcatcatctgcagccgagcggcacctacctccctctccctacctcatccccgctcgcgcttccgcaggtcaggccacgcgggtgccagcgcgggctgtgggcgccccagccgcggccttggggaggggtcaggactgaagttcactctctctctgcgtggtctcgaagcccctcgcccaccccgcactgtctcctccgccgccggctgcgcgcttggcggatcttctccatcagttctgcccactggagtgggaaggggctgagccgagccgcgcgggaattgggaggcggggaagcggggaggcgggggaagagacgagatgaaatcggcccgggacagcagagaggcttgggatgggatggaagggaagagggggtggcggttgcgttttccagggctgtagaggtggtgcgcctattggaaccgactcctcagcctcctcccccgtccccacctcggggactggcggaccgtgcgccccgcaggcttaacactccccccgacaccctcgctccgaga

SEQ ID NO: 12675 - DNA, 6000 bp, Homo sapiens
aaacagattaccaggtcgccaaaatagaaattgtttgtatcaggggtcaacaaacatttcctgtgaagaaccagtaaatatcttcagcttcgtgggccatatgatctctgtcacaactactctgttctactgttgtactgaggaagtaaccacagataatatgtaaacaaatgaatgtacttgtgttccaataacactttatttcttgacactgaaatgtgaatttcatatgaattttacatgtcacaaaaaataccctgcttgaaataaatgaactgtaaaaacatttgggagacatctggagaattcagaatcctgactgggtattttttggtattaagaaattttcgctaactgttcctaggtgtgatgatgatattgttcttatgttctaaaaaggagaaaagcatctttatcttttagccatatgcacttaagtatttctggatggaatgatatgatgttttgcatttgatttaaaataatccggtgtatgtgtgttggagggaattggtaggagaactacaattaaaacaaaataaatcatgtgttgataatttctgaagttgggtgttgggtgcatggaagttcattacattattttctctattatgtatatgtttatatttcaccacaatgagttttcaacatggcgaaaccccatctctactaaaaatacaaaaaattagccaggcgtggtggtgggctcctgtaatcccagctactcggaaggctgaggcaggagaatcgcttaaacctggtgggtggagcttgcagtgagcagagatcaggccacttcactccagcctgggcaaaagagtgaaactccataacaacaacaacaacaataacaacaaaacaacaacactattataatttaatgcttaccatgttccaagaaactggaagtataaacaaggaaaatacattgcttgccctcaaggagcttatgatctgctggggaaaacagacacatgaaatgaccaggtatgtcacgattacctatcggcatgaaccaaatgaccaaatgccacgggagaactggattctgcctgagttggtcaggaacggcttcaaagagacggtgaggtttcactatttcagaagtagaatttctaggacttgatgacctacgggatgtgaaaaagatggagtcaaaagtaatagcttttactttgcccacgtgggtgggtggtgtgccattaatggaaacaggaaatacgggggggggcggggagggggcgggaagaaatagatcagggtgggggcaggcaggggagagttcagccttggacctacaggaagttgttgaaactgctctaggcagaaggttacttagttaccgcagtaactaaggtttcaagaggggaatgcacaggatgtttttggagatccttctagatcccggactaagagcctacaggctggggagaggcaggaggtaaggctggctggagaagtagatgtgttctctgagagctgttttgggctccaccattgacaggacacgtgatgatcatgaaatggagccactgtttccctgtggattccattgacaaagtcagatgaaggtcttagcaccactttgggggaaaaataactaacctgaaagaagcagccactttggatgactgtaataaaagtgatgaacagtcttttttcattgttttggaagtggagtatacaggtttggattgtgggctctggaaatatgctgcttggttttaaatcctggttccaaggttgcttaagcctcggtttcctcatctgtaaagtatctcatataagagtaaataaaatgatgtatgcaaactgtccattacataatacattttcaataacttagaattattagttctaatggtactttttgaagagaatgtaaaggacttgattactttgtgtgctgataaatgctccatatttccttccaaggaaattcttggaaattcttgcttaaattctattgaaattgaaggccgttttcctcgtgctctgttccttggaaaggcaagaaggaagaatgaataaaggaagagggagaaaggaaggagtcttgagaagaatgaatcacaactaacactgattgaatgccaaagaatagccagaagtttccctgaaagagggtgctctgtccagagccttccatcatgggtgcctcttggctgtttcttttgggctgggctgtttctttgggctggtatggggtggggagttgtctgtggccaagctaattgttcaatgcctttccatgatggagtgggggcagattggcttcctcttctcctaggcagtgtagcgggacttctcttgccatctagaaggaccaaacttcagtgcttctgagggcttagaaggggaaaagagaaagcccaggcccctggtgctaggagcagagaagggtactttgtaagcgcttatgctgctggttctctggtaagggagaccactagccagtttgtgcgacatggggcaaataggaatcatgaggatctatttgctagatctgtgtataccacaccatccctacacccgcccctgtcatcatcatctacctccatggtcttctgtacagtgaagaatgactttcggcagatggagggccaattctccccatgaatccagcccttattccatctcacctaggcaggggacttgactcctttagtaaaccctcctgtcatgcctcaccaacccctctctactgattatccctaaactgttgaccaacaggctctcatctctcaaatcacaaagagagaagagaatctttgcttgtccctactcgctcctccagttctgctccatttttcttcccatttacattggaaagtctcaaaacagttgtctaccctatgctgtctctacttcaactccaattccctctgcaaccctgttccatcaaatccttccactttcctccactagcaccaccctaatctaaaccaccatcagctttgataggaactattgagaaagcctcctaactaatctccctatttaaatttttaatctcttctgaaccattctccatatagtagtcaaggtggtcttttaaaaatgtaaaccagatctggaatactactcagcaataaaaaagagcaagctatggaaacacccaacaacttggatgaatctcaagggactcaaaaccgagtgagaaaagccaatctcaaaatgaatattgtatgattcatttacaaaacattctcaaaatatcaaacttacagaaatggaggacggatcagtggttgccaatggtgaaagacttggggaactgaggagatagttattgctgttttataattacaatacaacaggtaagatccttgcaatgatgaaactgttttataattgaccatggtagtggaaagaggccacacgtgataaaattgtatagaacacacacataccagacgtgcacgcgcgtacacacacacacagtagaagtaaaactgaagaaatcaaaataagattggtagattgtattaatgtcaatattctagttatcttatagtgtagtcttgcattgggggaaattgggcaagggggaccccagatctctctgtattatttcttacaaatgcatgtgaatctacaatcatcccaaaagacaaaagtttagttaaaagaaatataagtcagaccgtgtcacgccttggggttaagccactcattcaatgccctcccattgattttggaatgaagtggcctgcccatggactgcacctgcccatggactagtatgcaatccacgatctggtccctgccaacctgtccagccttactttctggtactctccccagctttcctggcgccaatcatgatcaccaccttttagttccaaagcatcaagatttggtccctccttctgacttgttttctggaaagctttttcctggctctttcatatctttcagggttcagcttaaatgtcacctcctcctttcctaatcacactatttgtacttttcctgcacaggctttatccaaatttgattattttctcacttctttattgtctgtctcccccactagattacaagctcccagggcagggtgcgtactgtctgcagacaacgctgttatcaccagagcccggcactgagcttggcacatggcgagggctcagtaaactgaatgctgagtgaatgagacgccacgcgccgctttgccatcggtgctttctgagtgacgttaaaacgctctggatggtggcactgggattatggatggggcttatttagctccctccggcttgctactaaggggaggggtcgtcggtgggcctttcggcgccgctgcaagccaccgggttccgaagtcggaggccgaaacggcgtgggccccgaagcggggccgcttttcagggagtgcgcaggttagcgaggaccccggtgaggcgagacgccaccctcacttggctgtctttgttgctcccacctccccagccccagccgcctgcagtgattcgtgactcccgcaggcctctaaggaccgctgcgcgagggagggggcccgaggcgcccccggcccgccctcctcccggtcttcggatccgagccggtcctcgggaaagagcctgccaccgcgtccccgcagccaccctctccgcgtgcccggccctctccagtggcgggggcacgtgggcgcgcggggtgcgtggcaagccgcccctctccccacgcccgtccggccgtctcccgcgcgcgcgccccgcacacagcctccgtgcagtgggcagagcccggccccgcgcgcgccccgccccgcccctggctagccgcgcccgcccccgcgctcctgcttcctcccctctttccctccccgcctcccaggcgcgcacccctcccctcgcgcccctcccgcgccctacatccaccgcccggcggagggggctcagtccgcagccgccgccgccaccgccgcgcctcggcctcggtgcaggcagcggccgccgccgccgagacagctgcgcgggcgagcatccccacgcagtaagcccgctttctttccgcttgtgcgcgcgtgtgtgcctcccgcccgccggcgtcctgggtcccgggggagcggctgcccttctgccccgccgccgccgccgctcggggctggtccctgcggtcccggctgcctggccttccagggctgggtactgcggcttcggcggcctcgctgaggccgggggccaggggccgtcccgggctgcggggtgcgggacgagggactgcgagtgcgaggtcccccctggtgcgtgcctcggccttccctgggtttttggctcgatggggactaagaggcagtggggtggaggtgggggggatcgggagtgaaatgggggctctccatgttttcctgtgcgggggatggtggggagtgaggagggagtgaagggggggccctggttttgtcaccaaggatggcgggcagtggggggtggggcgaggtggggacacctcttggttctttcagccaggatagctagcaggggctgtggggagcgggtgaggatgaagcggtgggtcgactcccttggttttcccatcaaggatggcggggatcgtggaggggggagatgggagacctgccttgcttcgctcaacgaggatggcgggggtggcgacgaggagtagacgtgagggggcccgcctcggttttcttgactgggatgcttgtggggtggttggaggatgggggtggggtgcagaataaggagggagggggagggcccgctgtggttcttctgtccaagggggatggcgcgggtttggcgaatgggggtggggagggggtatttcagctccagcgtggaatctagagaagcacgaggaaggttctatcacgggggttgagccttagaaggtgggttttcaaaactgcagggcgtgacctctcccgcctcgaaaaacgtgaaatccttacaaggtgccgtctgttctaggctctgggacagaggtttctgctttcgaagtttctcttcctttcctctctgctcttagcgt

SEQ ID NO: 12676 - DNA, 6000 bp, Homo sapiens
gagtcctgttcaatgcactctgttgtctagtcttctgctaacactagagatataagaatactcattaaactcactttggaaatggctggacagttggtgagagagggactccaaattcagccagggtaatattcccactcaggtaataacagtaaaggaaagcactgagaatgatgattatagtcagggtattacacagctttggcttccaacataggctatctctgtgattccatgaaggcagatcaaactgggagcagtggagcctttggaaggattgtaggcaatcttttaagttgaaagtcaatttgaatgtacatatcctttaaccttatattctctacacaaccagcccagaaccactttagaataaattctcctccttaagatttcctgctgaatgtgaatgtggcccccaaatttgtgggtggttacatctgaatttttttttttatgtttgatcctcgtattttttcacaacatcttatgggcaggtattctttttttttctttcaccattgtacttggtaactttgctaactcattatttgaatatacttatattcttttggggagttgggaacaccttaatgttggagacctccttaaattttgacaaggtctaaattcaactttgctgttgtcttcatccctaaaaatgtcatttaatgctcaatatctgaaagctgattaataggctttcatattataagttaaatattgctccctatagaggcctaaaaatgattttttaaaaaaatccttagctgtattacttttataccttcagacatcaactatctccaccagccccatggtttgggggatgagagtagggtgtgaaagtagaattaaaagtattccaattgtttcaattatggtagggcaaaagagagggagaaagtaaacattttgtaaaagcctacctttttggtgatagaggtgaaacaggacccaaaaaaaggaattttattgtgggaaaaagtatttatttttgggaatattatctttattgaaattaaagttttagtaatgatagaggcaaaaaaaattccctctcattactcatgagaatataatttgaaaacaatctttctggagtgagatttttaacaaacagttaaaattgcatggcctttgatatatacattagttttaggaatctatcctaatgatcttaccaaaactttgtttgcttctaatgtgagtaaatatgcagtcctccactcaggttgcagagtgggtactattgcagtctttagcccaagacccaaattaacaggcttactataatttcagggttgtgaaatcctaaatgttctctttttgatcatgtgacaatatgctctcagcagcctaagacacagcaacagccacatcagggagagaaaaataggttccaggatcagctgggcactatggcggggcctctgcaagcagtgggctaaaggggacaggcattagaatcggggtactgcctcagggttggaaaagagagacccactgaagtgagagtcagggggcagaatgaatttggtgaccatctgttaaggaccagtaagagagtgggtatgaagaggactggggacaagtgaaagaaggtggtacaaccgtcaagagggccaaaagcagctgtgtacggggaagagaaggagctcagttctgggccggcagctacagaatcaagccaggcagccttccctgaaccaccttctccatcatcataaagtcagggattgttcatgcacataaagtccaggtactttcagtatggggtccgtgatgagcttcagtggtggtaagatagagggactttgattgccctcaccaagttttgaaggctttgtagactccttttattctttactgttcagatgagatcatttccccatgtcattaaatagtttgagatcatcatggcctttcattttacttcatttcactgggtatgtgttctgactgacctttgtccatcccatacctggtcccaacagatttcatacttttcattttaggctctttgatgctcagaactgcttattgcagtacctgtgtaatctgagtgaccttcatgatggaagacaaaacagtgttgcagtatctatagaagcaggcaggtcatcagacctctgcagtggcacctggaggaagcatccctgcatctaggacttctggtactcaatctctcagcctactcctttggccctccagcctcctagtgacaggcagatcagggacactcacaaagggtccctttgaaatccccttccttactacatctctgccttaaggttgactctgtgtacaggattgcagttaggccactggtagtaagtggggagtgacctttcactagtatattctaccaggattcccctgagaaccaaggcctcagggcactgaaccatccaaaggctactttgttcccctattaaatctttgtggatctgagtgtcacaaaaatttgtttaaagttatcttaattataggcttcaagtcattactggtcccaatcaccaaaagaaagaggttaattgtatttctgttctctttcttatattcatcttccatattgtcactttttatgtttctccatcctttggaggtaaggcctcttgcttgggtattgaccacattgcagagaatgaagtgagggaaacagtgacaactgaaaaggtgagactgcaaagtaatacaaaagagccccttctactcttacaaatgccattcctttgtccctttatggaatcctgtgaagatgttcatgactgtgaattattaccctacccaagacatttgcagcacaaaagaggacccttgagatgataaaactagcatagatcaaggaataagtctcattcttgtaggaggaagaaaactgctggggcatcgttgttgagggaagttgggggttactgacattgttcaaaggatacctagaaggtccctgcccattctacctacctccagagccagtggacagagagcacagggaatatgctggacctactcagtaatgtaaactgcttccaagcacttttccaaccacttcagcagaatctgtgtttaaaactaaacagtgaatatgcttaacacaatctttcttcatacccatccaggaaggctgtcagcaccttgaattggccttcatgattagcccggtttcagtgttttaagagccctgtaaatcataaaaactttattttattaagcaatttgaattttatctctgatttcaaaaagattttgacctattatatgacaaactacaaattcgtgatgtttccactacttctgggaatacaaatattatcacatacctaatacagataataatgtacctccacctccacataccgccctatgaatcactgctgaatggcaaattttcacctatttaaatgaagagagagaagcaataaaataaacaacaaaaaaaacactcttgtgatttattcctcattcgtatgctctggaaaaataacacatattagaaatggggcagagaggccaggcatggtggctcacacttgtaatcccagcactttgggagggcaaagctgggggatcatgaggccagaagactgagaccatcctggccaacatggtgaaaccctgtctctactaaaaacacaaaaattagccaggtgtggtggcacgtgcctgtagtctcagctactcgggaggctgaggcagaagaattgcttgaacccaggaggcagaggttgcagtgagccaagatcatgccacggcactccagcctgggcaacagagtaagactccatcccaaaaaaaaaaaaaaaaaaaaaagaaggcagagagttgttgactgagtgctgccctgcaagcccaccttaggataatctatcgggatattgagcttttcccagagatagatggggtggcagaggcatgttagcacagtagatttcaaagattagcatgcagagatatgttgaagataatttttttttctgcccattagggaaggtggtaattgtattgtgtttcaggtcattcattaaacaagtttgtacctaaattaactacagttctgcattcctttctccactacctacccaattaaagcaatataaatgtaaatgctttttctgaagtatctaagccacttagctggttccctgataatgcgttaaataaaactgtgagaggtgttcaccaacaaatgtgtgagatgtatggcttgtaaccatttggggtatatgcttttagacagttttttggaaatgagggaagaaaaagcaccctttctgactattccttaccttatcttggccacattcagattaaggttcatttcctaagaggcacaaaactgcttgtttacaacattaatcgtctgggattggtcactggtaagatctccatttgcaggacaccacaggactctgtgtcaacatcagtcatagcatggcagggcatatagcttttgaacaagatatggaccccatttacagaaccagggagggaaaagtgccatattcattgagaccatttcttttcaataatgtctgacatttattgaaaataaggaaaagactttctccaggtagtgtattagagcagagcagaatgcaggggttactgtgttgaacaaaaggcacacatcagagagacagttgcaaactcagaatactgcgttatgggcaaaactaactggtccacaagagaaaatgagagactcgatttggctgccaggaacacctgggcctaggcaagaacacaagaggtttctgggggtggggaggaaataggtctcgctgaaggtgacagatcccttggggggcggccagctgtctggatcactgtccagggactgtggccagcccagatacctccgaggtgagtccagatcactaggagcagcagtctgtcggtgggatgcgatggatggcgatggctgtggcagcgcaggtctgtgggcagaatgatgtagtcgtctggcagtctggtggggaggagagggcttggcagcggcggcagtgggtggtctgtccagtgtgtaacaggagcccagcttgcagctggagcgcaggacagcgtccaaatgtacatgggaggggctggctggctggaaggagagggcggcggctcgctccagagtgaggcccaggggcggcagcaggagcctggagcgctattcctggaacaaaggcaagcactacgcgggagggaacaggagcgcaggggacatcgcggcggctcgagggggagggaggcgcggagggagggcgccggtggcgaccctggcggcggccagtaacacagcggaccctccccagagcacccgcccccaggcccgagggtctcccggcctagaagtcctcgtcctcctcccatccaaagactcgcttcatctcggccagaaagccccggtaatcattgaggagggggctctccttcttgatgtaggggatcacccactgcagggcgggccctgtgaggcgggtgatgaggaacgtcaccttcagggcgtcgctggagaacgtgttctcgtccacgaacatgtaggagcccgtctgcacgatgaactccgggagtcggtcggtatcgccgtcaaacgtctcgggaaagggaatcgggttcctccagcgacgcgtcgcaggccggatcggcaaggccaggagggcctttatcagctgcacccgaccgtccatcgctgctcctcgcttcgctggacgtcaatgggctccacccggctctgcagaggtcagtaccgaggcgtcgccggaaatgcgtgtccacgaaggccggcctaggcttgggtgggcggggccacgagcggggctccaaccctctcatggactccgcccacaaagccgggtggtccctagtacgcaggcgtgtcgtggggtatacactggcgaagaggggcctaaagccctcaaggaggccggcttgtatcggagaggctgggctaaagtttcctgaggtagcgggacggggagcaggagaggaaccagggagacctggtggtgt

SEQ ID NO: 12677 - DNA, 6000 bp, Homo sapiens
cccgccgccgcgtacctactacaggcccgtgcgggatgttgtaccggcgcagcaaggtggtcagctcggtatccgaaagatctgcgtagttgtccatggcgggtgcgggctcaggcggaggcctggcggcggcccgggcctaccaaaaccggccgagcaacggctgccgaggagcacggcgggggcggcacgagcgcatcgggagcggccgcgctcgcgtcacagccgaatcgttgtcgcgtcacagccgaatcgttgtcgcgtcacggccgctggctccgcaggctgcgcgcgctgcgcggggcgggacctaaccgcgggagcagccggcacagaccggccgtgccctgagagctgggaggctggggccgcgagcccaaacgtcatcaacgcgaggattggctagcggcggagagggcggggcccgcccgggagtcagggcggtgggaaccggtctcgcgatgggagcgggcggggccgcaagcccatatgtcacaagcacggggattggctagtgatggagggggcggggcccgcgcgggcgcggagcaaaaggtctcgcggtgggagcgagcggggccgcgagcccatacgtcacaaaacggggattggctagcgatggagggggaggggcccgcgcgggcgcggagcagaaggtctcgcggtgggagcgagcggtactgcgagcccggacgccactaatgcatggattggctagcggcgtagggggcggggcccgcgcgggagtcagggcaatgcaaaccggtatcgctgtgggagcaggcggggctgcgggcccaaaagtcacaaacgcacagattggctagcggcagggggcggggcccgcgcgggagtcagggcgatgcggctgggagcccagacgtcaccctgtggcgtgcggcggggtgagaggggcggggcctgcgcgcgagggacccgggacgtgcgagcgggcgaagtcggcgcttggggtggctctggtccctaagtcgcttgggcttcgcccgatccctgcacatccctactccccgccgtcgtcccccttcccagggccccagagcctagggttccccggccgcatcccggtcggccgccccagcagcggcgggaagggcccggaccctaagagagcgcgggccccgggccaggcgctgccgagggcgctttgtgtgcgcatcgcccgggaagcggctgcagggcaaggcccgcgcctacgcgatccccgcagaccccctgccatgggcccgccttcccagtctgcggggctctcgcccgcgcacatgtgcctgctgcttaccaccgcctacccctctgcttcccttcctcctccctcgctccacccgggaggaaatggggcactgggccaggaggccgctggcactccagaagcaagcagtcttcgaaggggcccgggcatgccgacgggcacgccagtgggcgcgggcagagggcgccgtgcgatgcgtgcagagacgacgtgtgcccgcctaacccttcatgccgttcattcacccggggcactggggggagctgaagtggggcgtcctctcctgtcggaatggtccctgagcgcagcgtggctaggcagggggcagacgtgggtggcgagctatggattcccattcccagggccttgatcagatattggctgtctcatggagaagagaaaggaggtgacattcatcattcatattcttttttttttttttttttttttgagacagtctcgctctgtcacccaggctggagtgcagtggtgcaatcttggctctctgtagcctccacctcccgggttcaagtgattctcctgtctcagcctcccgagtagctgggagtacagtcacatgccaccatgcctggctttgtatttttagtatttagtatttgtatttttagtagaaacaggatttcaccatgttggccaggctggtctcgaactcctgacctcaagtgatcagtccggctcggcctcccaaagtgctgggattacaggcataagccaccgcgcctggctgtgacattcacattctaaacaaagccagctgagggtgtatggaatcaactagtgtgcccctcactgggtaggccccaaactgggagcatgaagaggtgacatgccatctgtagtttcacagttgagggctggtgacaagggaagaagaggggagggctctggtcatgtccagaatggctggcctggctggtgagggtcacagaccagtcatccatggaggtttgcccatggggtgggaagaggtagacacctgggggagtaatgaggagatggggccctgttttgactacacgcaaagatcctaacaaagaggaatcactgttggcaaggccccactgtgtccccagcaatatggaaggaagtgtgggtccatgaagacagtgcctggcagtgtgcagcaggagagccttgggtagggcaggggtttgcacctcatctttcagagctgaggggacagatggcagtttggactctgggctgctcagaggctgccttgtggattttttagttttgacaaaatcagattccccagcacctctgcaagccttctgcaatcctggcccctctcccagaggcctctgtgtactaagtgctgctccatcctcccccatgccacccctccccatacggatccaagctgtttccttatgaggtcaaggaattctagatttgccttctccctaaggagcaccccccacccgttctgtacctgcctcgacactctgccttttatgtcccacccctttgccccacaatcaggtcccaccacagatggcaccaggaagctgaactgtgatggtccccctgcacccaccctgtgggtacctggagcctaagtccagccccattgcagtgcagctccactctagaccactggaagccaggcaggctcctgagcagcagagcctccatcttatacagggagagtcaggaccctgcgatcaggggagacttgtccaagagccctgagtacagcaattaattcatggaacattcccccaccagtacctggtccctgggggtgatgacctggacagcctcagagagtttcccgtcaagggtagggtgggatttgcagtcatcagagggtctgggaagggcgtgtgcaggaaaatctgagggcctcagggggttcttcctgggaagtgcaggcagaggagacatcgggatgcaaccaattctaagtcaagaataagaaaactgagttgctccttaaggatggaatggcttgcaagcagtatatgctgtataacttacaatcccaacatgattgagttacgaggaaaaaatatcaacatggaaacattcctcagtgtctatgacaagtagatgattgttcactgagctgttaacgttatttttttatttgtatttttatttttatatttattatttttttccaagacacagtctagctctatcacccaggctggagtgcagtggcgcaatctcagctcactgcaacctccgcctcccaggttcacgcgattctcctgtctcagcctcccgagtagctgggattacaggcgcctgccaccacgcccagctaatttttgtatttttagtagagaccgggtttcactgtgttgaccaggctggtctcaaactcctgacctcgtgatccacctgcctcagcctcccaaagtgctgggatccaccacgcccggcctttttttttttttttttttgagacggagtctctatcacccaggttggagtgcagtgacgtgatctcggctcactgcaacctctgccgcccgggttcacgcgattttcccgcctcagcctcccgagtagctgggattacaggcgcctgccactgcgcccggctagtttttatatttttagtagagacggggtttcaccatcttggccaggctgttcttgaactcctgacctcgtgatccacccacttcggcctcccaaagtgctgggattacaggcatgaaccaccgcacctggcctttttttttatgtttagtgacagggtttcactgtgtgacccaggctggagtgtagtggtgaaattatagctcactgcagcctcaaactcccgggcttaaacgatcctcccatctgtctcctgagcagctgagactaccggtgcacgtcaccacgcccagctaatttttatatttttggtagagatagtgtcttgctgtgttgcccaggttggtctcaaactcccgggctcaattaatccacctgcctcagcttcccacagtgctaggattataggcatgagccaccatgcccggccaatgttttctttaagatcagaatcttcttaatactaaacaaacttaactttctcgtccccctgagcgatcctgtttctgctgcccaccccaggccagacctggcagcgcctgatccatggcagtcaggttcatcccagggctcggagccctgcagtcccgtcccggggccctgcctgacgtaggcgcccagccaacacctgcaacgacctgttgcccccaccccaggaaacaatcccggcttgggacagacaccaggggctgtgactgtgggtggctccttggagaaggtggccttgggcctcggcctttccacctggggtgcgcttggctcccccagactcagacacgcaggatccttgtgattgggcctagacacgagccctgcagtccctgtgggcgctggaggcgactcccccacgaagccctccctcccccagggcctggcggccctcgccggcggtgagctcatctcggggggcggcgtcgcccggcggcgggtcgctggagctcacggcgtgcccccgcacccccgccccccacgcacccgtcccgggctcctgggcaattttaccaattaaggctttctcgccgggccgggccgggcgcggggcgggcgcggggcgggggtgcggccaacaagaaggcgggcggcggcggcccattcgcgtggaggcgcgtcgcgcgcagcggacgccgacagaatccccgaggcgcctggcgcgggcgcgggcgcgaaggcgatccgggcgccaccccgcggtcatcggtcaccggtcgctctcaggaacagcaggtgaggtctccgcggcccggcttcgcgccgtagggtcgccgcgctcctcgtcggccgggggcggggttggagaaggcgggcagagaggccggaaaacgcaggcgccagctcgcgcccaggtccgggccaggttcagctgggatgcgtgagccgatggaggctcccctggcatctgggagtgagtgtccagagaatagcttccctagttgacccacgagccatgtctgtgcccacgaatgtgggagcctgaggccatggggggtccccgagagagagagggtgtctgggcacttgcccatgaacggaccactgcatgcctgagagagaagggccctgacaccaggaacttgtgtggactcagggcgagtggccacctggaaggacacttctcagccagtgtgcccactgggagggggacagcgtgtcccttgctggctcgagtccacagggcaccagctgctttgggcacaggggagctggttctggggctgctctactccatgggggccatggtgaggatgagaccaggccaggttccttggttgggccctgggccctatgccaggttggctctgagttggatgcgcactgccagccaggatataaccaacaatgtccccagattcccgtgccacctggggccaggcaaaataggttaaaatccactggcagacccatttgtaagtgctccgagtgcaccgtcaaggtgggagcttgggaatgggcgacctcacctgccgcacctggacttgccagcacaggtctcttctcaccttgccagtctgcggcttccttccctcctgcgccccctggctacgcaggcctggaaacagctccttagggatcccagctgaacagctcctgggcttgggctatacctcccagtgggagggtctggcctggggtctgagggccaggggtggtgtggtggg

SEQ ID NO: 12678 - DNA, 6000 bp, Homo sapiens
ggacagggacaggtgggtgagggtatctgtgcctggagaagtgacatgtagtgttcctgacttgcagtcctgggcttgtctgagtggtaacaaagggcgtgaggtgcgcgcagggcaaaaggcaacaaggaggggcaaggcgagctcaacctctgaaagcatcaaggctggcagcagggcctcggtggccccggcagcagaagtgggcggcgggctggctgagttgggccctcgtgagctcagcacccagcggtatgggggacaggcccctggcctggatcctcttggagccctgggtctcacctgactctgagtagccagtggcagtgatgatggggacagccaccatgagcaggcccgaggcgctccacacatacttcatgaggaactgctccagcataacataccacaggcgttccagaaggatgaggttgatctgcgaggccaggtcctggtaggagcgctgtagcagggccagctccacctgcggggggtgacagacacagagaggcttcctggccatgcacaggggcagctcccgtgggggcgatggtcagggtctcccagtgccactcacacacgctgtgccatggtggccatcagaaggccgagagccagaggttacgattgggtggggccaggtctcaaactcaaggtgtaagggggtataagggactggctgatgtcacagtgcggctcccgtcccctctccactccctctctagtcaccttgtttctgtcctctgctgagcccatttctttgggctccctgccagccccctcctcctggctcggagagatcatccatcagctctaatttccccccctaaactaagcaaagagcagcgcaggacagcaaaaggcagtgctcttgggctgagtgcagtagctcacacctgcaatcccagcactttgagaggctgaggtgggaggattgcctgagcccaggagttggagaccagcctggccaacacggcgagatgctgtctctaccaaaaataattaaaaaaaaaaattagccaggtgtggtggcacacacctgtagtcccagctactcgggaggctgaggtgggaggatcgcgggagccctggagtttgaagctgcagtgatggcgccactgcaccccagcctgggcagcacagtgaaaccctgtctcttggttctgaaaaactcggttcaacagtctgggcctatttacgccctctttcccctcaactttcccacacttccttttggtgagaaatttgcatggcattttcccactgaaaccaggaggatgcgctcctgagctgggccctacaggactcgccccagtggatgtccccactgctgagcctggaccttgctccctcagcagtgggtaggcctcccctgtccttctgtcccccttcctgcactggccaccactatgtcaggacaccagcaggtggggaaagggacagccgcagggaagaggtggcagcagcagtcagacaggcgggggagatgggaggtgttgggaagtgctcccagcaaggtagccaaggggttgtgaatttctgggctcagtccaggggcacgcaccccagccttgcctccccacagccgtctgatgacagctgcctagcctgccactgtttgccaagtgctttcacgtctctgcatttgattctccccacatcccactgcatgtgtattcacgtgcccactgtacacagaacactgaagcccagggaggcaaagtgacctgcccaagcccatacagcctgatggtggcaaccagtgtgggaatttggaccacactggcagagctgccagaagaaccacattcttgtaaatgatgcttagacttatcaagagagctttactttgttctcaaacaagagatcgtgtgcatgtgcgtttcaataagcctcctcgcggcaatcccagaaaggacagaatactctgctatgtgccctccagccagtcagctgcttctgccctgatctgagcctaggccagtgtccacggggacatcagccagtgggactgccatgggccacatgctacccgagggtcctctcaccccacacagctttccagccgaggcctatgcagacaggccgtgaatgcacaccgggccctcctgccctggccaacaaaccctcttggccaacgtgctacttcctgaagctagcccttcaaagaaccagtaatctctctacttcctgaagctagcccggacgaaggccttcaaagaaccagtgatctctcttctgcccccgccacccaggtcggcctgcacagctgagctccctgcaagcccgatctcccattcctgaagcaagcaccctggcaatccagactcgtgctgggagctggcaggggtgccagccaaggctgacaatgtagctgcggggaatgtgccaagcgcctcgcccaaggctgcagctgcttgccaaggccctgcagcccagcatgcgggagaagaggagagggaagccagggtggtggctgaagtccaggggccttttctctgaatctgcagtctggcccacacccgggatgcccctctccgtggaattcggggacaagcctgcttctctgctggtgcacagccagtgagacaaggtcccagggcaagaggccacctgacccagggagcacacacaggccttcgggggatggatgccattgtgcccctcctcccaagaagcactggggaaccgaaactgagtcgcagagagcagggcccaaggcagctgcaaccccaggcacgaggaaggggaggggctgaggcgagataaagggagcattgacctggagtaacctttcccagcgcctgtctggcccgccggccccggcccaccagggagccaggagacagacagggttggaaggacagccacgccaggagcaggaagtgtgtcccgccgcagtggcggcctgggcccggcatctctggtctgggggcccgggaaggcagctgagccagttggtagccaggcaggcctgtgggctcaggcgggggtggccttgaccccaagtcccactgctgtgctgggcgctgctcattaacctccgcttgggctgagtcatgcccataatgccggcctgcctggccagccagctctgctggacgccggccttcaaagggcccaagggcccaggaggggctaggcagcaggctgcgtccctcggtccccgctcatgaatggcaggcgtctcctcctggctggctgcaggagtggggcgggcaggagctctcgaggctcaaaccgctaggatcgcagctctaaggccaggacaacctccttgaggaggagaggaagcagaagtggcctcgagcgtgcaggcaaccagcacaggacagtccccacccagccttcctgcctctccactgccgcgcctgagtccacggctgcccaaaggccctgcccaccccagcccggctctcccatggcctgcccacacctttggcatcagccccggcccgccccagactgtccccaccgctcacggctgcctgcccccgggcctccctgccacacgcttccctccgtgcccggcaccccaacctgccccacctcatggcccccatagaaggcgatctcctccgagttggccaccacacgcgagtgcatgtagcgcagctcccccttccgccgcgcctcctctgccaccagctccccgaacttgggcgagaaggcccgcagcacgttggccgtgaggaacaccacgaggccggcgatggccgagggccaggctgtgccggctccacgggagcgggccgcccgaagcagggtgtaggaagtcacagccacgtccaggagtggcttggtcaggttggagtagaggtgggccacagaggccgcaaaggccaccacgtcctccgtcagagactggtcagggttgcgaagccgcccgtccatgttgctgacccggtagtaggtctgctgggagaagtagaggcggtaggcgtgggccaccagacggctgcggaacgacagggccagttggccctccaggtaacggatggcactgttgacgaaggtagcagggagggcgatgaggagccactgcagcagctgccagccaaaagcccgcgggtccttgcggacgatgcagcgggccagccttccgtccaggcgggccacatacaccgacaggaaggtgcggctcaccaaggcggccgagtgcagggccagcagccccgtctcccggcacaggacccgggggaacagcagccgcaggagccacaggagccgctgcaggaatacccggttcatgccagctttggccgccgcgaccccggaggcctcctgcgtgggctccccggcgggcgcctgaagacccctggccggggccaggcactggcgcaccaaggggtagactttgtgggctccataggccgcgagggccaggagcacggccgtgcgcttcagcgtgttcccccgccagggccggggcctggagagcaccggcatgtcacctgggctggctgccgcgtagggactggggctggtgcctggggcagcagttgaggcaggtggctggaaggattgttgctctgaccctgggcctgttgtctaggcaactggaaaccttgcgatggcccctgagactgtcgctttaggcccccggggtggtgctggggcccctggtgcggtgggctcagggccctccagggtcgcggcctcttcgggcagcccaagtggaggaacttggctctcctgtcctgtcagtgccctggcccctgaggtcagggccttgagaggtctcgggcagagggggcgtctcttcctctccaccttctcctcctcctcctcccccggtggcgcccctccccggggcaccaggcgcgtccgtccgctccgcagcctggctgaagcgacagtgactcctccaccggcccagaatccccacccactcttccccaggggcgagtcgggggaaggggaggaggcggaggaggggcgaggggcggagtccgggcgcgggagccccaccctgttctcgcccctcggcggggcccgcccacacccccacctcccgttctcgcccctcggcggggcccctcccgcaccacagagacgtgggacggccgcgcggactagagaagcggccctcgccggcccgacaaagccccgccccgccccgcccgcgtgctcgctccaccccgccctgctcgcccggagcccgaggcgcctcttcctctcccgctcggagcgccggccctccgctccggggcggggtgggaagcggaggtgggcggagcctccggggcctcgcgagggctggtgggcggtgcccggcgggcgcttccggtttccggccgcggtatgaggggcggggccggggctgctgtgggagagttctgttgctgcggcggggcctgcacgttgactgtgggaaactcggtgagcgggctccgcgcgccgggctgggctccgggaccgcggaggctccccggcccatcgacgagggagagaggcgagcggcgcggggaggcccgggggccggggaatctcggggcccgcagcctacctgcgtgtgagaggcaggggcgaggggaaaccgggcggcgcctctagaagctggtctcgggggcggggcggggggcggtgaagccccacctggaggagcggccgggatgggcctccgggacggtgtgccaggccggggccaagtcggaggcccctcgctctgggtgggcgctggggcccgcgagggctactgtaaggacccctggcttctgaggatactgcgtctagaactttctccgtatggggccttgaggtgcttggtcgagacctgcctttgcgcttggtcccgaatcctgccctctaggagtcgctcttgcgggcctccagcccaccggaggcgaagcggccccgggcggaaggccgctggatcctcgagggaggtgccggtttctctccgcgggcgccgtggggacggtgggaggcgggggcgtcggcagcgcttggactaggtgcggccttgggcctgcctggtagcggggatttgggcccgca

SEQ ID NO: 12679 - DNA, 6000 bp, Homo sapiens
taagcactacataacacattgcatgctacataatacactgtaaccttctagcaggggtagatggccataactgagttatttttttcatcaatcaggaaaatgcttccttaatcaatgttctccaaaccctgaaaaacagtttaaaaaggagaatgtgacaagtctgttcccatcaaagatatgccatgtacttttatttccagtgtcattaaatggcattgttattaaaaagagtgcttccacatcccacatttctctaactgcaacaatacattggattaaattttataatcactaaagaataacctgtaatgatttctagttttcattttctgacagcagcatattgctttatatgaaacaaaccttccccgacccccaatcagaactaaagtcaagcaactctttaccacctggatcctttttttttttttttgagatggagtctcactcccgtcatgcaggctggagtgcagtgatgcgatcttgcctcactgcaacctgcatctcccaggttcaagcaattctccttcctcagcctcccaagtagctaggattaaaggcatgtgccaccatgcccagctgatttttgtatttttagtagagaaggggtttcgccatgttggccaagctggtctagaactcccgacctcaggggatccacctgcctcggcctcccaaagtgctaggattacaggtgtgagccactatgcctggcctccacctggatccttttacaaagcacctcagtgagtcagaggacaagaaggtaaaatctgttttaaaaaataacagccaacatgaggtagatactattattctcattccattttttttacaaatgaggaaatggaggctcagagaggttaaaagtcacctgcttaagtccataaggaattagcagagccagaattcagggaccccaactcccgaacccttctctgacaagcactacactatctattcaaaatacctactggatcttactaagttgacaaccaaatacttcagaagctataaattaaaagattacacctggcgtggtggctcacgcctgtaatcccagcactttgggaggccgaggtgggtggatcatgaggtcaggagttcaagatcagcctggccaagatggtgaaaccctgtctctactaaaagtacaaaaattacagcgcacctgtaatcccagctactcgtgaggctgaggcaggagaattgcttgaacctggtgggtggagcttgcagtgagccaagatcattccactgcactccggcctaggcgacagagcaagactccgtctcaaaaaaaaaaaaaaaaaaaaaaaaagactcatcagtgatgacacttcttctaggtattaaataacatagtccaggtatttggtttactattacaggaagaactgccttaagagaagttaaaactgtatcttccttggagccatctcttagaaatcctaattctgtctcacatgctaggtgattctgatggttattcttggaccatactttgagaaatatggctccagataagtagatatctattatcatgttcattggattagattctcaactacctctctactgagaggtgtatcacccaggttgagtccttataatattacttaatcactctgacccttgtctataaaatggaaatactatttacttaggtttgttgtgaggaataaatgaggaaggagaaaatattaaaaagtaaacatttttaaaagaagtatgagaatgaactactcctacaaaatataaaaacatactattagggccaggagtaggggctcacgcctgtaatcctaacactttgggaggttgaggtgggcggatcacttgaggtcaggagttaggaaaccagcctggccaacatggtgaaactccatctctaccaaaaagtacaaaaaaaaatttagctgggcatggtggcaggtgcctgtaatcccagctactcaggaggctgaggcacaagaatcgcttgaacccgggaggcgggggttgcagtgagccaagattgcaccactgcactccagactgagtgacagcgtgagaccttgtctcaaaaaacaaaaaaaaagacagaaaaacaaaaaatatactattaagttgagccttatgaaatgctactgcttggtcgtttttgacctacaaaaatggcaatgtcataattgaatcaaaatataaaattatagtaattctttaaatgaagtattgttgcaggaataggcagacctagagtatagaaaagcacatccgtgaaacaggcccatgtgtacatggaaatttagtttaccagagtggtattacaaataaaaataaattgggtgcttggtggttttttttttttttttttttgagacaggctctcattctctcgcccgggctggagtgcagtggtacgatcctagttcactggagcctcaaacccctgggctcaagctgtcctcctgcctcagccttctgagtagctaggactactaaactcttctataaatgggtaattgcgataactagctacctgttggaaaaaagtaaagttaatcctcctttcacattatactccaaaatgacctgtagatgtaaccaaataactaattttttaaagaaactaacaatattaggagaaattattttttaaaagtatttttatgagccaggtatagtggcacacctgcagtcccagctcctccgaaggctgaggcaagaagatcacttgagcctatgagtttgagggccagcctgggcaacacagcaagactgtctctattttattttttgaaagtatttttataatcttagatagaaaaggcctttgtacgggagacataaaaacctagaatccagaacaacaaaacatgatacattgaatatcaaaatttagaactacctgatgaaaaacatcataaagtaaaaaagacaaacagcagactgggaaaaatgtcatatataaaatagacaaaaaaattaaagtctagaatatataaagaaccatagctcaaaaagaaaaagacaatggaacaggcaaaggatataggcaacaatccacagaataagaaatatatgacagaagaaaaactaaaaaaaaaaaagaaatataaaagattaaatatgtaaaaagatgccaacctcactagtagataagaaaatgctagttatatattagcactgtatgacccttggcaaggcattaccagaacccacctcaaccctggcaaaaggctggcatcagagtggcatcttacctttgacacatagtaacgatcaactccagagatgcgcctatctctttccatcagactccagtgatacccaaaatgagcaacccttttttccttcaaataagagacaattattgttgcagtttataaaagtgagtgacccaattgatagatactacaatttttaaaagggacattccagagaaatggaatcatcgtttaaataaaaatgcaaattagtagtacaaagaacagaatctcctaaataaaatcagaccactaaactttaggattaagttggtacctgtgactttttacactattttaaccaacatgaattttttttcctttttttttaaaaaaaaaaaaaaagaaatatctagttgttgtcttttgggacactaagaaacaacagctgtagatcacacgtgaagaacaataacaaaatcaaaaagtaaataaatttatatcctgtactcttgagatgatgtgaaggactaggaagaggggaaaatgaatcctgatgtaaaaaaacaagatctcgcagtaaattcctaaaggcttgcaagagaaagtggggaataaaaaagtcaagggtggccggtcgcggcggctcacgcctgtaatcccagcactttgggagatcaaggcgggtggatcaaccgaggtcagaagttcgagaccagcctcgccaacatgatgaaaccccgcctctacaaaaaaaaaaaaaaagccaggcgtggtcccggctactcgggaggctgaagcaggaaaatttctttctttatttatttttttttgagacggagtttcgctcttgttgcccaggctggagtgcagtggcgcgatctcggctcatcgcaacctccgcctcctgggttcaagtgattctcctgcctcagcctcccgagtagctgggattacaggcatgcgccaccacgcccagctaattttgtatttttaggagagacggggtttctccatgttggtcaggctggtatcgaactcccgacctcaggtgatccgctcgcctcggtctcccaaagtgctgggattacaggcgtgatccaccgcgcccaaccaggagaatctcttgaacccagaaggcggaggttgcagtgagcgattctcaggcttgagccaccttttctaatctaccttcccggcccccgcgtcgctactctgccctaaggcccactctgatacacccagaaacgctgtttttcactagagcaggatgtagtttctatcgggcttcgtttcgcaagcctcggcttctaggcaaccggaagcaagtagagggccgacctcggagagagggttcgcaggctgacggtctccctgcccaccacccttttcggaaatcagcccgtggagtcggcccccgggccgaagccggcttaccttgcccccgttagtgaacctgtggatgtacgcagtagccagtcctggaatcaacaagcacacgcccatgacggagagtccggggagaatctcgaaccacatctctgccccgttacctaggccaaaaccctacttctgggtccttgaaaggtgacctggcttcgcctctcttcccagcaagccccgcggccgcccgcgagcggggcggtgccacgtacggctccggaagaagcgacggaatctgctagggcacaagagagacgggcgctcgggctctcgcagtcctcttccgtcagtgtcttttgcttcgactcccggcggagcgcgcaacgtggagtgacgtgcaggggccaagtgcaacccaggcagccacggctgtttcggagctcaggactctaaaatggcagagcagctttctccaggaaaggcggtggatcaggtgtgcaccttccttttcaaaaagcctgggcggaaaggggctgctggacgcagaaagcgcccggcctgcgacccagagcccggagaaagcggcagcagtagcgacgaaggctgcactgtggttcgaccggaaaagaagcgggtgacccacaatccaatgatacagaagacccgtgacagtggtaaacagaaggcggcttacggcgacttgagcagcgaagaggaagaggaaaatgagcccgagagtctcggcgtggtttataaatccacccgttcggcgaaacccgtgggaccagaggatatgggagcgacagctgtctatgagctggacacagagaaagagcgcgatgcacaagccatctttgagcgcagccagaagatccaggaggagctgaggggcaaggaggatgacaagatctatcggggaatcaacaattatcagaaatacatgaagcccaaggatacgtctatgggcaatgcctcttccgggatggtgaggaagggccccatccgagcgcccgagcatctacgtgccaccgtgcgctgggattaccagcccgacatctgtaaggactacaaagagactggcttctgcggcttcggagacagctgcaaattcctccatgaccgttcagattacaagcatgggtggcagatcgaacgtgagcttgatgagggtcgctatggtgtctatgaggatgaaaactatgaagtgggaagcgatgatgaggaaataccattcaagtgtttcatctgtcgccagagcttccaaaacccagttgtcaccaagtgcaggcattatttctgcgagagctgtgcactgcagcatttccgcaccaccccgcgctgctatgtctgtgaccagcagaccaatggcgtcttcaatccagcgaaagaattgattgctaaactagagaagcatcgagctacagga

SEQ ID NO: 12680 - DNA, 6000 bp, Homo sapiens
tcagttggctagccttgaataaaaaatttttaaaaagtgaccacaagaaaagttagctgttattcacattctcactacatatcatgatcccatggggtaagtgtctaggtctgtaaggttccaaaaggcccatgttctgaaccactcacctattagagatcatctaggccagtggtctgccaggggcttcggataatgctgcctgtcgctgctttcatgctacagagaaagcagcagcagcagaactgggtagtgtgacagagaccctacggcccacagaaccaaacatatttactacctggccctttatagaagcagtttgccaatgacctctggtgtaaatatttgaaggcctatgtgcaagataatcttggtgcattgtccaaaacttcattttcaaaaacaggcagtgggccatagtttgttgattcctgaggtggacgctgctattgtatcccccacgccctttcttttccaggctaaatatttctagtttctttacaggctgtctggttcactaaaatttctattcttgataatcctgtggccctctgaagtatatgcctgagcctcccgttaaaacacgattccaaactttagaccacaatttctgatgttgtctatcacaaaatgtagtgatgtcacatcaaccttgccctcacttctcaatggcattaaatttgctggcagtcacacgacagtgaaccaccctagtgactcgggcaggctggcaccctattgtacctgaagaagttccccaatcatgtaatgtgtctacaaagtttccccagaccaaagataccttaactaactctagctatggttcttacagaatttcccatctaccacctagtaactgtcccagaagaaaatattcatttggtatggcttattcccagtacaactatgctggctcctcataatcactctggtttttttcccaggcactccctgaaactacacttactaacacattctagattttcactgtagatagaatatctaacttctctgttttcaaaggacagaagaattcatcctagccatttgcaacttgtcttgggagtctgtataagcaaccctgcataaaaagctccagaaagaaaagatgagtgtggattaccagatttgaaggatctaggttctccttattctcagccgcagtgcccctaatgggacactccacgtactcataggcgcgttcctggtgggcaggcacagagtatgttttcttctcacaggttgggccagatggctctgtattcactggacagcctgaaataatcaagtataaaaatggtgtcaccatgaaggcaggacatctaactctctcaattggagcactaaagagctgaatttctgaccaatgattaccaccataggaaaagccaggtttcttctgtttaaatctatcaagaactgaactagctaacattccaaaatcctaaagatgagaaggttctaaaatttacatttcctttgaaagaaaaatgagtatacattctctaattgtgtcacacccccagcaaaaataagccaaaaaaccttggcagttgcaagagcatgtgttatctgtgccatggtttgagtaacctggctggatgagcagctggggagctgttagaggaacctaagaggggaccagccacatttcacagggtctccttgactttccattcactagttccagagaagcccagatccaatcaggacacagttgcaatccaggctttcattactgatgcattatctcaggtacaaggaaggggaggagaaaatgaacagaggagacatcacagaggctactgcaaaaaaatctgaatgccactctgctttgtctcaagactgaaacaaggcacaggaaaaccacgtggcctatggcctattcccatcagtcaatggcaagagtttaacaggaaaagacagacaataaagaaaatattccacaacccatacaggatcaagatgcccattacgagggaaggtctgagcctaatgagatgagcaatagcaagggctatgcccaaagacccaggatgctgatcccaattagtgagggactgggaaactggttcagagaatgagcaggcacttggagagctgagacacagaagacagctgctcatgtaatggaatcttggcctcaggcagcagcagcagcaactacagcaatacacatgaaaaagctgagtttgctttcacttccttccctgcacttctcctcccaagccctcatttcctggtgccctgtgccactgcccactttaggggtgaaggaagacttgctatgcctttcctctctaccactgaaagcaccaatcctttccaagtcatagatcccagctgggtgttacaaagaaaataacatttcaacttttcacgtcatataaccagtagccccttcgatctcctatagacacccacattctttattaatgtagtaagtctggcagctctccaagatatacagcaaatgaaataaaaccaaagtaagggttctagaatctccctgaggacactcagaacaggagcacacctgctttggctgatctgtctcaattcttcctgtacaaagaaaccccagaagaacactgcctgtccttgtccaaggtcacagaacttttgctggctttgccacttactatgtgacttggagcatcagttactccaagtcttagtttccttgactataaaatagggagaaaacttagcttatgaagtcgtaagaccacatagcttatgaagatgagaatgtaagctctatcaggcaaagctccattttgtatgatgttattctctcgtgcagaaacaaacaaaatccagcaatgcttggtacagaatgggcagtgacctctcagaataggctggctgactgaagaaatgaataacagcgcaaacattagtactcagtaagcacaccatgttgcttctgcccttcacgacttactgattcaagccacactttaatataaaaaatctaaagtagacatgaatgaattaaaaatgaaagacagcttttccattttcattttcttatctaaagaatggacagcaagcccgttaagtgatggcttacttttatatacgaaaatactgaaatggctatacgagcaaaagttatttattaagacagctagatctagactaaggtttctcaaccttggccctcttgatatttggggccagctgattctttgttggggggctgttctgtacattgtaggatgtttaggagcactcctgccctctattcactttcctctcagttgtgacaaccaaaaatgcctccagatattggcaaatgtcccctgtgggaaggggggattgcccccctccagttaagaaccactgatgtaggcacaagtaaactttgggaagttggggctggtttagagtactcactacgttctcatgtactacctcaatcatcatgacaggcctgtgaaacattattatatcttcatcttacagatgacagactgaggctaacagagttaacttgtttagagtcacaaacctcaataagacgcaaaataacgaccagacccagggtgcctgactcccatgcctaccagcctcagcagcatactacactgcctcttcctttagaggctttccagactttttttaagacacagtctcactctgtcacccaggctggagtgcagtggcacaatcttggctcactgcaaccttggcctcccaggcgatcctacccacctcaacctccaaagtcgctggtactacgggcacccaccagcacgtctggctaatgtttgtatttttttgtagagggaggtttttgccatgttgcccaggctggtctcgaagtcctgagctcaagcaatccacccacctcggcctcccaaagtgctgtcacaggcgtgaaccaccgcacccagccgtgaattatcttttgtttttattttctaggcaaagggccgattacctttcattttcccttcatgcatcgggcatcctgaaggtggggacgctgaagcatttgaggcctgaactgcaacagcaggagcagatggagacaaacccatggctggaaacagtgttgactgtaaacaattttaaatttccacctgccaaaacaaagagacagattaatgtctctggactcagactattctctcgttagtcctaatctggtcaacccttgttcctcctctttgtcatcccatgggcatctaccaggcagggtactaacttcgaaggacagctttaatatattgcccccttagggaaatactgtgaaacccaggccaacctctgggggcacgtatgtatctaaggcagtgaggattttgggactgaggtgaggcagtcgctgagaaaccacgtcacagccaggaggtacaggcctgaggcgggagtggggcgaggatttccgaggagtggtgacccgggtggaggaggggaggtccattgagcctagacttgacccccatccccagagccttagcgaggggctgggggtccgagaagggtgcggcgcatgaataggaattcgaagaaacgaagggacaccagaggtcgagaagctgccaagtgtcttccccacaccgtcccggcgcttgcccacctgctccagcccgtggtccccagaccaaaccggccgcggccagcctgcccttctgcacctaagccctcccccgggctgttccgggaggccggtaccgccttcagtcgccaacccgaacccagagcagcagtgacttcacgccgccgccgccgccgccgccgccttcctctcactcggtcaccgctgtggctgcggtcaccgccggcgttctcacgcacccctacttcctttttagaaggcgggacttccgggcacgcgggaggcgggctgaagagtaatattttccgtcaatcacggagagcgggttccgtcccctcctcgccccggcctgtaactgctgcgggggccgctttctgggcccgcccctccaggccaggagcctttttcaaaatgtggcggtggcagggaaggttgtctgctccagaggcttccctagagtgaagagctctactatgtatgctttatgcggcagaaggagtgctttggaggagtttttaaatttgttttttttttaaatcttatcggttttaattgtagcaatgattcaagaaacgttagtaggtgcccataacttcggtggtggagatccaaaagtgaacaagacagtgttctggctgctaaattcttcttaactgggtatgtgattttgaatgtctgtattttcatttacctccaacagaaatttagcattttcttccatcagggatgtaggcaataaatcctagtactattagctgtatgtggcactaatacacattacagataaattatgtcacatatggttgttgtgcctgtctcaaaatatcatccatccactactttgaaattaaggtaatttgatcttgttacttaaagtgttaataaagaaacatatatctttctatataactatagtggctctgtgaaatacgtccagatgtcccctggtgcagaaagtgttgggggctcacagctttcagctgagtctccaggaattgtcctctgcctaagagaattgcctcacacaaaatcacttcccctccttggggacgatctgcatcctatgagggtctctgcaagggcacataagtccaggcccctagccccaaaggggacaactcagaagggccatcccagcatcagaactgcctacaggatagcccaaggattccatttcaactatcacagctcaacttctctctttacccacaattcttttgtccctcccacaattccttttcactcccgcaattctgttttgttacccacagttctgtctcccacaattctcagttctttccacaatcttctgtctctcccacaattccttatttctcccacaatcccatgtcactcccaaaattctattccttcccacaattcatttttctgtcccacaattccttgtcttgctcacaattctcttgttt

SEQ ID NO: 12681 - DNA, 6000 bp, Homo sapiens
aactttcccattgaggtgagttgaaataaataactgagcccaagagtagtcaataaaatttcatttattcattaattcattcattcattaaggaaataagtatttagtgagtaaacctactataagcctgacattgtttgctagtctttaaagcacaggataacttactcctaggtgtgtttttccctcctcttctatagacctgaaaataaaacatacaaatcaggagaaatgaaggatcagtttacacagcattcaggtgatattatttaaccaaaagacaaatcatcccatccattcaaacacaattatataaagaggtacctaccttttgtcttcaaataattatatagtacacaatagagaatgtttttcttctcacgtgattgtgttgcgcatgctctgctacggtggttccaaacaccaataaatatacagttttgcataacgctccattttttcttcacaggacttactgctatgtaagtccagtagtgcagaggttggttacactgttgacattttgagcaaggcaattctttgttgtgaggggttgtctcatgtactgtaggatgtttagcagcatctgtggcctctacccacgaaaggccagtatcatcctcccctccagctatggccaaaaatgtctccagacattgccaaatatgggaggggggcaaaactgcccccttttgagaaccaccactttagagaaacacctcagagagagagtgtgattatagacaggagagaaagccagataaaacaataatctctctttcaaaagtgtagacttctggtttaacatatgctcaagtatgtcaacctttatgatgctactgctctaccaccattttaagttcaaatgccttctagttctaaatctaaattaaggtaatgaaagggaaaaattcctattaaaacaactcacgaacacaaaggaaataattctgtctaatctttcctccaccttccactttaaagaacaccaaggtcggctgggtgtggtggctcacgcctgtaatcccagcactttgggaggctgaggcgggcagatcacgaggtcaagggatcgagaccatcctggcccacatggtgaaaccccgtctctactaaaaatacaaaaattagccgggcgtggtggcacacacctgtagtcccagctactcggcaggctgaggcaggagaatcacttgaatccaggaggcggaggttgcagtgagctgaggtcacaccactgcactccagcctgggcaacacagcgagactctgcctcgaacaaacaaacaaacaaacaaacaagaccagtaaggtcatctttttgtaaactacctagcataatcccagaagttttgacaaatatttgagtacctactatgtgccagacatagttctaagtgctgaagaaagatttaccaactgcatttactgaactgagagataattcttataaacatttaacaggtaaatatttgtgaccttggttttggcaaaggattctcaaatatgacaccaaaagcataaacaaaaaaaaagaaaaaataggtaagctggacttcataaaaataaacttttgtacttcaaaggacaccatctaaagataacccacaaaataggagaaaacacttgtaaatcatgtatctgatgagggacttgtactcagaatatataaagggctcttactacttaatataaaaaaaccccacatcttaagatggtcaaaagatatgaataaatatttcttcaagaaagatacacaaatgaccaacaagcacataaaaaagacactcagcatcattacacatcagggaaattcataccagaaccacagtgagataccaccttcacacctactaaggctataataaaaaagtcaggcaataacaaatgttggcaaggatgtggagaaattggaatcctcatggtcaaagggaaggagtgctttgctttgtgaaacaggctggcagttcttcaaacaattaaacttagaattaccatgtgacctagcaattcaactcccaggtacatacccaatagaaatgaagacatgttcacacaaaaatctgtacatgaatgtttatagcaccattatccatgatagctaaatgacccaatcaactcaaatgtcccccaacagacaaatggataaacaaaatgtgctataatcattcaatggaatattattcaaccataaaaaggaatgaagtactgatatacactacaacatggatgaaccttgaagtaattatgctgagtgaaaaaaacagtcacaaaagggcaactattgtatgattacatttatatgaaatgcctgcaatatggaaatctctagagacagaaagtagtggttgcttagggctggcagggggtgggcatgagggtgggaagttgaaattggggggtaaacgggataacagctaaagaaacaggtttcttgtgaaatgatgcaatgttctaaaattgactggggtgatggttgcacatatctatgaatatactaaatatacagaaatatataccacttatatactaaaatatgtgctacttatactaaaactcactgaatcgtatactttaaataggtggcttttatggcatatgaatcatgcctcaataaggctacttaaaaataacgtcttgtttaaaatatcctcacacatccgaagagatcttattcttttggttgtaagtatgaaatgattacaacaaccaaagccagaactggctttggtatttaaactattgaaaatgttccaggttaacatttaagactatgaaaatcttgaaagtagaaaaaattaaaatgaaggcatcaaggaacttccggaggacataaaatgcagtgattgtttaagatgtattgggggcattaagtaattagattcataggggtggaatgtaagcaaggagagttaaagtgctcatatgaaaagcctcagcctggaagacccccttctttaccagcttgcagtgattctgaaagaacaatatttcttcatgtgcactgttaaccttatttttaaggaagataaaaatacctcccccctcccaatatgattcactccagtaacaaataggaagtcaagtaaatgataaagggccaaacaaaaagagatttaaggaaacacataaaaagctaaaccagttcccaggaatggctactgggaagtttcagcaatcagcatgtgttactgctttttacaggcagagcataagatgatatgatctgtgcatagctcacaattccactactgagacatttcaacctgtgtcgttgtcagtccaaataaagtccgtttctgtgtttgccttgtgcaatatgccagttaatctatcctagctcattgcagagctcctggtatgtgtggtctggggagtccataccttccctgacttgaagaaccaccaacgccagcgataaggaaatgtccgggtgcattaggaatatttttgatcctcaataaatctctgcttcttccttgaccattgcaaacagtccggtttgccatctagctgattctcggtacctcatacagcactgtgctccagtttcaaagcaaaaatagggctaatatatggtggtgggtgaggggcgggggtgaggggtgcaagaagaaaacaagcaaaggttgaactggcttttcctacagagcctcagatttcaaaatgactgccgtagaagctaaaatgacccagatttgggggacaaggggggaagagggtcgatattcattcccctgcggggtagctgtagcttgattatgggcgtaaggaactagggaagacggggtcaccgacatgaaaagagaaataacagggaatggtctttaagtaccacgcacctctctcagtgaatcactgcagtgtcagccctgcactgattccatgatttgccaaacaggatgaggtaaggcacaagcctggagccccctcctcctcctcctcctccccctcctcctcctcccccctcccccgcgcagaaaggcgcatccctccgcgaggtgcaccacgcagccccccgcggccctggctgaggggtgacgtcacccttctgcattgagcttcaaggaccggcggcagcactggatagatggggagtagagttggggcgctatctctatcaccaagtggaggggaccctctgccagggcgctgcggattgtgctcatgcagtgacagaaccaccagatagggagtgtaaggatgcagggaggtgggaaaggaatccaaagactcatctcttgggtcaccaagaaacctcaaagatgcccccggcttatgtaagaccctctccctttcgtgcgcctccacgcggtgacaacgcctgctccccatcgtgcgcttgggagacttcggtcgcccttgcccagccaggcaggcacggtgcttctggtgcctccctcccgcagccccgtggggtcaggaataactgggaatctgagattaaaccccacgctcccgtgtcctctcctagcccgccacaggttagctccaagaggcgccgcgaaccggctggtaggggaagggagagaaaggtgtacagcgaggaaaacagacgaataaacccgcaactttccccaggagctgaccctatcccgggagattataaaagaaactaatgcattaacattttttttttggaaggtcgacaacctgcagtcaccgacactccgcagccccttgcagcctgcgcggagcgaggtctagggttccagcagccccgacccgcaccctgccatcctgcagccccgacccagcaccccgcgcctgtctccttaaagaggggtcccagatttgatttttggtttgggttttcctccccacttcttttctcagagcatcatcatacggaccgatggacagcgactcggccaccggcccggcgtgggcacttacccagaagacgaaggagtagatgatgaggagggttttgagacaggttatcacaggtttggtctccattctcctcgatgccatactacagagctccggcggcggcggcggcggcggcaggcggcgggcgggcgcgcgggagggggaagaggcggggcggggcggggcggcgcggggcgggggcgcgtgccgcgagaggcctcgtgagcgcgcaggcgaggccgtgcgcgtgcgtgagcgcgcaccgcgcggggctcctactgaaaaagccgggccgggcagtgactgcgcatgcgggaaacgccgcccgcgttcgcaatactgcgcaggcttagacccccagcggaggagggaggcgaggccaggcgaggccaggcgaggcgacacggggcgcggcaggacagtggggagggaatgggagaatttagaggccgggtcagaggtcacgggaacctctcccagtccgccctggcatttagatttctgctttgtacacagttgggcgttacatttgcaggtatgcctgcacctggctatgggaagtttatgggtgccccgctgcccatcagtcacgtttctgcattttgacaccccccagggccttctcacatggaaatggccccgtagtcatgtccttggcaaccagcaggccttgtttgtgccaggaacagacaggtggccagagatacagctggagggatgggcaggaacgccggagctcagacagaccccaaatcctcgccaccacaggtatctgcaggctcctccatttttcagatttgtcttacattttgaaataataaaacgaaatgacaagaaaggtctgtatgaggcgtcattcttgctgcgcatacaatgtttaacagaatacagaaaaatgtttaatatgcctgagaatcatttgcagcgcgctaacaagtacagtccacctccctcctgtaaaggaaagctgcattgaggtcaaaaaataatgttcacaaccaatttggagttcctcaaaaagttgaacagagtttgcatatgatctagcaactccattcctgggtatttacccaagagaaatgaaaatatatgcccacacaaaaccatatacatgaatgtttatag

SEQ ID NO: 12682 - DNA, 6000 bp, Homo sapiens
actctgggatccttgggcattcatccatgccatgcagacctctctgtgaatagctcttatacatgccagtgtgtgggatattcctcaagaatgagctttacatgtacacatggagcacccgttctatcatttttaaagttgtggcttgacagacataatgctgcattcttagtacaaatctcatggcaaaatccactggatttgagccctaatcaagagatacagaaagtccaaacactgtcacatggattccaaataagggtttattgaaaataaacataaatgccctccattgactgggcttattagcatgaagcaaaaggcagatgctatttcctctttgtaaggttagttttgaggtcgtggccaatgtctggccctcttcataatctttaacagcactgcaatctcagcactatgtaactgtgccagctctaatcctctactctgaatggaattaaaaatggcttgaggccaggcgtggtgactcacatctgtaatctcagtactttgggaggccgaaatgggcagatcatgaggttaggagttcgagaccagcctggccaacatggtgaaaccccgtctctactaaaaatacaaaaattagcccggcatggtgagaggcgcctgtaatcccagttactcaaaaggctgaggcagaatcgcttgaaactggaagggggaggttgcagtgagccaagattgtgtcattgcactccagcctgggcgaaagagagaaactccatctcggccaggcacggtggctcacgcctgtaatcccagcactttgggaggccaaggcaggcagatcacaacgtcagatcaagatcatcctggctaacacggtgaaaccccgtctctactaaaaatacaaaaaatattagccgggcgtggtggcgggcacccgtagtcccagctactcgggaggctgaggcaggagaatggcgtgaacctgggaggcggaggttgcagtgagccgagatcgtgccactgcactccagcctgggcaacagagcaagactctgtctcaaaaaaaaaaaaaaaaaaaaaaagagaaactccatctcaaaagatagataataaataaataaattttaaaaaattgctctagctggccaggcacagtggctcacgcctataatcctagcactttgggaggccgaggtgggtggatcatgaggtcaagagatctagaccatcctggccaacatggtgaaactgtctctactaaaaatacaaaaattagccaggcttggtggtacacacctgtagtcccagctacttgggaggctgaagcaggagaatcgcttgaacccaggaggcggaggctgcagtgagccaagattgcaccattgcactccagcctggcaacagagcaagactcttgtctcaaaaaaaaaaaaaaaaaaaaaaaaaaaatggcttgagccaggtgaaaatgaaggcaactggatgaaattggtattgattctaaaagtttaaatgaggtgatattcatgcaacaaacgtaaccattttaaagtggataattcagctcatggctcatgattaataaccataggactagagaaggtgggttcacagtatttcttggagaaagctcattcagctatgatcatccataggcaatggaacaatgttttttggatgcactgggcctgaattcctttgctaatgtgttggaaatgtttgtgggtggcacaaccaagttattctgttaagcggactgctgacaattggttttaaaaagacagttcttcatctccggagatactgtagcatttattaaaaatgtagcattcactaaaaaggtagtatttattcgaatgtagcactcaaatatgcatttttatatgaaaatatactgcagacaaaatttattttagatatttttatttctccaaatttgttatttatcaggagtgactgaaataaaaaatacaattgagtcccatcatcatcatcatggaaatggctttaagagaaaactggtcagatgaatattattgcttcccattttcaaccagtaaatagttgccactgagaaactgacagccaggagtctgtcaagaatgctcaagatatgttatataatacaacatgcctgttcacagggggaaaaatcctaggaaataacttatgtgtacttcttgatttcatcatacaagacaagcacaaaagcaccacccatgcctctgagaacattggaccatgcacccttgaaaaaagctttgcctccttcatcacgagcaatcttccgccagcagtcaagcgtgcctgtgtacatgatgtcagctgcaaagaataaagacatggagttagtgactgaaggccgatgaaaaatcctaagattcactaggctaaataaagcagagccccacctctaagaacgtcagctttaaatccaacattcacacattagcatgggcaacactgaaatattaatgctatgaccacaggaatacagactacccattggtcttaacctctaacaccatttaagcaccctcattcataggcatctgaagggccagctcaaaggcagttgtggaacagacacagatgctatcaaccccatcccttgacttggacagacagccattttaaaggtatgtatcaccagtttgtggcagcagattgccccacgactacaactttatcttctgctcaagtggaacttacttcctttgcgccctgactgcatcatcatgcggcggcgaacagtgtcaaatggataggaagtcaacccggcaacagcagtgacagtctgtgcgatcatccagctgatgacgatgtgagtgttcttgggatccggaagcattcctgggaataggaaagagatgcttttaccaaaaagcagagttttactgacttcctttccccacatcccctaaacacgtcatctgtacacaagggttgcattggatgatcttggcttcctttagcaattaaaaaaacaactctttagctcttggactgttaggttggtacaatgctcttttaaactgtctcctaagaacacaacgttaaagcccacagcaaacttaccctttgcagtgtcatagataccgaagtaggcggctcggtagatgataataccctgcacagacacgttaaagccttggtacaggcccttaatcccatcagatttgtagatcttaaccaggcagtcaccgaggcctcggaattccctttcagctccagctttacccacatcagctgctagacgggtacgggcaaaatcaagagggtacacaaaacacagggatgtggcccctgcggcaccacccgatgccagattccctgcaaagtagagccaaaactgggttctcttgtccacaccacccaggaagatctgcttgtatttatctttgaaggcgaagttaagagcctgggtggggaagtatctgatgacattggccaggttaccgcgccagaaggacagaactccctgctccttgggaatacggaccacgcagtctataatgcctttgtattgcttatctgcagtgatctgcttgctggcatgctgcacctaacagacaggaaggaagccaacagggacagttataaccatggggaagggaaagagaagagcttatgccatctcgatcaatgccctttaaggtaggctcccctctctcaaatctagtcttcgtatatcatactggctggaccctcccaaccctctgaggctgtcacaggggaagaggtgatctgcaccagtagcattaagcctccacccctctgagtggagagggggcatcctccagcggacccgtgaccttcagacctaggagaaaggtcattacctcaaacccaggttcagaggcattagggcgagtcccacatagggcgcggtcaccttggggaccgcagcctacgcctcaagtctcctgagctgcttccgtctcgctccgcccccactccgctcccagaggtgacccgagcgccgccgccgccagccctacacgctagcccaggagcgccctctagagccggcactggagagcgcgcggcgcagggaggcaggcggagacgcggcggcagcggccgcggctgcgcgggggcggacgtaaaaggcacacgcgcttcccggcgccggcttccggcccggcgaggtttgagcgcgtccgcgggctgggaggccgctggacccgggcgcatggcctcccccgggcagttatctccttgccgcgaccttgaggtcttcggtaagaactggcgttcctctttctaacgccggctttcggccttcgcccttgacgcccaggcccggggaggccgtcactcagaaactgctccatccgagtccgccgcctcggagatgccgagagcctggtcctgccctctgcccccggccccttcctagactcactacttcaggtcactaaaggcgcctcccaccagtttgacttctgttctgcctctgcgccccgctctggcctctcctaagccgcttccctggccatgtctttagagttcgctccccgccacccctcgggcgcccgccttctgtgcgacccttccccccacttcctggttgggctcctggatcccaggacgtacctgcagcagcagcttgacccgctcgatgggcgctaccgccgtcttggagatggctgcggccactccacctgccaggaagtccttggcgaaggacacagcggcatctgtcatgttgaaagaggaggcagactgctgcaggacgggactgggccgggaaccggctttgactccggcgctgcggggcggagcgaagcaaatggccgatttatatagggggagccggagctggagcggcaggcgtcggaggcggggccggggcggggtctgggccccggcgcgctgggcggcagagccgctgagtggcccagctcgcaggaggaggagtcgtggagggcgggccgggactgctctccgcgccgcccgtgctcgccctcggcacctgacccggcgagaggaaggggcgggtccagagaacacccgggacttgaacgctggaccctgagagaggcctcggagaggggaggaagggtgaggtcacgatgtgcctggacaaaaacccttggagcaggaccaggactagggtgagacgcatttgctacagggatgccaaaagaacccttcagtcatcgagataaacagtagtcaatgcgatactttaaaaaagtcgtatgggcaaactacatcctactggccggcccccttgttttgtaaataaagtttaattggagtgtcaaggctgggtttagggtgaggcaagcgagacaaggtcatgcaagtgcaggttgggatcctgtctgtatttcaaatgttgatcatttgttcatcatggatttttgcattgcttctgatttttttaaaatagtacatgaaaaatcatttgtcttaattactgagttgtttttcaccaaggtgaatgcctcactcttcccactctagaccgtgtgctgtcctggagccagtgaaaccagacgaaattaagggaacagcagacgaaggaactgccaccgtgccccagaccctggtttgcaaatacagttcgacaaagatcttgccaggaattggcctgggagagtccaaaggactgggctgggggtggggaaatgattttagccagaagacaaatatagaggttgtacccagaaggttaagaggcttaggaaggttaagaactacgttaacatttggctcccaggaccccaggtaaagtgcccttggattgaatagatttctgaactccagaaacatttagaggaatcaatagaattagattggcagccattgtgccaatggacaagtgcttactgagccccttaatcccttcactgggtaagcatttgccacacatgtcctcaaaaacctacttgttagcttaagtggactccctcaagttcagaacaggagcaaatagtgtaatcacaagttccgtgtctgaataatcataacaatgtttataaaaataaggacgactgttgaaaactgcaactgcagctg

SEQ ID NO: 12683 - DNA, 6000 bp, Homo sapiens
agaaccacccccatccccagcaatcctggtgttcattcacttctttcccaagcttgttcctctgacagctaggacccatcaccaggccccagacaaccttattcatgtccctaattcacatcttcattctcccttcctgctcatccatcccatagacatttactagagcccacttgctgtgggcctccaagtcctagggcttccaagtccctgaagcaggctctgcccctcatcctaaggaggggccccataggcagttcaaggagtccacacataggcatttcaaaacgggctttaaatactcatcagggtgccacacaaaggagctggggtgagaacttcgtacatgtgagtgtggggctggggtgccctgagagagaaaaaggggacccatctgtcagggcagctggggtgccccacccccaccctgggactagggagcagagtagaaaccctctctggagggtcccagggctaactgggagccagccctcccttcgaggtagaccatcggggagggaaccgagaagtagctcccatggtggcagtggcttcctcagtggtactgctgatagctggggtagcctggggccggggtgccatccttagggggcagctggctggggtcctccaggaatgggggcgctggagaagggagacttgggtaaggatgagtggaagaggccaggtggagtatttcccactcccccgaccaccagttactcaccatttcggaactgctgggctgtgtagcgagtgaggaggatgccaacgccctcaatgagggccaacaggatgccccccatcattgctgagcccaccatggccagtgggccacctgggggagttggaggcagagaaacagaggtgagagcaggcagaacagggtggaaggggctggggccagggccaggggtcactcactgcgggcagccagcacagccccggtcaatgctccactggtgatagagttccagggatcctccttgccccgaagccgcaccaggccacagtcaatggtggagaacaggcccccccacactgcgaagctacctgtagtggaaccgaggcctaattagttcctgggaaatcctgagaattcacatctcaggggacttccaaggcctgaatgctttggccaagaacagggagaaaaacccagacacaaaggcagatagcaaacccacacagagtatttcctatctgtccccatcctgtggtagctcccacttcaagccgtctataatcaccatcaacattcccttcatctttatggggagttgacaaatgtttacaagcagatttatcttcatatggcttttaacagagcaactttgagcttcataatcaccacacagagttggaattctgatttgggtttcagtgagaaggaaataggttaggaaacccagttaatatgatagttaaaatgtttactgagggcttactgtgtgccaggacctgttcgaggtgctctgttatttgacttctgcaattttaaattagttaatgttattaaagtgtttagcatagcaaccagcacttagtagtatgtaaattacataaactataaaactaccgatgaaatggttactgttatcaccacccccacggtacaagtgaggttcagagaggttaagccactagcccaaggtcacatggcagggaacagtcaggacctagatttaaactccagaacccactttcttcccctccatattcaattgttgggaaacatcacccccctagaaagtctctggcaggggctagaatctgaacccctaacttgcagcctagacccaaaggatcaaccactcccacctttgccaagacatctcctatatctatctccccaagtccctcacctccaatctggggggctcggatcctcacagcattggcactacctctcaaccggtgccgaattccctggggaaaggaaggaagggcgttagggcagggctgaagccactggcagacacgtttccaacttttaagagagggaagaagatgggagacctgttagaggtatgagctgtagagatgtggagaagtggccaagaactagtggcctggagagcgccccaacatgggtgttctcagagctaggttgagaagtgctaattcattcatacatttgttcattcattcattcagtgaatgattaacaagtacctactatatgtgccaagcaccatgccatatgcagggatacagccatgaacaaggtaggtctgctctctgccctctcagagctcacattaacggtgggagacacagatcttgagcaagagtagataaacaagggagcttcagacagcaatctgcactgtagaggaaatgccatgaagaaatatgactggggctgaggggtcaggaaaggcctcttgaaggagggggaatctgtgctgagaccttgaggatgacaaacttgggcaaagatccagggaggagagttccaggagtctaggggagggacggggctacatatataaattgcagagaccttggctaatagatggcatttaaagtcatggcatttgcgatcttctgggaggggaggtggtcagagaaaaagaattatgttaaaagaattctctcaacttcaaggctgtcttccgtctgccaattaaattcctgtcattttcctctatccgggtttctgagccagaatctgcctctaggtaaaatgcgcagtggctaacacctgtaatcccagcactttgggaggctgaggtgggtggatcacttgagttcaggaattagagaccagcctaagcaacacgttgaaaccccgtctctacaaataaataaatacatacataaataattagccgggcatggtggcgcagtcctgtggtcccagctacttgggaggctgaggtgggaggatcacttgagcctgggaggcggaggctgtagtgacccatgatcaggccactgcacgccagcctgggcaacagggcaagatgctgtctcaaaaaaaaaaaaaaaaaaaaaaacatggccaggcacagtggcacacgcctgtaatcccagcactttgggaggccgaggtaggtggatcacctgaggtccagagttcaaggccagcctggccaacatagtgaaaccccatttctactaaaattacaaaaattcgtcaggtctggtggcacatgcctgtagtcccagctacttgggaggctgagacaggagaattgcctgaacccaggaggcagaggttgcagtgagccaagagcgtgccactgcactctagcctgggcaacagagcaagactgtctcaaaaaaaaaaaaaactgtctggctttgcacatacatttaaaatttggtgatgactctttgaacgacacagcatttccacagaggagctccagttgggtggggtggagggtggaagacagaggccatgtttgcaatccctacaaaatcccagatacaggagccaggctcggcacatagtaggtgagtgggcaccagaatgaataagtgcacgtgactggcagctccaagcagttttcagagcagcctcccttgtgggcaagatagctaaccccacaccaacccagggaaggcctggactcacaacaggggcattgcggaaacccttgatggcctggaagactccgccaccgatgacacccatagtgaaggctccaccgcaatcatccacaattcgccatgggctgcaagcaggaagggaaggacggggttaatgtgagccctcccccaggtcctgtcacacgaactcttttctaactgggagaaaccaagtcaccagaatgggaagttcctaagtaggaacaaacacttcagataataatgagctagttctgtcacgctttttccacacacccccccattaaagcgagaaatggggcaaagggggagaaatattagtcttcgccctgtctaccaaccaaggaatcagccaacggttttactgtgatcaaagattaaatgaattggcacacgcagagttgacgtttcaataagcgacataggcgtgttaactagccaagacagactgtcagcaaagcaggaccgcgtcgcaccccttctccgacggtgagcccgtccaaccatgccccgccccttttcaatccggcacaactgggaaaaaccaagagcgaccgcgggaagcatccaccgtccccgccggccctcaacaggttcatccgtgccccgccccccactgacaaaggcgacctgggaaaaaccactggcggcaactctggggatttccggtcaacaccgtaccacccctagccgggatggatcgtccagcgtgtcttttttcgttaacagggctaggagattacgaagtcaggagaaacatggcgtggttcggccttcgccgcaccttctctggttgtggcccctcataacggagcccgaatgacaggaaccgagtgggggtagcgggagatacgttaagagtcccccgagtctggtacatggctctgtgcggccgatgcctcccccgcccgacccccacggctggccttggcgtcgcagcaatattccggatgcctgtgcccattgccgtaccagggctcccgagcgtactcctccatggcgctggcgtctggccgcgcagtcaggccacgcccccagcgtagacgcacaccggcgtcggagctttccgcctattaccgggcagcgattgggtcgctataccgcatgtcacgccaaggacgcactctcattggccaatcgagtttctgccatttgttcattgcctcctgagcgtagtccagttactttcaggctcggggagtgaaggcctcgttgagagaaggtctcattcggtgttttgggaagagagtcgtgtgggcccaggtatcgtagcggcgacacgagagagacgggcggtgtgacagccttccactacctgcacgagtgtattggtaacgttggggtgggtgcactcttttggagctggaggaagtgctgccctctgctcccccatcccagcgctttggtttctcccacccggcagtcatggggacgctggatgagcccatttctgaagtgcggaggggccgggcttcttaggctgtgggcggagcctgggcctgggagaggaacagggccctggagcacctggtttcggggacagtagggttggtgggagttgcgatgatattgccacctacctcttacatcttttagtgcgtatgttctgtccacccagctactggttcatttgagtagatcggagtcagatgagtacatgtttacgggaggcgcttggttacgggatccagataggaatctttatctgagctgcttgtcagtttgttcgtctgtccctaggtctgtctgctatcagctatgccgctgcccgttgcgctgcagacccgcttggccaagagaggcatcctcaaacatctggagcctggtgagacagctaaaagcagatggtcctaacacgtgccagcctcgacaggcacttttgttgttgatactgacgcttgatacctagcatgggccaactgtgcaccaagcaatggggtggcaggcatttttcgttgttaacaatgtggattcctgacatccatccctaccgcgtgtcaagtggagggggttgggggaatagatatttcattctttttttttttttttttttttttttttttttttgaggcagagtcttattgtgcacccaggctggagtgcagtggcgcgatctcggctcactaaaacctccgccttccaggttcaagcgattctcctgccttaacttcccgagtagttgggactacaggcacgccccgccccaccacacctggcaatttttttttttttttttttgagacagagtctcggtctgtcgcccaggctggagtgctgtggcgtgatctcgtctcactgcaacctccgcctcccgggctcaagcgattttcctgtctcagcctcccaagtagctgggattacaggcacgtgataccacacccggctgatttttgcatttttagtagagacgggtttcaccat

SEQ ID NO: 12684 - DNA, 6000 bp, Homo sapiens
ctgtggcttcagtcatcgattccctaatgccaagccctacctatgtgacataagaaaatacatatcaatacagaaaactccacatccacccatgaaaggttcacgactgcctttccatggggagtgactgtcctttattgcaaatagatgagtccccagaattgtttttccaaatgtctgcagtcttattaaacccataactctaggattcacgctgcctgcacagaaactggctccacagcctccagcacagagagccgcccccctctgccaagtggggtctggctggacagggtcttctgtcaggtggtccctggctggtcctgggagccagcatttccctgctccactgccagctgccccgagaagcaggcgggccaccctgggagtgaggaggccgaggaactgcaggccagctctctctgtggcccccacccaagggctagatgaggacgtgcatcctccctgattctactcaccgttgcctgtgaggacttccctgggtgccatcagaccagagctatggaagacaaacagagcgccagagtcctcaggcggcctggacctgcactgcccactacccttccccgaccccagcttctcctccccactagccccacgcaccaagcctgcacactcttacctcagtgccccctcctggaagcccatcccaccccgaggcttctcagtcacactcaagtcctggccacctgctctgtgacaagggcctggctaggtgagaaggctccccacccgcagggctcacatctgcctcatctctggaggcccagctcagtgctaggcaccaactcctgagtcacagaagaggccctcccctcctcttctggccacacagggcaccttctggaagggctgtgagggggtggggagtactggcatctttagccaaacggtgccaccacatgccatagcccagggccttgctgctctctgggccccgaggctggtggctgggccatgcgggcagtacctggctgtgtagggcaggcgaatgagcagcagagcagggaggctggcattgagcttcagctcccgcagggtggccaggtccacatgcaaggggctggccccgagcttctcctgcaggtaagtggtcagagtgctgactgcataccagtcgacggcaggaagcaccagtgaggagggggccaggtccagggcattctggggacaggggagaggcaaaaggtgagttagccaggggccagtgggcctggcccagccccccacacctctctggcagctctcctctggcaagccatacccataaaggctcaccaagaaaatggcccacaccccagcccctgacattcaggccccaggcctttctaccccaaagccagcgtctctgctccctaagagtatgaggtggcttttgttgttgttgttgtttttgggggggatggttgacccagaagagactcagacccaagtaaccctgatatgaggtcagagtacagttcttatgctgggagaaggagcacagaatgtcccccatggcccctggctgggagaggactctcacctctaggttagaaaaggcgctgtcctgcttgtttccaaacacaccgccatatgctgtgaaatcctcaatgctcagctattagggaaataggggagacatctgaggaggtttggcaagtgatgggggccaaggcaggggacagccaccttccccgtgcattctcagggccagcaaagtctcactgagagtcaggttcagtatggtggagcgcaactgtgtgttggtgggggtggggtgggagactcacctcttccctccagcactctcagggcagggtgagaagacatggaaggcagtcatggggtggggagatctgcaggcagctgacttgtggtaactcaggagtaggagtcagccgccttgcccaccctacagacaagaggaactggggagggaacagggaagctgcggggagggggtggggcagccaagagcatttgtggcaggcctcccagccagagaaaaggagagtcggctatgtccagtctggacgggaccctccccccacctgcttttggcggaaggggagaggtgaggatctcagaacatgctggaggaagcatcgagcattgaagtcttttgagctcttaggaccacagtggccccgaccccatccctttttctccacaacctacagatgtcctttgtccttttgctcctaccctccactcccatccccagcttcctctggcccttcccagttaggccctgaggagattttaatcagcttccctaacctgtttggtatacacactcgcccagcctcccctcccttgtgggcaggaccttgctgctgtttggccaccggggttctcagtcggaaagcccaggaactgctggtgggtcctgtgggctttctttaattgagaaatcacaccactccctgctccacgttacccaaggctttctcacacatttcgaactgcaactgaccttccccctcatggcctacaaggtcctacttcatcgcctagccacctgcaaaccatctcctacatctcctacccctttctctcactcactgtgctccagccacaccagctcttccttgagctggccaagagcacacctcgcccaggaccctcgaatttgctgttccaggaatgtccttccccaaacggctccctccctccattaagatcgctgctcatatatcacctcctcaatgaggcctggcctgaccacccttatctaaaatagcatcccagtcactctgtccccttagcctgcttccttccctaaaggccgtaacactgacatcatatcctataccgacttagtatttactggccaccctcacaagaatgtcagcttcctgagggtgggggcttgggttcttctgctcactgccatatccccaacacttcacaatacctggcacatagtaggctttccatattgggcaaatgaatgaatgggtgaatgccctaagactgggggatcctggctagatgttttatgtggattataagaattccccctcacaggccgggcgcggtggctcacgcctgtaatcccagcagtttgggaggctgaggtgggtggatcacgaggtcaggagttcaagaccagcctggccaacatggtgaaaccccatctctactaaaaatacaaaaaaatacaaaaattagctgggtgtagtggcgggcgccctgtaatcctagctactcgggaggctgaggcagagaactgcttgaacccgggaggcggagggtgcagtgagctgagctgacattgcaccactgcattccagcctgggcaacagagcgagactccgtctcaaaaaaaaaaaaaaaaaagatttcccactcacagccctctgatataggtggtgtcttcattttacagatgtagaaactgtcattcacaaagattatttcatgcctccaatggctggttacatggtagaactaggactcagttcctatttgactatattatttaccacctcctgaaaagacttcaggccaccaccatctgcccacacagcaaccaagggagactacaagggcaatgagccatacaggccaccaacaagggagggcctagcagagacttgctatcttagagtcatctcatggtctccacgcctgcttttggggcaaagatcctggatgggaaggaaaacagcatgcgggttatgagctccaattgggagggaggattggcagactcaggctggaaccaaagtggtatctatcaactgtagtgaaacattgtatctcgacaaaccttactttccttggcagtgaaaccaagataatgacatcagtgtagcaagtgcctacaaagcactaaacaggtgagcattttccaattatcattattatgatcatcacagctagaattacaactctgccacccattagctgtatgagcttggacaagtcacttaacctccagcctcagtcttctcatctataaacaaacagggacgataatccccacccaccatattggactaagtcagatatccaaagtgcttggtactcagtaggtacctggcctctggtccgtcgcttcctccaatcaagttggtgccatttccgaggctgtcgccatgcccactgaagcgtttactacaggccttcccatgagacgacccacacctccctacagttgggacaaggtcactgaagcttcccttggggaatgggcgtcagtgtcatggggggagggggcctggctgcctcccgatgaccgggggagagtgggctggggcgggcgcaccttgtcctgcaggaacagcagcacattcctgggacccagctccagggcgggatctaagtaggtagagagctgcaagtcgctggtgatgtggccttcatgagtgtcggccgcaggagcccacaagtccctggcagggcacagaagaggtgctgtcagacgggggcgcatgtggactggagctctgtcgccggcagattcgctgcgagcccccgagcaaggaacagtccacctccgggcctcaccacccctcgcctaggacagcgccggagtcgggcgagggcgcctcagccgccacagcgcatcccaccccggcccgctcaccggtcactcgaccacagcaccagcgggacctgctgctccgccgctgccgccgccgccgccgccgccaacgacaaaaacaccggcagccacggcatgcgccagagcgcctgggcgcatcgcggccccatccgcactcgagccgtcgccatggccgccatcatagcctcagcctccactgcctcagcggcctcgacagccgcagatcaggtgaccgttgcccccgcccgagccccgcctcgcacctccattggccccagcgcgggccgaccggcagggccgcaggtaattggaccaagtgcatgccactcgcggccactccttctcactggttggctgtacgtgtctccaggcgctcacgctccgagtgggaaaggggatggggcccagctagaccgactaggacgagacaagagggacagggaggcttcgcggaaccctacgcccacccgacgcgttcgcccgtccgtttttatttttatttttattttggtttttttgttgttgttctcttcttttgtcttttttttttctttagagacggggtctagctatgttggccaggctggtctcgagtccccgggctcaagcgatcctcccgcctcagcctccggaaaagtgggactacaggcgcgcatcgccgcacccggccaatccctgttttaatccttttccttaaaattgcaaaagtggtgtctttttcctgcagatggaccctccctgatacaggtgagaggagactgtaatcccttagaacgaggagtgaagcgggctcaggatagcatctaggggaacacccagcacttacattgggcaggaggagaagggtccagaaaagagatcggacaaggagcaatcaaagaggaaggagaaaacccagagcgaagcgtggcatcaaagacaccctaacgggccgggcgctgtggctcacgcctgtaatcccagcactttgggagcccgaggcgggcgaatcatgaggtcaagagatcgagaccatcctgcacaacatggtgaaaccccatctctactgaaaatacaaaaattagctgggcatggtggtgcacacctgtagtcccagttacacgggaggctgaggcaggagaatcacttgaacccgcgaggcggaggttgcagtgggccgagatcgcgccactgcactccatcctgggcgacagagtgagagtccatctcaaaaaaaaaaaaaaaaaaaagattgtagtcatgattgtcacatgtgattcagactaggactaggatagtggcagttgagctggagagaggaagtgggtctgacaatacagtcaaagaagattgtagcttttgggtctctctgagttggggactgggagacgaggtcacttgggggctcactgagtttcgggtgcttagggaaacccccaagtggc

SEQ ID NO: 12685 - DNA, 6000 bp, Homo sapiens
cttgggagaggtgtctctaggaggaagtgatgtacccctcacaggtggggttttgtttttttcttgagacaaggtctcacactctgtcacccgggctggagcacactgctgtgatcacgactcactgtatccttgacctctccaggtcaagtagctgaactacaggcgcatgccaccacacccagctaatttttctattttttctgtagagacagggtctcaccatgttgcccaggttggtctcagactcctgacttcaggtgatcctcccacctcggcctcccaaagtgtggggattacaggtgtgtgccaccacacctggccatgggtgtgtattttctcaatatcccatgaaggcacagcacacgggaagccaggtggcatggtcagggtgtggagtatggaggggccaagcccagacagctgcacgccgcatgggcagggtgggggcacttgctgtgcccgaaagcagtgcagggaaacccctctgcgtgcggaatgggcccggggcttccaacacaggagctgtgatgaagaccaggctggctgtttccccatggagcctgtggggccacctggggaggaggtggccaagcccactgccctcaccagaaccaggagagagtcactgggaaggtggatacagggttttgtggggaccagacggggggcttcattgggaggagggacgggagttctagaccaaagcccacccctttcctgcctggtgcctctgctggccaggcagacaagaggacgctgggcccccagctctcccagtcgggggaaggcacaataacgcaagccagcagccccaggtcctgtgcagtcccaggtcctgtgatgtttattgaaggaagcaagggcagggctggggtgccgccctcaggcctggatgtggctcttcgcactgaaggccaagtagtagatcacaaggccgatcgccgcagccagcacctcagtggacacccagggcccgttccaagtgccctgaaaaaaaggagatcacaagccagctcaggggagtacaggtgagcagaccagccagccctggtcaccttccgccaggggaaccaagacatgctggccaatcacggcccagcagcagagctggggctgtggagaggataaccttcactcagcccaacaaccccaaaaaggaggagggaccaggccactcacccgatggtccacgctgactgtaaacagaggcgggatgatggaaatgtcctcgttattcctctgagcctgcaagggaggtgcaagggaggtgctggggtcaggggtgcctggcgtgtgggggtggggaggggaggggaaagacaggtaggaacaccggcccaagccccagaaaaggaaaggagagaaatgggcaagagacactgaggaagggacaggatcacagaaaggccacccagctcaggacttgctgccagcacctcccaacccagcccatcctgctccccagggacaggggagcacagtgggctacaggagtcctcaccttcctgaggaggctgtaggactcctcgtcgaagaatctaacctcataggtgcctgcgtgggcgctcttgtggtccaggctccaggacacctgggttgggtgttgagcagagtgtgggcagagtggacacggaggggccaccctgaccaccagtgccgacactgcagcactccggcagccagagcccacggcccctggccctggttgaccggccacccctggggcttcaggtcacacccgggagcagggagccccctagcaagggaaccattggcccctcacctgataacgccccacatcctggcctcgagtgacagggaattgttttccaccgacgtcagcatagagagccatgttctgggtgagggaacaaaggcagggtcaccttctgccccctctgggtgtgggcagaggagccctgtgcgctgctcacacggcctgcaggtgggcaggctaggcccagttgggggctgcagtgtccctggcaggaggtaccaagtaacactcaccaatcccgtgactggccctctgcattggtcttccctacgggggcacaaggccagatccccatggccgggcctaactggacgcataggaaccctgttgactgtgagcaggggcgggatgatcaaaagggctgagtgatttcctgagtctacaagggaggtgctggggtcaggggtgcccagtgggctgcccaaggggtgctttaccctaagagggccatacccaaaaaaggccccatttccttctttggacttatgggaacttagctgggcatggtggcgagcacctgtcatcccagctacttaggagactgagaggagaatcgcttgaacccgggaggtggaggctgcagtgagccaagatcgtgccaatgcactccagctgaggcaacagagtgagaccctatctcaaaaaaacaaacaaaaaacaaaaacaaaaacaaaacacccacacagacaaactggccaatggcaaccggggtgggctgactcctggccctttctcccggtccagatactcattcaggaaacagcgggtggtgagcccagggttacctcgtgtaggcacagcacacaaagcaggtgaggaaggtgacctgtcaacactggctaggatctggcatcaccgtgccctgatctctccggcaccccaagagttggaatcttgattctccctctatcgacacaggtcccccatcaactagcagtgaggagcaccccccacccgccctcctgtctgaaaccccactgtctcacctggaccctgttcttgcatgtcagggagatctccacaatgaagacggtctcagtggaaatgacagcgtcagaagtggtgtagtaggaaggggtgatctggggctccaggcaggcctcggctgcggggaagagggagagatgcctgggtaaggccagctcgagtatcccggtctgagggcaggatggcccggccctgcctcatagcacggatcagctggggacccatgcgctcttcctgccccttccaggtgggatatgcgagacagatccaagtgctcggtcacaaatgcaatggcaacgtaggcgggatggctgtgaaggaaggctggggaggggcaaggccggctttctggaggtgtgcaggaagagcgaactggggacaggtgggggctggattcactggacaatacatgccaacacttggacctatgacacggaggcccgggggccacgccagcctcaattcagagccacaaacggcctggacgagttactgaaggcatcctcagcagagacatcgggggtgggggctgcaggcaggcaatgcactggggctttcaagatgagagaaagggtctctgcccccggccagttgacagaaggtgaagactggccccagcgtttcctgaagaagtaaacgggagagactctggttccagaagcacaacttgttagctgtgagagaaaggaccttgccttagccttctccataaccagaggcccaaaggaaaggaaggctgccgcctacatcagagggtgtgaaacaaaggctccccaaagtgggaatgttctcagccacccgctgtccaaatgtggtgccctggcagaacgatggcttcagcagaggacgtcagagaaggctctgggtctggaccacaggaggcagatccctaggaacagcgtggaggcagttctcaggggctagatcccgccagcccttctgtgtcctgcctaagttgggcctgcttcctgtggcgcaggggagcccccgaagggttttatggccaggcttgtcctctggatacgtccctgactatagttcagggaattcctgaggggcagatgaggagtgtgcggaaagggaggccagttaggctgccaaaacgttgcaggcagcaaggctactggcctgaaggacggcagaaaagggaatgtggagaaagccgcccctgtccagtcctggcccccgggcccggggctggctgctgcagccacctcctaaacacactctggagttcagacctcagcccctcacgaatgcaaatcgacgggacccctggtcggctctgccgaaaactctggtaagggtaaggcagggccctccggaaaagccagtcttcggcctggcactcaaggccctgcgcacctttggctccccatctaactcgccccgctcttgctccctctcctcactgaggtcccttcctagcttatgtggctcctccagccccgtttttggccgcgatcgctcagcgctacagagcttcgctccggtccgaccccgcagggagcgggagccgggacatgtgtcacgttccgtgctgcagcttgggggccgggcgcaccatggaggctcggggactcctcttcgtatgggcagacaaggaaaagcctggctgccggtaaacgtgcgcgaggtgctttggtccccccgtcccaaggccgcctgcctctcgggggaaggcccggcccgcagcgacggaccctgaaaggccggacccccgcatccctcctgcccccaacaccacctgccgtgggtcagaggctcgcaagaaagaagccccggctgggccgctacctgagcagcgggagaggctggacagcaggagcagcgccagggcgccgagagatgccatcgccgccatcgcctcttctctgcctagaggaaaagaaaacgagctcccatgaacacgaggggcaaacgaggaagagcgacgcgtaagtggcagcggcagccaatcgcgcaccgaacggctgggccggcattgtgacgtctctggcagcactgacgtggcccctccctgagccaggggcccagctggtcgcggtccccccctcaacatggcggcagcggtgctctaggcgccggaagggggcgtgaatcggtgcgaccgcgcgcgtgcgcagtaccgggtccgcgcctgtccccgaaacttcgcaccccgtcgaactctcgcgagagcggtatctgcgtgtcgggacgtgcggaggctctcactttccgtcatggcgctgaaggtagcgaccgtcgccggcagcgccgcgaaggcggtgctcgggccagcccttctctgccgtccctgggaggtgagcagggaaagagccacgggaccgcggcagcggtcgcaggggagcggtggggtagccgcacccgaagcagtctggagtccgattggctaggggccccaccaggggcggggaaagggcttcgcgccggggttgattggccgcctccgctgtcactgaggggattggccgaagttggccctggaccggctcccccagggggtctgcatcgggtggcggggggccctccggacgggccgggagagtgggccacggcggctgtcacctccttagtgtccttgaaggagcccttctgaggcagtcactcacgtatcccggcccgcctttctcaaaccgcttcgggaatccggttccgggactcaaatttctccacggtttcctctctcgtggaccgctttgccacctatcccggtggcaaagaaccggactttgccagtcatcccccatagtcccccagtcttagagccccagatgccttcccctcgaggcgcctggaatgggaaggagctagggtttctgaggctgcgggggttttgcttctgctcttctccgtgtgcggtcttgcgtattcaggtccgagtcttctttccttacacttatttaagaagaggttaatttaggtcctaggtgggctggaaaccatctgaagcagctgccagccagcacctggccctgatgggtaagaggtttgacctctaggccatgctcccacactgagccactgcgtggccttaggccatttcctcctctctctgggttctagtttcccctttggaacccagaggggaggagacttcatgttctcaaaggatcctgtcaactctgaccttccagaactccgtgactttgcggccactccccagggacatctctacttgccatgttttctccttctgacctctgggggagactgcttgtgcctaatga

SEQ ID NO: 12686 - DNA, 6000 bp, Homo sapiens
ttccccaaaactactatggtgcagaacagactgggatttctagatgccttgctgttggtggtgtgagccagatcagacacataaatgtgagcagctaaatttttgtcatgtttaattctgccttccatctgaatacgctagctatagacacatataatgttttcttagctagcaagataggattgtgtgtgtgagtgtgtgtgtgttagggggaggtggtggtcaagaaggtaagtcacaaagatatgacagcagcatataatataaacacgtatacatacatatggaatggaagtagagggctgtgatcttggtaaacttgactttagttacctctcgatttcttgggaagatctccacagaacttcagaaaatgtatttcgtatcagcaaacagtactgggttgtggttttgccactgttgttagctagtagtctgttttaggcaggtcatttctactctctagacttcaatttctctataggtgaaatgagaggattgacccctccaagatccccgcttgtttcttatcgttattttttctttccttttgctaaggcaaaaacctggggcaattgcattggccaccaccatccaagggccaactccagaattggtgacagaaaaccaaacctaagaaacttgcaaagttcccttcacccagcaaattgcaatttttcttagcccctatcagcttttataatttctttaaatcatctgtgctcactcagttgagcatgatgtacatgtttgtttataagaccacagttgagtcattcaggaatcattccttgctggcagtatggctctgctggtctcactggacaaagtttgaggggcccatcaacagaagaaaagcttcgtgagttttagaaaggatgacactgtggatatgtcagctactaggctctggacatgatggctggccttagcttatccctcatctgtgggatgaggaataacttctgcctagaatgaggctttatttctgtctataggctgcaaactttgtcatacctttccctgcaaacctggcaaatgactgggccagattaggccagtggcaccttgtggcacagagtactttggggagagagattctgcgccttatattcttcatcagttagcaggaggcatctgaacagcttagtatactaaggtgaaaacaggaacctttggcagaagtaaagcaggcagaaatgcttcaatctaccaccttcagtgatggagccatggcaaaaaataaattagaatattcgaaaacaggctacaggaaagcatcatgacacatttgaaatatccattcaataactaagcacctgaatggcttgcagattggaatttaatattgtaaggagagaaatgagacagcaacactgagaatgtactccaaggttcccaattccctggtactatggaattctatcattgtttacacagtgtttgcaagtcaaatacaggcaattttaagatgcttcacatatgagttgatttctggattaattccattcccagtcaaagcaaacacctggatagttttctttctgtttgtttcaaaacatcttcggttctctcatattcctctcatcttcctcccttctgcatctctaatttcctggcctagtcttctctaagtactgtggttctgcgtgccattccggttttagttgttagctatagaaagaacagaatcttaggattatagctcttgtggctgggaaggatggcagatatctggttcaggtctccatgttgagatgtacactgaagccaggtgaattagtatcagtgaagccgggggctacattggttctgaatccctgaacctgctcacatgcttatcccctgggtaaccatcaggacttacctcaacagccagatactcacatcaccaagaacagagcaaaacctacactgtaggcttcattcgtgctgatattttgagtttttccccaattatgatgctgccagttctttcctacctgtctgcaacccggtctttagtatatctatttgaaagtgtaattttaacctaagaaaatacttactatggttgctttaaaaagtaacagaatgggcaccttttcagatcctacttgagtaatcctcattctgctctctctcagcagtgaacattagaaagaattgcctgatgcaacataaacagtttcacttaatgcagaatccgtttctcttatttgctgagttggaaagaggcaattcattgcattttggtaacatagtaataaatagaaagtttaacagacgaacctgggtgctttggaagcacaaattcacctcctgctcccctctgttacaaaagcagagccaagattgtatggggttgattgaggtccttgaaaaactacatacacacacacacacacacacacacacacacacacacacacacacagattttctctctctccctatgtatattgtgaaagtttatgaaaacagcatcttccagggaccaaaatgtggattttaggtgacattcaattcttccttcgacctcacagagagagcttcagagactccttgaccctgtgggtttcttttatcccagactatatatttgctttgaaacgaacttcgtactatgtaaatatattaacatgccttttgatttagaataagcagattttaaagacatgatgaaaggtaccatgtgacatcatttatatctcagtttttaaagagtttatgggaaaggagacataatataaatcatcaataaaacatcaaaaaacctatgacaccaacaatagacaattatgaatgctgatatataaatctgtcattcttgttaaatgccatgaagataaatatatggcaatagaaaagtgggtctgggtgtgccatgtcaatgttgtaatcatttcacatttgaagccaagggttaacatgcacaatctctaaaaagagcattatcaattagtctatgtctctcctactcttataataaactcgggtaaagttcagaggttctatctttcaggctggtttccccgcttcaggcttttcctgagggagtaataaccttgctaaacacttaaccatcaccaggtacatgactgcgatccaaagagcccaggttgtaatagggaaaaagcccttctagtctcattctaagagaccatggagaaagatcagcatctgtgaattcagctcagtacctgcatatgtgggacatgatcatgaccatttgtccgagtcgatgtgtgtctagggagggagggaggtgtccactttgaagcagagatctgactgatgcccctccatttgcatttcttggttcctttaaggaagacaggcaaacaaatctggccatttcttaagtttgaaggatacaagacaaagaaggtaaatggggaccctggttcctgaaccttcatgatccggctcctggctctctatttctgaaggtggcttttgacgaagggcaggtatccttggtccgagggccacactaatcgattttaaggaggcctgggagcaggttccccacggatcttaaaatctacccaagaatggagcaaatcattgtccagggataggacaaagctgtggttcaggaaaatattcccagtgaaaggatgtttttggtcatcgcaggcagcaccttgtcctatcaaccctggagcttctccccattgcatttcctcttccaaaacaatctgttgctggcctccctctgctccctaccaccctgagcccacagccagccagtcaatgcttctccgcctacagcagcccagcatcttcattcaacccgcacttcgctgccccttgcccctcagcagcactcaggcagtgaaatggaccgcaccggccgcctgtagacttaccctgagccaagtggttttttcggataaaatctgtgtcgtctggatgtccaccggccaggatgcgtggtgcggcgccttgccggactcctcttttgcggcgcgaaacagcagccgactgggacagcccggggcctctaggctgatgggtgggtgggcggatgagcacagggaaaggggcggggtgtaaagacgagcgcaagtactggctcctaccttggcttcccctttggatgctcagttattgccaaacttgcctgtaacagatcggccctcctcacctttcaccttcgccagtgccctgaaactctttgctctaccaatgtccctaccctgttctcccagctctctaacccaacctgagccccttcaagcgcacccactcccttcacgcagccagtcacacacaataagagctagggaagaaactgacacggggaaactgacaggggtagctgacactgtagtgtgaaggagagggagaaggagggaggaaggaagggatggagagagaggggagagagagagaaaaaaagagagagagccgcattcacactcttacacgcacactcaagctccagctgttaggtagcggctggcgggagcgctggctacccctccaaaacccttttctacactagaggtttctgtccccttctgctgccgtttctggaatatgctatacagagaaggggagagaaaagcaaagaggggtggggaggggaaaatcaaggaggcacgctccctttatcctccccacccctgtctccaaaaatgtccaaccctgagctcttccttttcccttctttctgcgcccggcttccctctgctcctgttctttattcctccctttggggtggctgcgagctgcggacaacccgtcgtggttgtgatgtggggtgtgtgtgtgtgtgtgtgtgtgtgagagagagagagagagagagagagagagagagagaaagagagagagagagagagagagagattgagacaaccgtggtaggcaaaagcacccctcacctcccccagcccccgggccgaagccactctcaatctcctggcggcggggcggggcgggggaggcggggaggcgagagggaaagagggaggacggggcaggcggcaggggcagcagctcctgccttctttgcagctccgcggccaggggtggaaggaagccgcagccgcagccccaagtcaacccccgctgccccgtcccaccgtctcatctctcccccctcggtacggaattttctgtctcgtttgtttgcttccccagacctccccctcccctgggtggtggcagagacgggaggggaggtgggaggctaagcgcgggtgcgggtagaggggacaggagtccctcggagcatatggctagcagagtctctctttgccccttggcctgaatatcccctgctttgggcagtgacctttgcccacccccgtcagcctgggctctgggccggtggtggcgaggctgctccggcgaccataggtcattcaggaggaaggggagttgaacctgggggagtaagggcggcgggcggctggtaggacagggagacagcggagcgctgagtcgccagggactgacctggggtcctatggggcaggcttggatccctgatagatctagattaatctagttggagctacctaattctcccatccgtgcccctctcacccatagggtcgatctcccaagatccagcctagattgatacagggagggaaagtgatattgtaggatgggggcggggggctaggttgcttagtggtatctgttgtggagggagaggggcggtgtcaccggacacttgggccactctttgatctttacgccttcctttcacatgaagcacctctccacttctttcaccttatagcctggcgctcagaatgtccaccctcttgagcccaactggaaggggctaaatagccccacccccaccacaagcctgagacttctacctgcaacctgcaggcgcataggtccactagctggcagcatttcatggcctggccgcacagccccaaatattggctttgtcttttatctcccttcctagcgctctcaggaaaggggcatgtgagtctctgcctttctggacgccgggctggtacctgaaaacctttccctacccat

SEQ ID NO: 12687 - DNA, 6000 bp, Homo sapiens
ttgaaccagggaggtggaggttgcagtgagtggagataataccattgcactccagcctaggcgacagagcgagactctgtctcaaaaaaataaaaataaaagaaagaaaaaaaaagaagtctgcaaattgttggtccccaggataaagctcagactcctaggctggctctgggaggccctggatacctgttcttagcatctacacctttgcagatataatcgtctctcagtatccatgaaggattggttccaggatctctttaataccaaaacccactgatgtccaagtcctttatataaaattatgtaatatttgcatataacctacacacatcctcctgtatactttaagtcatctcttgtttacttataatacctaatgtagtgtaaatgctatgtaaataattattatactgtattgtttttcatttgtatttatttttagagatagggtctcactacattgcccaggctggacttgaactcctgggatcaagcaatctgcctaccgcagcctcccaagtagctaggactacaggtgcatgctgccacacctgtctatatttgtattattttttattgctgcattatttttttccaactttttttttttttttgagacagggtctcactctgttgcccaggctgaagtgcaatggtgcgatctcggctcactgaaacttccacctcctaggttcaagcaattctcctgcctcagcctcctgaatagctgtgattgcaggtgtgccaccattcccggctaatttttgtatttttagtagagacagggttctgccatgttggccaggctggtctcgaactcctgatctaagttgatccacccgcctcagcctcccaaagtgctgggattacaggtgggagccaccacgcccggccatttttccaaatatacattttttaacttggattttttggatttttattgctcatttatttaagagcaagcattttctttctggtgaccagaagcagcagcaaataagcttttaagtgcttatgtcaattatccttttaattcttactgcttttagaaagagcacttcttgctggttttccttctacctttcatgccaccctttctcaatttttttttttttttttttgagacggagtctccctctgtcaccaggctgaagtacagtggcatgatctccactcactgcaacctccacctcccgggttcaagcgattctcctgcctcagcctcccgagtagctgggattacaggcgccaccaccacacccggctaattttttgtatttttagtagagacgagatttcaccatgttggtcaggctggtctcgaactcctgacctcgtgatccacccgcctcggcctcccaaagtgctgggattataggcgtgagccaccgcgcccagccctcaattttttgtttgttttgagacagggtctcactctgttgctcaggctggagtgcagtggcacaatcatggctcactgcagcctcgaactcctgggctcaagcgctcctcccttctcgccttccaagtagctggagctacgggcacgtgccaccacatccagtggctaaattttgtattttttgtagagagtctcactatgttgtccaggctgatctaaaactcctggtctcaactattcctccttccccagccttccaaaatgctgggattacaggtgttagccactgcacctggcccctgctttgcttttcttgatgacacctccttctgatgtgccatgtaatttacatatttgttgtctaactccccactataattaaactcaatgaaggcagagtttttttagacttgtattttgaaataacaatagattcgcaagaagttgcaaagaaagggactgagaggccctgtgtaccctttatctagttttccccagtgttagcatcttgcataactatagtacaatatcacaaccaggaaattcacgttggcacagtccacagagcttattcagatttcaccagttatacatatgccccttggggcaggggtgggcaggggggagttgtatagaattgttttttttgtttttttgtttttgttttttgagacagagtctcactctgtcacccaggctggggtgcagtgttgtgatctcggctcactgcaccctccacctcctgggttcaagcaattctctctgtctcagcctcctgagtagcttggactacaggcacgcaccagcatgcccggctaattttttttgtttgttttgagacagagtctcgctctgtcacccaggctggagtgcagtggcgcgatctcggctcactgcagcctccacctcccgggttcaagccattctcctgcctcagcctcctgagtagctgggattacaggcgcgcgccaccacacttggctaatttttgtatttttagtagggacggggtttcaccatgttggtcaggttgatctcgaactcctgacctcaggtgatccgcccgcctcagcctcccaaagtgctgggattacagacgtgagtcaccacacttggcaaattctatcacacgtgtagctttgtgtaattcccaccacaaaaaaatccagaaccataccatcgccacaagactccaagagggcagggatttttggtcagatttgtttgcttctgtacccccaacacgaagacccgaaccagacagagtaggttcccaaaatctgtgttgaaaaggcagtagagggtagtggtgacagcacagactctgaagcctggactacctgagtctgagtaccggctgtgcaacatagtagctgtgtgaccttgggtatacaacttaatctgtccctgttgcagttccctcttctgtaaaatgaggatgattaaccatacttaccttgtagtgttctggtgaagattcaaaaggtcactggtaaaacatggtaagctcacagtgaggcttgaattaatacatgcagctacatagtaactatcaagccccataagcagcagccactgttactttcatccttttgcattgcaacagaacagatagtgctaggagccataagaaaggtacaaataaactattacaacagtgttgaaggggtgatgatttccagctaaggggaagagacagcatttgaattcggccttagaaggtgactggtggtgtcatgagctaaattatgttcccccaaaattcatgtgttgaagctctaatccccaggacctcagaatgtgactttaggccgggcacggtagcgcactccagtaatcccagcactttgggaggccgaggcgggcggattacttgaggtcaggagttcgagaccggcttagccaacatggcgaaactccgtctctactaaaaatacaaaaattagctgggtgtggtagtgcgtgcctgtagtcccagctactcgggaggctgaggcatgagaatcacttgaacccgggaggcggaggttgcagtgagccaagattgtgccattgcactctagcctgggcaataaagggagactcagtcttgaaaaaaaaaaaaaggaaatatgtgctatagtaatacatgggcttcttaacatagttctatttgtgaacttataactaatgtaatttaaagggagtgtgtaaataatatatggagacatctgcatcaactgtaatgtaacatgaagccatctatggtttctattagtgaccaagtcacgagtactgctaatgccactgtggtctgttgcctacattcctaaataaagaaagcattacatttcattaaatttggtgaaaataaagttgtattttcccattcaagttcatgggatcctctgaattctatacatggactcttgtggactccaggttaaaaacccttgctgtaatccgttggtgtaaaaatgcttgaggtgactgcaaatatacatggaggtttttgcgtttatttatttactttttcttttttgagatggagttttgctcttgttgcccaggctggagtgcagtggcgcaatctcggctcgctgcaacctccgccttcagggttcaagagattctcttgtctcagcccccgcagtagctgagattacaggcgcccgccaccacgcctggttagtttttttgtatttttagtagggacggggtttcaccatgttggccaggctggtctcgaactcctcgtttcaagtaatccgcccgcctaggcctcccaaagtgctgggattacaagcgtgagccaccacgcccagcttatttttatgtttattttatttactcatcaaaaaggaaaggtttttgcttttaaatggggaaaaggatgaaaatggggaacactagcatcccaaacgcatgttattaattattgtacatcttgccaaaggcgggctacaatgtcaggctggacttctagcagccaaggaagaggttctgtccctaactttctgagttgaaaactttgattggcaaccttccgcctagtcgaaaacccctaggcttacataagcgtccacgtggtccaaccccctccaacttctccggcttcctccgacacgactgtcccttcccacacctcccagccaggccgaaatgactcgtaaccctctgggaaaatggcacttactctccgcctgccgagctccgacccggcgttccgagtccccggcgcccggaggtgacggtcgcttcccctgccctcccttagggttagtcccgcccaatcggctccttaatttttcggaggggcttctactttggcatttatcacgggctgtctgcctcacttacgaagcagggtgcccctagcacactgccgggcccctgggggaacgcacttagggaagcgaagcaaagctaactgcatttggcagaaaccagcgcgctttcccacggcgccacgggagcgcaccgctagacagagaaggcactagaagaggcggtcggtgcatagcgtcacctcctaaactccgcccatcggaagcgccttctaagctcgttcttccgccagcttccctcctcttcctttctccgccatcgtggtgtgttcttgactccgctgctcgccatggtaagtccatcggcccccatcggccccggggtggcttcccaaaacccgaggccgctgccaggaaatgcctgggccgcgcggagcgttgaggggcgggagccttttaaaggctttttcaagaaaatatccagttcggccactgttgtctttcgtggcctggagggaagctagtgagccagcgagcaacctggagagggacgggctgcgctgcggccgcggattcaagggggctctttctttgcccggccgctgccgagtcgggcagggattccggtttcccttcgcttgtagcgaactcgttctggaggcggggggtgggaggtggcagccacccccgaaatcgtggcctgactgtgggctgcccgtggcatgcgcaacgtggagggtaatcaggagggtattgtgggctactggttttcgaaaagggtttagcttggcgtggagaagcgaaccgcatttttagatcccaggacttttgtttagaggacgtttattcagagacttgagcgtcaccccgtggaagcgcctagaacaaggggtgttttgcgaacctgtgtgtcattctggccttcttagtaaatggcagcagcgaaccagtcactctttactgggaaatgtaaaatgttgatttctagatatggaggcgataagtactggtattttattacttgtcaagtaatttattacttgacaaaatttacaactgctactgtggatgggggacggggtgtaatctttgccttctttgtattggctcccattattatgcaagggtatgttcgtccaggttggccaggcattaaacctgcatccgtgccaattttgcaagattattctgtagatttgggggagtattggggttggccttagatgaaagccaaaagatgcaactagaaattgagacagtcatccttggaaaagtgacatttcatttatttttaaatttaaaagtttatttttttagccagtgaaattt

SEQ ID NO: 12688 - DNA, 6000 bp, Homo sapiens
aaaaaatgctgcagggccaagcacagtggctcacacctgtaatatcagcactttgggaggctgaggcaggaggatcacttgaccccaggagttcaagaacggcctgagcaacatagtgagaccttgtctctacaaaaaaaaattaaaaattagccaagcatggtggtgcgcacctgtagacctgtggtcccacctactccagaggctgaggtgggaggatcacttgggcccaagaggtggaggttgcaatgagccaagatcacgtggctgcactccagcctgggcagcagagtgagaccctatctcaaaaaagaaaaaaaaacttcagaagaataaattataccatttatataaatcttaaagacacacaaaacaatatattacaaatcatttatggccacatgtcagggcacttataaatacagattggaaaaatgtataccaactttggaaaagtatctctgggatgggaaggaaatgagattgggaaggggtataaggagatagctgtaatgttttagttctttaaaaagatcaacaccttaaagaaaatgtggcaaaattataacaattgttaaatctttggtagatacatggatgatggttcataagtctatttttctgtttgaaatatttcttaattttaaagaagtaatgttttagaatgacagaaaataagacaatatgtgtgctttgaaaatggagatgtgctaatatagactaattgtagcctttattctcccagccaacttaattggctcctttataaaaattgtttaaattataaattaatacacactcatataatcttcgaaaaaaatattcataaagtaacagtgtgagtgttactatggcacttgaacctatgtgaagctgctgtgattcatatattttttaaagtaaatcattttaaaaatgtctatacttagtaaaaaaataaattcaggctggtctgactacagtggtatttattaatacaactaattaatcacaaccagttacagaattctttgttccttctccactccctttgcttcacttgactgtcttaaaaaaaaaaaaaaaaaaaaaagaacattcatggctgggcccagtggctcacacctgcaatcccagcactttaggaggctgaggcaagtggattgcttgagcccaggagtttgagaccagcatggggaacgtggtgaagcccagtccctaccaaaaaagaaaaaaaaaaaaattagccaggtatggtagcatgtgcctacagtcccagctacttgtagccccagaggtcgaggctgcagtgagctgtgatcataccactgcactccagctgggccgacagagcagaccgtctcaaaaaaaaaaaaaaaaaaagtacattcaacctaactcatatgtataaaggacaccaggactgatcactgcctgctctagcacatagaaatcttgattgtcaaattcatacatccaagaggggcaaaaactcccagctcaggtccagatctagatctggccttcctgttaggcttcctattgagctcactgttatgtaagacataagttatagaaatgattttaaataacccaagacatcatggaataactatattagcacatctccctttactttttttttttttttgagacacaatcttgttctgtcgcccaggctggagtgcagtggcgtaatcacagctcactgcagccccaacctcccatgctcaagcgatcctctcacctcagcctcctgagtagctgggaccacaggcacatgccaccaagcctgactaattttttaatattttttatggagatgggggttcactgtgttacccaggctggtcttgaactcctggattcaagtgattcttccgcctcagcctcccaaagtgctgggattacaggtgtgagccaccgcacctggctacatctcccttttcaaaggacacatagtatcttattttctgttgttggttagttaggctaagtaaattacagccaactcactctacgaaatattaggttgctgttaataatgcaaaatataaagatcatcacaacacagaaaaaaatttccaaaacagtattaaataaaaataacaaaaaagtatatgaaaaaggatcacaatcatgtaaaaacatgggtacatgtggataaagataggaggggaacagaattatcagttatattatggtagcagaattgagtgagatttttcatctttaatttctttcaatgttgcattaataaattatttaaccagtgttttaaaatactctatataaaagaattagctaaactatatccatttttcatagctataaatccacagaaacctttgggtgtattttaaaaaatattttagatctctcaggtttcattattttttttccctttaaaaaaacctttatttcaccattattctttttttttattattatactttaagttttagggtacatgtgcacaatgtgcaggttagaagtttcattactttaaaaccgaactaggagtcaaattcagttgtctctcctttgggataggcaagttagggaagctctctttctgcttcaaccactgcctccagattgcggctgctatcaaggcagaatggacaagaatattagaataaggaagtgacttctagtctcggagatccacttactgacagcacaatcctgggaaagtcacagaacctctctaatccttatgttcctcaacctctaagcttctgtatttccgacattgttcagggaagccaactgcttaaagattaatctcagatcctggacccatcccccaccccgctacttcctctacctggggaaaacagttcttagtattggacgccaccttgccagggacagatgaaaccttgaagagttgattatatccctaaagataaataacatttgttccccaagaagaaaactaatattcactgaacacctgtgcacttgacactgtaccaagtatttcatatatgctatattgtatatcttcctgggtcccactagaccacagaaccaatttctggagggagccagggcaatctgcattttaaataaattatttatttaaataaattttaaataaattatttatttaaataaattttaaataaattatttaaataaattttaaataaattatttaaataaattttaaataaattatttaaataaattttaaataaattatttaaataaattttaaataaattatttatttaaataaattttaaataaattatttaaataaattttaaataaattatttaaataaattttaaataaattatttatttaaataaattttaaataaattatttatttaaataaattttaaataaagtgcacacacaagtttgaaaactaaaggtctagggacaaatcattagggtgttgtggtgtacattttttaaaatgtaatggaaattatcagagtatattgcaagtagtaagtgttaagtgttgtttctgtaaaaacagttgtcggttatatattgtctacatgtgtactaggtcacaatataaaatttatttcttactgtcggtcacagtcaaaaggtctgaaaaacaccggctgagcattacagacttagaataatgcacagtgaggcagaataaaaacaaaaaagcaagaagaaggagatggcataatatctataatttaagctccacaagtatctagtgaattagcaaaatgcaagacagctaaactctgatcattcacagtaataagcggaattaaggtattggtaatttggccaaaaggccaataacgttactttagccaataaccttattctacccccattttttgtttactgtagataagaacaagtagaagggacaaattaatcaaacttcactatctcttatgccagatgggatggtcgttaagaaatgcatggtatatagaaagaagggaagcagtttagttcattcataatcaaattccaatacctgaataaccaaaagtaaccattcattaaaaccttctgtggggtcctactattgatcatggctaatcagtcctgaatactccaaatatttattacgccatccccccgccgcccctttgtttaaaaccaagccacggaatttatgggaaactagggtaacaactctatctctaagtgaacttaagacaaccagattccctagcagtggcaagcgagcggcgcgcctgcttttctccactccgaggcgggaaaagcagagctcccggagtcgcgatgttccttagagtgggaacgacacgtagctcaagccagtgccccacaggaaccgggtggcagttgaccaggtgctcccccggggacttggggcccggaagccttgcctacagaggagaataaaaagcgcgatcccacctgcacacatacaaacacactatcgcccgcgacaagccaagacagaagcacaacacgtgtttctgtcgcgtgggggagacgtgaaaggctgggggcgtggaggactgtagcaaaaccttctctacccccggcccactgaccctacccttctgcccccgtctctccagatcggctggagttcgagtcctcagatcgggaattcacgcgcgggaaaagcgcaaaagagagcgaagcctgctgacgaacgggacaaacgaaaaccccacaaacttaccttactggcaagtcgccgccgctcgctgtccggccctgaactatacgggcaggcctccgagactgctagacgccagaggggcgggtccggacctgctcgagccggaaagaatcggcctccttagtgggcaggttcccgctgaagtgaagctaaccgagactgaggcttaaaaggggtcgacctggttaactagaaagggcgaccagtgaccctgacctggacgcgctcggattggtcgattccagtgcagtctcagatgagactcttctatgattggccagaaaagtcaagcgggaacccggaggttggcaggtggggggcgggaacaaaacaaagttgttaccctagcaacggagagacgccacgctctgcacagtctattttcggagcctagccagagacgggaaaactgaccaaggtgaggaaactcgaacctcaagacggggaaagacagggtcctcagatgctgtggctatcagaaaaactagggagaactctagatatttataactctgcgagataccccaaaaagccacaagttgggcaaggtggagaagacccgttccctaaatcccgctatcctagactcttcactaaatcccgctatcctagactctagaaacaggacgctgctttaacaaaactcggttttacaggatgtgagtgaaagatggatgctgatcgactgtcagaaggcaaaagtaaacatctgaaagtttcccaactggtcttctctcaactctcacatgcacttattggttctcccttcccattaataatgactaatttgggaatgtaaaccatattttcttataggaggacctgggtgctccaaactggagcagccactgtacccttctgttttatatgtgcaggcacgatttatcctggcctagcatgccttggttaggaaatgttttgggggatatcacacttcagactgaaaaaaaaatggccccagtacttactacgtgaataatgtcctttgtgcgacaacttgaacgctgtggtctgagggttccagtgttgcttggttagataagctgaggagtgagaagtaatcagaccttcacttggtgggcccgagtgtactgtgcagagactacttgtacctacaagacctgctactcgccaagggctgattgggagagtaagtattacatgtcgtttgactgtaactatcaaaaggtggggaagtgtgaccaaaaaaattaaatctgagtgaagggagagaacctagtttgaccaaagagggaggagtcattactccttaagagcttcttgtgataaggattcagaacagagaccatatttcctgaagaaaggaaaaaaataggactagggagaaaatttaaagca

SEQ ID NO: 12689 - DNA, 6000 bp, Homo sapiens; identical to SEQ ID NO: 2642
